United States Patent Application Publication US 2015/0376612 A1 - sequence listing, part 34

SEQ ID NO: 82135 - DNA, 1929 bp, Homo sapiens
cactgaccgtgtaccaaccctactgagtgctggatccatagaaataaatgggtccagtgccgaccctttaggagcttatattccagtgggggaagagagacattaatccaataatttcactgtgaatgcattaggttagcccaaaagtaattgcattttttggccattatttttaaatgctgttattttgaaatggcagaaacggtaattacttttgcgccaacccaacagaatggcaaactaagaaaacgttgtgagaaaaaaatatgtactaaatgtaagcataacaaagccttgattcggctgggtaaaataaagtaaaagcatttagataaattaaaaaaaaaaaacacagcaaaaaacccaaaaagcagaaaaataacttccctgaggaactagttctatgtaaaatagtattaaaaagacaaacctttgattaagcaattttgtgtgaatcaaatttgtggaaataatcattaatgcctgtaaatattcatgtccaagccttttagttattgtgttgttaatagtaacagaaatttggagacaataaccagcaatgggagaatatttaaagtatggtataaacacacaaggaaaccccatgcggtatttaaaaatcaggaattcaaagactctttagggacatggttacatgttagtatagcgttaagtgaaaaatacagctacaaaactgcacacatcgtatgatttttttttaatttttatttttttttgagaccgagtctcactctgtcgctcaggctggagtgcaatggcaccatttcggctcactgcaacctccgcctccgaggctcaagagattctcctgcctcagcctcctgagtggctgggattacaggcgagtgccaccatgcccagctaatttttgtatttttaatagagacagggtttcaccatgttggccaggctggtctcgaactactgacctcaagtgatacacttgcctcggcttcccaaagtgctggcattgcaggtgtgagccactgtgcccggccacacatcatatgagtttaactgctttaaacaaagaaaggaaatgcaatacaaaagcaagacttcaagattacaagtgagtcacaatatttttgttatgcttgtctgtgattccccaaatttctgcgatgaatctgtgtgagttcattataaagaaagtaattgtaaaacagacaatagattcacttcttgagtatacatcgcgtgggtggcaccaggtggatataggtaaatgtaaaaacaaatgaagcatccccctctggttgaatgtagtttttgctctgaaacacttatcattttctgttttgaattagacttactagtgcacccacactatctgactgtgagctactctctcctattagtgggaaagaattgagattggcagctaacactggcagtgttacctatttaattaatttaattaacattaagtaactatttgccaggtcctgttgtaatttcccacaaatactaacttctttatctgtcataaaaattctgtgaggttgtaaaatggtgcaactgctgtggcaaacagttgggctgttctttagaaagtcagacattgaattaccacctgactcagcaattgcacacctaggtgccattgatcctcctcatgcatagattctgtatttgtaaatttgcctttttgctgaaatctatctgtaaccttcaaatcagttcttatggctcttttagggttatttgtgcagacgtgcatatagtaaccccaaatttgagttgcctgatgcacacattcccagggaagtttgctctaccttctaatttcagctctcatgcagagatgcccaccgggtggagctggtaatgggtagcgcagaacagtgcaagaagcgctggctttggggccaattatacatagagtttgaagcacaactaaagcat

SEQ ID NO: 82136 - DNA, 2271 bp, Homo sapiens
attgtggttattacatacaatttgtacagtatatcatgcacggaaatttcttctattcctataaatctggaattgccagcgtaaatgcccagacttacgaactgctgcaaaacacaattacctctagatacaaactctctttaggacataaaaatcgttgctactgagaaggctgaattgcaccggcaattttgtaaatatttgagtgatatatttccttttggataagttttcatagccttggaaagctgtcttgtttcttaatgcttttgttgttgtatttttttttccctgaatatcacttgtggcctgattgtggttttcaatcatgcttagtaaatcagactattggacaaatgtcatttatgaaaggctcagaactgtacggccttctgctggcattaagaagactgtctttatagcatgtttcttaaagacacgagaggaaagaaaaacaaaattcaggcacatcctgtgctttccccccaacagggtcagtttttcaagttagaagttgtagacaagtcttccatttttaatgagggctgatacaaagcaccttcctctttatatgcttcgatcaatgaagggaatcactccggataatctgggctgcttttcacaccagcaaaacgttaccagatgcagaaagtttctgcacattttctagttaggctttattaccaagtatgatggtgaaggttgttataccctgtatcgattttctacaagttctaatattggagataaggagagttcttccatcagcttccagcaaacagaacggagactgttaaaactcctcataacagcttccaaaggaagacaacagtgatggattatagactgccctggaagtgaggaaacaccctcatcgagcaaacagaaagtgttcaaatacaagccacactcatgaaatgggaaataggctttttttccctctcttgttcttcctccctcctcctttccgttttctttttcttcccccttcctttacttcccccatccttctttcttccttccttccctctttcttttcttccttccttcctttccctccctttcttcttttttccttcccttccttccttctttccttttcttcgttccttcttcctttcttcctccttcattcattttcttccttctttccttccctctctcctttcctccctccctctctccctccctctctctcttccttccttcctctctctttctttctcttctttatttctttctctgtttctatcttacctcagttaattcttataatattctatgcattgcctattaccagtctgcattctacaaatgaaaaaaaaaagtttagggagactaggtttcttgcttcagtcatgtaccttgtgagtggagtagctgagatttaagcccaggtcaaattggagtctgatacacaacaaccaaataccgtcaattagactgcttctcccagccgtctttccccatgttcaccctaagaatccaacactcacaggattatagaacactgcctgaatgtgttccttgaggtgctccagcaccatgacatagatatttgagaaatgaaaagatgaaggatatactttcaccatgtcaacagcatgaggaattatgtttgcaccctatgcatgcgcacctaaagaaataatcttattaaaggcacagaaaattgccagggagagcttggggcccagtagagaaatattcaataaatgtggaccaagtaaaccgggcaaaaaacaaaataaattgggcaaagaacatgaattagtatatgaattagtatataacagaggagaagtaacgaaacagaggagaagtaacgaatcagtgcaaatattaaacggaagagaatttcttttttttttgagacagagtcttgctctgttgcccaggctggagtgcagtggcaccatctcagctcactgtaaccttcgcttcccagattcaagtaattctcgtgctcagcctcccaggtagctgtagccgggactgcaggtgtgcaccaccacacccggttaattttttctattttagtagagacatggattcaccatgttggccagactggtctggaactcctgagctcaggtaatccacacgccttggcctcccaaactgctgggattataggtgagagccactgtgcccagccaagaagagaaaaaattttaatgtttctagtaatcaatgcaatgcaaaataaaataacaggatcccaattttcattgatcagaatgacaactctatttttctaatcataatacc

SEQ ID NO: 82137 - DNA, 1757 bp, Homo sapiens
taaaattcagagaagttaagtaactcgccacatgtcacacaacaggactcaaattggaatccagaccattcgatgccagaacctttgctatcttttcttcatgtgcctttaacattgaagaatttttagcaactgattttagctcttcccataaagagatattgtttttacagtgttttgacactttaagatccattcgaatcaaaattgaaacttcacatgccaagagaagacaatgacatgatgtggtgcaggagggagatccccgctgggaagttgagccttgtactgagcctcatattgagccctttcttgctctgtgaccttgctcaagccacgtaagtggcctgagtcctagtttcgtcatttgcaaaaggaagataagaaccaccacatggagttgtgaggattgagagtgaaaatggatcaaaagttcccaatatagtaccaggcacaaagtagcgctgtgtaaatagaaactataaataacagtgcatgtatatctaattttagtgacgcttacctcttggatcatcataatcattgtgcttcaaggagcctgtctcctctgtatctgtagccttactgcctcatgcaccacctggcacaaagtagatgctcagcaatctgtagttcctaagtcttttaacgtcttaacctttattttcctggtttttaaagtggagcactcctggccaggtgtggtggctcatgcctgtaatcccagcactttgggaggccgaggcgggcagattatctgaggtcaagagctcaagaccagcctgaccaacatggtgaaaccccgtctcttctaaaaatacaaaaattagccaggtatgggggtgcgcacctgtaatcccagctactcgggaggctgagtcagagaaatcgcttgaacatgggaggcggaggttgcaatgagctgacatggcgccactgcactcgagcctgggtgagagggtgagactctgtctcaaataaataaataaataatgaataataaataaaataaagttgggcagtcctattaccatatggggtgcttgggataaaatgaggtcttatgtacacaatgaaaagtgtagggattggcactcggcaactcaattttaacaagttgaatttaggattctaactgtctatagacacttagaacatcctcaaatgctttccaaaagccccactccttaccatcccttctcgcgtcctcctcaagcctgaatctaccaaggagatttctaggacgagcttggaactgtgcctgccctgctctgtggacatggacagctggacaatgccagacacaggcacgtgctcatcaataaggcacaggcagaactcagggaggaggctgtggagagggatggagggtggggggaagcctttcttattgaatgccgactcccattctgcaaagcggtggtgagatgtttaatttcctattcccttaccaaaggcgagatccaggttgtcactgtttgtagcatatgcacagaaactctggtcataaagaggacgttttatgaggacatatgctactcgcctagaagcactgccaggcctgaatgctattccttggcgataccatgattatatctccatcgagtccggggaagcctctcaggcctgcaaggctgcaattttgaaatggatttcacagctgcaaactataagatgacccaatttgtcttttccatttctgcctcctcttctataactatggaaatctgcatccacatctccgtgatgggttgcat

SEQ ID NO: 82138 - DNA, 1159 bp, Homo sapiens
atgtaaccctacaagtgctggtggccatttttaccaccacttgggaagaacctttaggagagtaaagcctatccaatgaaacaagagctgaactatggacagggacaggctcataatgatattatttaagaattcagaatgctcttgctttccacttcccagtgatagtagccaataactttctttttgctttttctgctaaatctcttatcatttgcagtagcaacatcttaactaatagactccctaaactcagctcatgaaacgtctcacttttcaaccacattcgtctacagaagaaagttacgacctttcagggtgaacttcagtgccttttaggttttaggctcaacgtatattttgaacttgacatccgagtcacattctccaccacagtcccctcctctctcctccagtgttaccttggattgcatgctcaccattcttgaagaacaagtggggctctttctctgccatggccatgctgccttgggctgtggtgactcatgtatgtgtctgtcctctgcacttgaatgtgagctctattaaatggggaaggggcaatatctcatttcacattgatttttctcattgtgccaaacatcagttcttgcataatggtaggtactaagctaataatttgcagaactaagccaaattctccatttcaagaagtcttctcattacacattgaacatgctcagatgcctggtaaataatccccataagtgattgaactgaaaaagccactttgcctctgttttcattcactcagacatcatattgcagggctctgttggaaactcatttttgttgttgtttaggctggaccttcaaatgctagtgcctttccagaagtcaaaagacttgattttgtttctttgtttgttgttgagacggagtctcgctcgggctgcagtgccctggagtctcactcagactcacttgcccaggctgaagtgcagtgatgtcatcttgcctcactgcaacctccacctcctgggttcaagcgattctcctgcatcagccttccgagtagctgggactactggtgcctgcaaccatgcctggctaatttttgtatttttagtagatgcagggtttcgccatcttggccaggctgatctcaaactcctgaccccaagaagtgatccacctg

SEQ ID NO: 82139 - DNA, 2588 bp, Homo sapiens
gtgggatcccaggctgggccccgcggcgggtaagtgcctgggagaggcggcgggatagggtagggtgcagggaacctcctggcgccgagcctgactttgaaatccgagctcccacagatcggaggcccagatccctaaggcccgaccccactcttagcgtcagtttccccttctcaacacgggtgttggggaaagaagtccacgtcctcacctgggtttccatcctgggtccaggcacctctccttcggttctagattaggaagggagggcagtgcccgacctgtgactgttttttgagagggcaatagttaacccacaagggtggcgtcaggaaggcgacaagacaaagagaacgagtagccccacgggggacgtccccggagcccctcactaccactctacgcaccgtggccaggccacgtctttcctgcccccagcctgggccttcacaccctgccctccccagctcctggcctaaatcgtcatgggatcgcgccaaattattgattgttgagtgagttgcagttatcagaaagaaagatgaggagggaagttatttcaacaccgtgatcccagcacactgcttatttgggacaactgactggggacctataggagaagaaagctggtagcgtctcagtctagcccccacagccttagaagagccaagaacacgttagctcctgctgcagggatgagcctgcagccctatggagaggtggtggggcaggtccccatctgcaacctgggtctcctttctcagctctgcccagtaaagagaggagcccgaagcccatacagaccctgcatttccggaaagagacttttcctgactagagaaactgttaccttttttctttcttcccagcattcactttaatcattattatattactataatgatagtatttactattgttgcttattgaacgtttactatatgtcgtaagcccgaaaagtggtaattgtctcatatactcctctgagtatatgagggcctgagataggttcaagagggcctccttattcccagatagctgattctagggaaagccacttaaagggaatctccttcatctggaacttacattgcagcgtacatttcttgggaagcctggttgggttgaatttaaaaatggaaaattcaactagagattaagaatttgagtttttttgtgtgtgtctatacttaaaatttggtgtgtaatattatgctcacttttggaaaaagcaaagaacattgatttttctgggatgtaagttttccaacaaaattgcgctataggccatgcctggtggctcacacctataatcccagcactttgggaggccaaggtagatggatctaccttggtcaggagttcaagactagcctggccaacatggcaaaaccccatctttactaaaaatacaaaaattaggtggacattgtggtgcatgcctgtagtcccagttactcgggactctgaggtaggatcacttgagcccaggaggcggaggttgtagtgagccgagatggcaccactgcactctagcctgggcaacagagtgagactctgtctcagaaaaaaaaaaaaaaatgcgctatggcaaaaaaagaaatggcatcctttggttcacttttgatttttacagcaatattagagaggatcttccccacccccttcaaaaaaaactgtatgtgaaagtcctcagttttcccccaggacatctctaagtcctgagagagcttgatctgcctttgaaatgagtggtaggtataagctgtattttctcttctggaatctggtgtggttttgccagtccgattgattgagtgttggccttcaggtccagcatttctccatcactttcaatgacaccatgaaattctgcattgatttgccagattcacagactttctttacaacccacttgcattttgatggctttatggtgttgagtaggaaagctagcatggagatgaataaggaatcatctttttcttaaaaatttttttgttgggacagcttttgctgccccacagcaaccacttaaatgtaggaactccagcagtgtactgggatcattaggacagcctgagtcatgatgacctcattttgcagttgaagaagtgggggccctgaagatttcatgacatctacccaggtaggaacagctcctataggcagtcaggggttacaggcaggtttgggtcaaatacctgaaaccaaccccaggacaaggaggttgctggtgttttattaacacctactgtgagccaaggactctgctcagcagtttacccacccagtaacactgcgtgagattgtggctgaagaaacagatgcagagaggcgaagtgattttcctgaaatcacatggctagaaggtgagaaaccagggatccccacctggtctgtccagcttcaaagcccatcagactactgctgtttgatgatgctttttgattaggtgaaacggttggagggaggtcccacctgttcttgaccactttgcctcagccatggttttccaagttttagttattaatgtgtcacctgcataattttgccatatctgtgtatcaccagtgtagtgactccct

SEQ ID NO: 82140 - DNA, 1138 bp, Homo sapiens
tttttgttaacttctaatgtagatttctaagtatgagaaaataatgaagttaagtatgtttctcagtataagaaaatacttttgaatgaattgtgattattagtagtatataaattaatatattatgattgtaactttgcaattattggtcatgaaaaaagtagtgcactgcatgtgggtgcaattaaattgcgtgaaaacctaattgtgaccctccctagccttgggctgtagggcagagatacccagttacatgaaagagtgtgagccccattccaaaaagctcccatcctctgagtggtgctcaaaagtcgcctcctaaccagtagcacagcctgtgtttctgctgctctctagaacgcctcattccaacctctgacgcccatctgaccgtgctggcggttgccacactgtcctgtcttgtggttttctgtccatccccatttcacagtgggcatttctcttggtttctgtcccatccagagcacaccatggccacgcccctggaggatgttggcaagcaggtgggtaggtcttgtccgcttcctgtggccctgatgggtccctgcagagcctcacgctgcttgtcgctccttgtcctcttccctccaggtgtggcggggcgccctgctcctggcagactacatcctgttccgacaggacctcttccgaggatgtacagcgctggagctcggggccggcacggggctcgctagcatcatcgcagccaccatggcacggaccgtttattgtacaggtaatgaggtgacatctcaggctgcagggaagtagtcaccttcacaaagcatgcactgactgtataaaaaaagaggcagaggcactggaaattggatgttagctgttgttgattttgccatcctggtcccctggccctctccactctccatttattctcagtgacatcaaaatgacccagcaatacccactcagcagcagcagcgtcacccagtggctataaggccattgagcttcaggaggtgcctagcgcccctgctggtacctctctccccactcctgagaaagagcaaatatctccaaaaacaggaggaatatacccttttagaagcctttgaaagcaagtttattatttttttcctgggtatagaagccttgccca

SEQ ID NO: 82141 - DNA, 1022 bp, Homo sapiens
gcatcacagaccctatctcgacaaaaatcaagaaaaaaaattagccatgcatggtggtgcacacctgtggtcccagctactctggaagctgaggtgggaggattgcttgagcccagaagttcaaggctgcagcaagctgtgatggtgccactgcactccagactgggcaacagaatgagatcctgtctctaaaataaaattgtttataaagatctcccccaaaatggagagatacggcaactcactgctattctggtctcttctgattgtttgacatcctctgatgcaccttccgttaatgctgggacttcatccatccagcctctctgccacagtaaaatagaacagcccagagcaacaaagaaaggaggaagccgcccgtccgctcctgccccagctcgcctgctccgtggctgacgtgttgtctaactactctccttggtgaatcactttccttaatgaaattgtgatgctcttgtatgtgcacttcagaaacctgttcttttctctgtttgctgcaggagctctggaagatcatcgcagaaccagtaacatgacccatcgcctccacaaggcgcggcgtctcgactgttcttagagtgtatttctagtaaaatcagaagctcaccaaagcaacatgcttgagattttgtcattttaaaaatatggttacacgtaccttagatgacccaagatggttttctggggtctgtccctgcctcccagttgtagccagagaaggttgttgctgtgggctggaggtcactttagttgcctgtttctcatggttgtgatgtgtgctccagggtcaagccgagccacgttccttctcagctcagttccacccacgtcagtcatttcagctgtgtgctttacttgcggttgcggccctggctgtgaggtggattcttgtactgccctctgtcagctgtttacagatgggttgactaccactgccagtattgccatcatattgccgctcggcacaaaagcctcatttcctcccagggttgggtatgctc

SEQ ID NO: 82142 - DNA, 1030 bp, Homo sapiens
cagtagtttgagaagctctggggcctaccacatagccctcaacctattgctgttttctaaaattcctacacaaactccgttcctgacagacttgccataatggagcagcattgcagatcactacagggaatattaataatgagtcttcaaatcagaaccccactagacagagccaacaactggcagtacgtcagcactaatggtgacaatttcctagcactcctgggtacaagtccataaatgtaattggcaccaagcaatagagttgtcacagctttcacctgccgcattagggcaaactgcttttatgtctaaaccactgggcctgaaagcttcctctaagtagagcctggaattaatcttgatccactgtaattcaaagtatcgtcagattttcatttcccagagtgggagcgcgcccccattgccatgttttatggccttgtttgagcctctacaagtgcttgtttggcagcgatattcagaatcaccaaaccatggggatgttctgctaggtaattagcccaggccagtggactcaatttttttataacattttcagaaaaatatgtgacccaaggaggggacttggctgttcagctgcagcctgcatgggaaagaactgttaaaaccaacaaagccaggcacagtggctcacacctgtaattccagcattttgggaggccgaggtgggtggatcacctaaggtcaggagttcgagaccagcctggccaacatggtgaaaccccgtctctactaaaaatacaaaaaaaaaaaaaaaaattagctgggcgtggtggcggtcgcctgtaatcccagctacttaggaggctgaggcaggagaatctctacaacccgggaggtggaggttgcagtgagccaagactgcgccattgcactctaccctgggcaacaagaatgaaactccgtctcaaaagaaattaaaaaaaaaaaaccattagtgaaactgtggtccccaaagcttctcaaactagtatgcacacgaatcacttgggatcttgtcaaaata

SEQ ID NO: 82143 - DNA, 1050 bp, Homo sapiens
attagccaggcatggtggtgcgtgcctgtaatcccaggtactcaggaggctgaggcagaaggatcaactgagcctttggaggtcaggggtgcagtgagccttgttggggccaatgcactccagcctgggcaatagagcaagactctgtctcaaaaaaaaatgaataaataaatacaaagaaagctggcatcagcttgtactcatgccagtaaaacaggagcatgcctatttgcctacaactttgctgacactgggttttcccttttttaaaatctacagtgtccttgtggtggcccagttggtctgtccagacacagtgttctggggtggtctggctgggatgaggctaaggtcctggcactacctctgttagggacattgggcatctgtcagggcagaatcctcatgatctctgctgtcaccagggatttctcattgtctttgtttactgcaggatccagacacattagtcaagctgcagccaaagtcgacgttgaatttgattatgatgggcctctgatgaagacggaagtcccagggcctagatctcaggtgagttgagcacacctgagtggggtattttggaaaagggaaaaaggcgcctaagaagcaaaagcacagccaagcttagggacctgtattgattgtcagctgctttcagagagttcaccaccagagatctgagatactcaatgaggccattttgccatacaaagccaaagaagggctgggcgcggtggctgacgctgtaatcccaacactttgagaggttgaggcgggcggatcacttgaggtcaggagttcaagaccagcctggccaacatactgaaaccctgtctgtactcaaaatacaaaaattagccaggagtgatggcggttgcctgtagtcccagctactcgggaggctgaggcaagggaatcacttgaatctgggaggcagaggttgcagtgagcctcctgagtagctgggattttaggcacgcaccaccacgcctggctaattttggtattttgagtagagacagggtttcactatgttggccaggctgg

SEQ ID NO: 82144 - DNA, 1042 bp, Homo sapiens
gattacaggcatgaggcactgcactcagccctcttgtgatgttactcattttgcattaagtgagtactttgcagtgtaacatttttatttctttaatgattactacatattttagttttctttgagtttgctctaaggtttaccatacatatcttaacagaatcgacttcagatttgtatctctttttttgttctgatgtataaaacacatacagaaaaattcataaaaaataaaatcacagcttactgaactattataaagcaaaccacccatgcacttagccaaaacaagaaatacattgctggcacccacagatgcctctgtgtgtccacagatagtcacgatatggtgtacttcactgattcaagcttaatcctaaaagcccaagaatctagggagtggcagtgagcctgagttggtcttttctttctccaagaatgcagaggctgtgcattttttctgcaattacgaagagagccgaggcaattacctggttgatgtggacggcaaccgaatgctggatctttattcccagatctcctctgtccccataggtaagagctgggaaatcattccttggatataacctctgtttctgtctctcctagtcgtggctatccaggtattaggatgtggcttccagcaggcacatcccagagtgttgcctgacacttcacccaagggtaggaaaaaaataaataatgtgtaaagggtatattattagacatattatatgtcctctctcatctactccttccccaaattccacagggtaagtatgtattaatatccccattttgcagataggtaaacaaagcatagaaaggtttggtaccttgcgtaggaatcatagctagaatgcaaacccatctgtgtgaccacagtggcacccaggtaggtgtcttaggttgagtttcctcgaagaagagcctgaggtggggatttcctttttccctgcttttttttttttttttttttttccagacgaagtcttgttctgtcgaccaggcgggagtgaagtggcgtgatcttggctcactg

SEQ ID NO: 82145 - DNA, 1119 bp, Homo sapiens
ccctggactcatcttgggaagggccatgggaggtcctggctagagttctgcccaaccttgaccaaccccagcaatttttccaaaagccagtcaagggcattacatttgttcctgggactggcagctgggcctcctgggtgccagtccatctcaagtgccatattctgtgatcacggatgttggctccccctcgccctatgcaagcaaacacactctcacctcctctcccagcctcccggagctctgagcacgccccacgcatggtgcaggagggactggacagatctgaggaaggccgtaaaatggggacaggaggattcagctcaggagtaagggaagaggtcctctggccccctgaagatgagaatcacccctctcagtgcacctggggatccccctaaactgtgaattctgccctggacagggctttgcccttggaggatccccaggtggccttacccgtgattcttactcggcatcctccattccccaaactccctcctccctgttaaatgtcaacctagacctggacctgggtgggaggaaactgtagcctgagtgtccacagggacacacgtgagccacagggctagaagcacaggcccgtcaccccaggaggaaaagcccagggtctggggcagcagagccatcgcatcatgtttcccagggcaacttgaggtctgacttttggctccctcgccctaagaggctcttcctctcttttgctcatccaccttcacaccacttgtgagctgacccccaggaacagcttggctgttccaccagagcagagggaatcattgctggactggatttcttctggagggaagcaccatgaattaaaggtgccagagctccatgcatggaaaagtggcctgttggttcaacgtggtttccttgtacttgatcctcctgaaatgagagattttcctgagatgactgagtatggagattaccaggcagatgataccgaaatgcttaaaggggctgtggctgaggctgtagcatctctgctggaggtgagacactctgggaactgatttgacctcgaatgctcctaaaagagaacttgatagcctgacagcagagaagtattatttggtggggagtctgagaaag

SEQ ID NO: 82146 - DNA, 1136 bp, Homo sapiens
gggaggctgaggcagcttgaacctgggaggcagaggtcacagtgagccgagatcatgtcactgcactccagcctgggtgaaagaactagactcttgtctcaaaaaaaaaaaaaaaaagaatgtgagctgcgagtacggaccacatgttgtccatccttgtgtccctgtcacatagcatgtcctcgatttacttaatgaaatgcatggccttacagtgcttcctgatcccaaggcagagttatgcatgtagagtgttccccaagacatccctaagaggtatataacaggcatttaataagtacttgtcacctaattatttaacaagaccatttccaccaaaaaagtccacattcactcatgtttcaattataaattttatttaagaatactgactaacacaggaaacagatttaattcatggaattgtgcatatggtcatccgttacattgtgacatgttaattttttttttatcatttattggcactgtcaacagattacttgtgaacaagatcactttgtacgcttaagtctgcgatgctacttagctatggttttctaccatgagcttatatatagataggtgtaggtatgtagatacattaatgctatacacaattttgcatggttactgagcgtcagtaaaaattatgaaaaaacacccatttataataaaagtgaggatgtactaagacttgctattactggaccttgttttctgtaaaagtgatgacacttgctggacggttactaaactctatggcactaatgtatgatggattcatttccagactgtcggccacggaagcacttcttcatggcctctgccctggacagcagcctgtcctccgggctccccatgtttttaccagcttctgctgagtttctacaatcttgagctctgctgagaattcttttccttgaaattcttctagctaaagccccagcccccaaaagagcatgtctcaggaactcattatgccctgagtcaacaagaacttgttgataaatggcttaaaagtttttacaagaagtaacttcccttggtaaggagtaaataatagctctggaattttccagataaaactatttcatttctctgtcagtgccccatggggagagaacgaaatattggag

SEQ ID NO: 82147 - DNA, 1053 bp, Homo sapiens
aaggagaaactaccaaacgcagagactgagaaattctggatgttttaccgttttgatgccatcagaaccttcgggttcctgtcacgactgaagttggcacagactgccctgacagtggtagctttgccaccaggctattacttgtactcccagggcctcctcactctcaacaccgtgtgcctcatgagtgggatatcgggctttgccctgaccatgctgtgctggatgagctatttcttacggagactggttggtatcctgtatctgaatgagtctggcaccatgctgcgggtggcccatctgaacttctggggctggcggcaggacacatactgtcccatggcagatgtgattcccctgacagaaaccaaggaccggcctcaggagatgtttgtgcgtatccagcggtacagtgggaaacagaccttctacgtcaccctgcgctatggacgcatcctggacagagagcgtttcacacaggtgtttggggtacatcagatgctcaagtgaacaactgggacctggacctctgggtaaccctgggtcgcctggattaacaggaaggctgagggtgtgggcaaggctgaagaaaggggactgggtacttggagactttgcctgggcccctgggaacatgtgttttgtggtgaataaattcacaaggcaagagctggtgtacaggtttaggaaaaaggctctaagcaagttcttacagcacttgtttgtgacattcagtcagataatggccagaagtttttgttaagagccagttcttagaagaacctatgccaaggtcacccatagagtccattggtgtgaaagagaaaggcaaagaggtgtggcgggggagcgtaagatttggagtcagaagtctcagttctgtcatttgtcctggagcaggttattgagtctctttgaatcttggttttcacatctgtaaaatggaaagtcctgcttgtttcatgggatgggtgtgggaataaacaataaatgtcaaacgtgtggcagactcaacagcctacagcagatattattaagcatttggtcagaggt

SEQ ID NO: 82148 - DNA, 1077 bp, Homo sapiens
ttaccatggccccaccacctgctgccggaagtaaatcccaccggcccccggaacccctaagagcgcatgctcgaatgtacaaggcgggcgtgatctgcgttgcaccctgggagttgcggtccaggaatcgtggctgccgctactcccaggcgttatgggaacggagtcccctcctcttcccgacgtgccctgcgactcagcggccgaacccggaagttccgggccgagttcctcgtgccaacgtgtcttgtaaggtgcggctagaaactggggacatggcagcgcctggcccagcgctctgcctcttcgacgtggatgggaccctcaccgccccgcggcaggtaagtggcggccggcgggctgctggcagccgacgcggagcccgtgctgttcccagttggggctatcgaccacccagggtaggcgccaaggggtggctaaggaccgcctacgtcctcacggcgctgaaccctattctgggtgcactggaggaatgagagggaggccctaaccagctcttgaagagctctggtgcttggaaagatgagacggggctgaagaactcttaagagcaggaaacttgtgctaggttggaaaatgtaatctggactcaccgctagtgctcgggactgatagaccaggatttcaacccaagatcaggcccccttatcagctatgtgtcggccccaatcctgtaaccaatgggctgtgccgtgagtcatgatattaaaaacaggtttccaggtcaaaccgacctagtggagtctcatcttcacctcttgacatctgtgtgaccttcagcgagtcattaacctctctgagcctcaacatctacagctttaaatggggatgttacctgttccatatggtgtctgtgaggatcaaatgagattgtgtaagttcttgaaagtatgttggacacaacacactaggcctcagtaaatagtagccacctccaccacacccatctccagcccctgcaatggactagggagatggaggagccctaggttattacaggctgcccgctgagagcctctttgggcccttggaaacttgctttccactttcagattt

SEQ ID NO: 82149 - DNA, 2278 bp, Homo sapiens
tcgaggctgcgatgagctatgaccatgccactgcactccagcttgggtgacaagtgagaccctatctcaaaaaaaaattttttctttaatttttaaataagaaaataagacttatgtacttgtgttacccttagagttttggtctcctgattattgtgtggcttatgactgttgtattttctttcttgaaatttagaaaattaccaaagaaatggatgacttcctacaaaaattgaggcagaagatcaaaatcggagtggtaggcggatcggactttgagaaagtgcaggagcaactgggaaatgatggtaaatgatgggttgctaattacatctggtaaaagattaacttcttatgaggatattgttgccaagtatcataggctgccctaaaaccttgtccccatatggcgggctttctgcttccttttttgggaaacattttcttggcctttgcttttcctctgcttttaatccagtacatttctggagttactgatggagaactgggtactcagatgtgtgagtagattcacctagaaaggtcagtggctgtatctgcacatgataatctctctgcctggaatacttcttgcttgtacccgttgacagcccttctagccccagtcagaccggtcttcatattgtccctctgacagcccccctcacctccccatcactgaaacagaatctccagcacaggaccccgaaaaaccagagaggcttattgaccccttcactggagagtctgacttgataggtctgtggagcctgggaatcctatttcagtgagtacctctgagagattctagtgtacaaccttgctaatgtagcattctgtaattattgtaaactatccgattatatgtttttgaagagcaggagtatgggttattcatctccatagccacagggcctcctggcctgtaagaaattgtaagtggatgccaggcgcggtggctcacgcttataatcccagcacttggggaggccgaggcggatggatcacctgaggtcaggagtttgagaccagcctggccgacatgatcaaaccccatttctactaaaactacaaaaaatgagctgggcgtgatgacgggcacctgtaatcccagctactcaggaggccgaggcaggagaattgcttgaacccaggaggcagaggttgcaatgagccgagatcacaccattgcactccagcctgggcaataagaacgaaactccgtcttggaaaaaaaaaaaaattataagtggagaggtggatgaattgattgttcttttaacccctgttgtccccagagtcctcacatcttggaaccagctcctctagagcaagatttctcaccttcgcactattgatattttggaccagttagttctccattatgaaggctgtcctgtgcattgtagggtctttagcaacatcccaggcctctacccactagatgcccacagcatacacacacgcacacatacggctatgactaccagaaatgtctccagacattgccaaatgacctctgtgtaaaattacccccgtttgagaactactgttctcaaagatgtaatatgttacagtccaaatctgtatggactgtatttataggatcaccattactagaagagtaatctctgcaatctctttaaaactctctcttccacttccacttcattttcctggtagatctcctacttagaaatgctataaaccgcatactggggatcacgaagccctgaaaatcctgttacctgctcatgatcgccctttctgcatctagttgtgtatttaaccacttgctcagggaagttttgtgtagtgtagcatagtgtctgcacctgtcagagacatgcaacaatagaatcaaaacattcacaggccaaaagacagttgaaggcccacctgtatcagaatcacctgggaagcttattaaaatatgagtgtggggtccccacccaacacataggggatctgcattttaacaggtacctgaagtttgagaatcccttcattaaggttgacaacatggatagtttccaaaccaaactgattataagaatcactgaagagctttttttaaaatttattttatttatttatttatttttatttttttgagacagtcttattctctggtgcagtggcacaatcttggctcactgtaacctctgcgtcctgggttcaagtgattcgtgtgcctcagcctccgaagtagctgggactacaggcgcccaccagcacgcccggctaatttttgtatttttagtagagacggggtttt

SEQ ID NO: 82150 - DNA, 1021 bp, Homo sapiens
aaagccagtttccaaaaggtttgcttgcctctgttcagtggattcttgactacatataggtcatatatttcaaaaaataatgcctagctatttctactttgaaatcatgactaaagccaaaccacaaccacagcaaagataacctaaggatttgtttaccagaaatacctacaaaaaagtttgcaggccgggcgcgatggctcacacttgtaatcccagcactttgagaggccgagatgggcagatcatctgaggtcaggggttcaagaccatcctgcccaacatgatgaaacctggtctctactaaaaatacaaaaattaaccgggtgtggtggcgcatgcctgtaatcccagctactcaggagactgaggcggaattgccagaaccctggagggcagaggttgcagtaagctgagatcgggccactgcactccagcctgggtgacagaatgagactcagtctcccaccctgccaaaaagtttgcaatgtcggcagcaaagtgcaaacagagccggctctgggtgaaagctttagttatgaaaaataagaaaaaaaaaatccctaagcatttcttaacactagttttaaagaaaaccccctctccaaaggtatgtttctccttcaactttcttgactttgccaggctgtcaggatgcaagctacctactcttttctggatggatcgggacaaagtttttaaacaaagactgtgtcctctccacaagcccttcccaccaccaccaccccagccccccgccgccataattacaggggctgtgaaatggctgttgagtgatggtcacacaaccagaaggcagatgaaaaggtcaggctctaagaggggttcagcctcccagtaccagcctgctgtgcccaggggtgggagtgctgggagaactgtcttccccagacaggcagctatgccgcctcccactgcaaaggcaccaaaaggcaacatccgtccaatccaaagaccgccacccccgcctttccccacccacttcaagccagctccccta

SEQ ID NO: 82151 - DNA, 1856 bp, Homo sapiens
ggattgcaggtgtgagccactgcgcccggcccctggctttgggttttctgctcaccttcctccttccctcccacaaatactatgtgtcccaaatgtgccgggatccatgccttgtgctggggacacagaggggaccgatgccatcctggtcatgggggaggatgtggcattttcatgaagagctatgatcgagggggccccacggttgcttcaggagcccagagtaggcatctgaccctgccaggcgtgctcccagacaaggtgacaatggtgctgaggtgcccgagaggaatgagcctcagatactggactgtcagacgtggacatgggggtaagcacagggtccctaccttgcaaggcacgagcccctgacagcctcttctctttccaggtcagccatgtcatctgagcctcccccaccaccacagccccccacccatcaagcttcagtcgggctgctggacacccctcggagccgtgagcgctcaccatcccctctgcggggcaacgtggtcccaagcccactgcccactcgccggacgaggaccttctcggcgtgagtctggagcaggctggggacgcgttctcagatggatctcttgcctgaggccagagattcactgtgtctctggccatttttgggcctatgtcccggactgccaaataggcagacctggggctgggccgtgggctgagggtgagaaactaggaaggcgccttgtaaattcagggtactgcccagcccagaagaacctgttaccagctgggagtggcaatgggtgggcagttgctggggtcagaatcgctgggctttaaccacacatgagagtctggttccctgtgagactgtgaattctgcagctgcaaaatgggcacagcaccagggctgcaaaggacccacataatgcctggcagatgcaggtctcaggccttgcgagtggaggatgcttgtgttattaatagtaaatcattagtttctggagggatgttcagtgatgttttagttcaactccctctttccaggagggaaaacaggcccgagaaaattggccagggtcatccaaagagtcctttcccccagcgtctttgtgagcggctcccagggttgagggttgtgcagtcctcagcctgtgtgactgtacatggcggtcctggccagggcttgatggggcacagctgtgggcaggggctggaatgagctttgtgtgcccaggagcgctgatggggcccctgacatttccccctctctgtcaggacggtgcgggcttcacagggccccgtctacaaaggagtctgcaaatgcttctgccggtccaagggccatggcttcattactccagctgatggcggccccgacatcttcctgcacatctctgagtgagtcagcggcaggtctgggtggcctggctggggtgggcgcttccttggccctgtggaggtggggatggtgtgtgactctgatgggcgctgggtgtgaggacgaatggctgggcctgtgtgactctgcctgtggctggtgctccagctgtgctcctgtgtgtgtgttgggttggggttgtgagactctacggagctgtgttgggggatgtgaggctgggggcgacacggtacttgtgattgtccctgggtgtgtctttgtgaatgggtgtgtaaggttttgtgtgtgctgggcgtggtggctcacgcctgtaatcccagcactttgggaggccgaggtgggtggatcacgaggtcaggagatccagaccattctggctaatggtgaaatcccgtctctactaaaaaaacacaaaaaaaattagccgggcatggtggcgggcacctgtagtcccagctactcgggaggctgaggcagg

SEQ ID NO: 82152 - DNA, 1021 bp, Homo sapiens
gagatcctatctgaaaaaaaaaaaaaaaaaaaaaaaaagccatccttgtggccattcctggaccgtctggagaccctgctctgtgccagtgcctgtgctgggcccttgggacacagaggggccctgtgctgccctcagactcctcacccctacaggccatgagcttccagtggcatctctgaaggattgggtgcacttggggtgttgagggggcttgggtggagaaagaagggggcccccattttgggtctgtgccattcacccaggggaaaatgggtgtgacaaatggaagatgcaaggaggacgacgatggtgacaatgacagtgatgatgatgatgacgcggcatgattcctgagcgggccctaccctttccaccgcctttcctgcctcccattcctagtcccccacccatcacatggtttccccactggcctcagtcccacccgggccctcagggcctttgcacaggctgttccctatacctggaacagcctccctccgttttgcaaatggctacccctttcttgctgttcagggtcctgcaggcaccctgattagcgtgtgtattcccacccttctccccctatccccttctgtctgtttctttacagcccttttgggatctgtaatgatctggtttatgtttatttaactgtttattctctggcttcaagttcagccctttgtctctggggccttgaacagggctcggtattgggcacgtgtctgttgagtgcctttatgatgacaattataacaacagtcgtagctgacaattactgctcactggacctgggcggacagtgtgcccagtgcttagtgtgtattattttgttttcagttcagcctgatggtgtgaaatcgggactattataattcccattttccagatgtggaaactgaggcccagagagattaagtaacttgtacaagaccacacagcaggcaaggggtaggattagaagtcagctatgcttcattagccgggcgtgatggcgggcacctgtaacccctgctac

SEQ ID NO: 82153 - DNA, 2635 bp, Homo sapiens
gtaacctgtgagatcttcaaggagagaagcttggatatgtgtgcagggtgattgagactcagggttgtgagggcagtggctctgaggcgcagtcagggtgtgggcctccttagctccaggtgggcgtgtagctcaggtcctggcttccctgcgaacttaccccttggggagccacagggatgcatgcctcactggccaccaccccgctgaggggttccagggctgctctgtggcctcacttgcttttcttcatccccaccaggtaatatgtctcatcctcggccttggctagggctcgaccacttcaacaaagccccaaagaggagtcgctacacttaccttgaaaaggccattaaaatccataactgatttccaagctggtgtgttcaaggcgaggacggtgtgtgggtggccccttaacagcctagaactttggtgcacgtgccctctagccgaagtcttcagcaagaggattcgctgctggtgttaattttattttattgaggctgttcagtttggcttctctgtatctattgactgccctttttgagcaaaatgaagatgtttttataaagcttggatgccaatgagagttattttatggtaaccacagtgcaaggcaactgtcagcgcaatgggggagaagaggttagtggatcgggggtccctggctcaaggtctctgggctgtccctagtgggcacgagtggctcggctgccttcctggggtcccgtgcaccagccctgcagctagcaagtcttgtgtttaggctcgtctgacctatttccttcagttatactttcaatgaccttttgtgcatctgttaaggcaaaacagagaaactcacaacctaataaatagcgctcttcccttcattgtgtgcattgtcggcccttcctcgggttctcctcctccagctgcctgggggctttttaataaacttgtctcacctcgtcagccactactgtctgcagcccctttgcaaagtggatgcactgaatacagtccggacagacattgtgggggtctttttattaaatcaagaacattgttaaattcaattaaggtttactctgctgccttggcagacttacgatctcaacagttcatacgagcaggtgaaaggattataaatagaatttcgttaaagtggaacagacgacaagaaagccttttagcaagagggcatgctcactagtggttagtaagctgtcgactttgtaaaaaagttaaaaatgaaaaaaaaaggaaaaatgaattgtatatttaatgaatgaacatgtacaatttgccactgggaggaggttcctttttgttgggtgagtctgcaagtgaatttcactgatgttgatattcattgtgtgtagttttatttcggtcccagccccgtttccttttattttggagctaatgccagctgcgtgtctagttttgagtgcagtaaaatagaatcagcaaatcactcttatttttcatccttttccggtattttttgggttgtttctgtgggagcagtgtacaccaactcttcctgtatattgcctttttgctggaaaatgttgtatgttgaataaaattttctataaaaattataattcagtgagttacgtggaagtggaggaagatttctactctccctggaaacaggcctgggaaaccttggcatttgtaacaaggtttcactgagatgtacttttccttctaattccgttttgcgggggcagggtctcttgtttctttttttttttttttttttttttagcctctaactagtcacatttactcttaagaaatgaaaggttttccaggagagaactgtgtacaaataaggtgactggagatgtgacctgatgtgtcacgaggcccttcggggcggcaggcgctatcgtgggcgtggtccttgcaccgtcccatcggccttgccttccagctccgtggcacggtttcctggtctttgggccagtgtgtaccttggagtgacttcctttctcaacttccactgcagtgtgtgtgccttctgctctgagagctgccttgtgacccgtgtgatagaaagcagggagtgagggtccccgcggacctggcccttccctccttcctcccccagaaagaggagttagagcaggggtgcgagagccgttcgctgtgggtttgtctttgaacaaacattaaggtgtcttgtttttgttctgggctgggggttggctgtagtcttaggtaactgaaagttcctactctcccttaaggtattaaatgactctttttccaaagaacgtgttgtaatgtttccgtcatctgccgcgttcccttttccactcactcgcagttacagtgtcaggagtttgagtttgttaaactggttctggggagacaagctgaaattttaaagaaagaaaaatgaactccccttctccggcctcactgtaacccctgggactattgtgtcctctccctctgtggggtgtggatgccatctgttgacagcattcggagtcttcacagcggggagccctgaaaaccactgcgtgacagcaagggcctgcggtcacagtggcccttcccacgccctcacacacaagagcagcgagctgaagcagtcttgtttcaaaatgagaagagcagccaggcgcggtgg

SEQ ID NO: 82154 - DNA, 1677 bp, Homo sapiens
gccctttaatcttatgcttcaaggggaccccctctccgtgccttgcctccggtctctgtttctgatatttcagatcctctttaaaaaaaaaaaaaaaaaaaaaagctgggcatggtggctcacacctataatcccagcacttcgggaggccgaggcgggcggatcacgaggtcaggagttcgagaccatcctggctaaccaacatggtgaaaccccgtctctactaaaaatgcaaaaatcagcccagtgtggtggcacgcacctgtagtcccaactactcgggaggctgaggtgggagaattgcttgaacccgggaggcggaggttgcagtgagctgagaccatgctgttgcactccagcctgggcgacagattgagactgtctcaaaaaaaaaaaaaaaaacatatcgtggtaactttatttctttctagaaaaccattttatttttatgtgaatatatatacttcattttgccctatttttttttcctctctgttcaggctgctagaaattgtaagctacaaaatcattggtgttcatcaagaagatgaactattagaatgtttatctcctgcaacgagccggacgtttcgaatagaggtatctgtccccgatactgttggcaccagagagaattcatgagccccatctgctgcatatttaaatatcacagcaagttgtacaagtagcttgatttgtgtttttataccagtaatcgaggtatatgattccatgagtggacctacagtgtttttgcacagaaattagtcctcagtttgggttaccaacccaatccagacagaaactgtggatcacttgaatttagagctgttgacatttccacaggaactgggataatacagtatttggcctcttaaaattcagttttttgggggagggggaagaaacttggatatcttctggctgagactcccatgagtgcccatcactctggctggatccaggtgtggcgtttttttagcaaaaataggctttaccctccgggttagagtagtgtgagaattgagatgtggacactttgaccacatcacttgcacttacagaactgtgtctgttgtccgtgtccccaggaaatccctttggaccaggtggacatagacaaagagaatgagatgcttgtcacagtggcgcatttccacaaagaggtcttcggaacgttcggaatcccgtttttgctgaggatacaccaggtatgctgttgtggttggccgagtggctcacgtcaaaacctggagcctttgagtggccgctgttgccgaatctgcgctcctgctggggttaggcgttggttttggcggctgccacgtgacgtggcctgggggtgctgggagtgactgtgtgagcacatgtcctttgccattctagggcgagcattttcgagaagtgatgaagcgaatccagagcctgctggacatccaggagaaggagtttgagaaggtgtgcagctggggcctcctgggggcttggcgggccataggctcaagccttgcctagcgtagcggcctaggcttttttgccagagatgtgagttttgctgatatacagaaataacggaggagttttaattttttttcttttagtttaaatttgcaattgtaatgatgggccgacaccagtacataaatgaagacgagtatgaagtaaatttgaaagact

SEQ ID NO: 82155 - DNA, 1055 bp, Homo sapiens
ctcaccctttctagctctacaagtatagagggaaaattcgagacataaatagcctcacctttgtagaattgagctccctgaaggcccacagtctgcctctggtcttgtatctggaccagcattcctttctcattgtgctgagagttgggaaggccctgggtgacccctcgggaccatttcctgagaaggtgttctgtaaatgacaggcttcttgcatcaaggccacttttgttaacctcccgtcagtatttggttggtcctagattagggccagtgtcctcactgtgagtgaattcacagatgagggagttggggtgggaatgagagcaagaacatgggggccagctggggacagttgagaacaatgatgcaactttctcctctcttcctttgtggtagcagaccttttatgctttcttgaaagcacttattttatcttttcattacttaggaaataacactatatccagacaagcatgggtgtgtccgggacctgttagaagaatgtaaaaaggccgtggagcttggggagaaagcatcagggaaacttaggcaagtatttcttgagcccaattgtggacgttcagttaggggtggcagttaacgctgacctctgcagttgcgttggtggaaatcacccagctgggatccatgcgcgtcattcccagactcagtggggtgtgcctccattgcaaagacagttgcacagaagctcaacacagacccagtgttgctccagtttttcaagtctcaggggtaaccctcaagccgctgtggtgcagagggttatgcgtgtttcacaattaagccacgtttttcctccttccccttgtatcttctgataacattagctgtagtaaaaaggcgcagttcccatagaaaagccaaacagaggaaggatacgattccatttgaacgatgaactgaaactggaaggggtgactcctgattttgtatttgacagattgagtcacttctgttccatctagccaacatttgggctgtagaaagaagcccctgaattgattgtttatttcagagagatgggcatgatt

SEQ ID NO: 82156 - DNA, 4551 bp, Homo sapiens
caggctggtcttgaactcccgacctcgtgatccacctgcctcggcctccgaaagtgctgggattacaggcgagagccacagcacctggcctacgatcacagtcttaacattgactatatatatatatgtatatgtatatacatatgtgtgtgtaatatagaggactaaaatatgagcgtgtttttattttaatctactcttaatatttttttcagggatttccacaagatcaaattcgattgtggcccatgcaagcaaggagtaatggaacaaaacgaccagcaatgttagataatgaagccgacggcaataaaacagtaaatattgttaatagcgtatctggtttggaaccgtgcagaaggcgttagtcctctgcacttagtgcagcttgtttcccttttggtccacttaactagaattggacgttttcttcaatacttgactgtagtttttcgctctgtcacctaagccattagactcttctaaaatcagcgtctcttttggaaatagatgattgagctcagtgataatgaaaacccttggacaatattcctggaaacagttgatcccgagctggctgctagtggagcgaccttacccaagtttgataaagatcgtaagtgcccacgagacgcctgcctgcacttagagcagtagcgttggattcctggattgttgttctaaacacacagggttaagccttcttcccttgcagaaagatgtgttgatcaattccacaaaagctcactagacttcctgatgaagtcaaataagactgacttggctgcgagtttcctgtgaggcccggagacagtagcagccacgtggggccgtcctgttctgtcttcagtctcagctgctgtgctgtgctaatcacgttggtcagatcctaaagagcagggttgcaaacgttgtctgtcagggaccacataggcaatatctcaggcgtttcaggcctttctgtctgtactaaggcggccacaaagactatataaatgaacgagctggctgtcttccagtacaactttatcgacaaaacaggtggatcggaatttgctgacccttgctataaaatgacagacttttattgctgtgagtggtcacttctggcaaagacacaagaccatgcgcaatcttcccgtggcaacgctcttccagccagtcagtccaggtctcagaactaggaattctaagtttgctgcactcagtaccgtcttgactgtctaaatgtagtgggtttccatgggtctgatgtttggaaactcagcggtaatagcctcagcttcgtgaataagccacatctgaagtaacttttaggtaccttaagctgtcatttcacttgtcattgagctattcagcttactgttttttttttttcgtttttttgtttgtttgtttttttgttttttaagcattgtgctgagtgtttggatcttaacaaaacttgtttattaaccttgtagatgatgtaatgttatttttgaagatgtatgatcccaaaacgcggagcttgaattactgtgggcatatctacacaccaatatcctgtaaaatacgtaagtccttcgtgcacttaccttctgagtagattttgctcagtacattacagctacacatttaaaatatcttctttctcctaggtgacttgctcccagttatgtgtgacagagcaggatttattcaagatactagccttatcctctatgaggtttggatggtttatttttccataattagtatattcttagtagtttgtggagggttttgtttgttctttttaccccgaatttgttacagtgttaggtctaccagctaactcagggcctcagatgatcttgagaatgacatatttagatttgtgaattttttttttttacctgttgtagaatcaaatctgattgttacatatttgtggatttattcatttagcttttcctgttaacattttaacttaaaaggtggatagaattgggtgtagagaaaatacttaagtacatggaagactatctggccatattaaacgttagacaaacttgcagtgtaacaattttatatctttcactgtaggaagttaaaccgaatttaacagagagaattcaggactatgacgtgtctcttgataaagcccttgatgaactaatggatggtgacatcatagtatttcagaagtatgtactttgtgaaggattgtatcactttgtactaatttcaggatttttttaagttgtagaaccaagaaacatttgtacctagatcccgagccacgtttttgtttttgttttttttaatgtaactgttgagaggctttctctgggttttgaaattaggtgtggtgaacattttcatctcataaagctcttctcaatttcttaaaaattccttaaaatgtctcaagtgcacgtggcaactattagtagagtgggaacaattgcttccttcccctgagatttatgaaatcgaaactccttagaatgtacctacttgggtaattcatttcagtctgtcttcatgtaaaccagccagtctttggtcttagacactcagtgtctgaaagtggctcgatggcacacgaaagcccagatttcctgactcacggtcagagactgggctccaccacctgtcaggtctgtgggcaagacactgcgtctgggtctgctcctgtagaggagagcaggtgctgttacctaagggggttttgttttgtagtgggatgagaatgtaaagccactacattgcgcctggctcagtgcatccccatgcatacttgcctcgcttacagagggagctcaggcagatgcctggccccctcaaaggggaacctgaatttatcttgcaagagagcctgttggtgtcactgttgtgtaaaagatgatgccatttttaccagctaccccctgccatggactttgattcagactgcaaactttctccctccaccagggatgaccctgaaaatgataacagtgaattacccaccgcaaaggagtatttccgagatctctaccaccgcgttgatgtcattttctgtgataaaacaatccctaatgatcctggatttgtggttacgttatcaaatagaatgaattattttcaggtatttaataaatgctcctttcctcttcagatcccactccagaaagacaaatttctttcttaaaatgcttgttgaagaagctatctcatggttttggttcagaaggggctatgcccgaggaaatctcccactgatggattcaggctctctgccttgggagctagaataatcgccatcagaaaagaacctgtagacctcaccattaaaagtgaaaaccctttccaaagttatcttcatcagatatgctactcccatggtgattcattaaggaataatatagtttattcctgtttaataaatttctagggaatttaaattcaggctgctcatggcacattttaagtaattaagcatgaagtttatgaccaagtttcaatttttccccaaaatgtgaaccttcctttctgtgtcttaggttgcaaagacagttgcacagaggctcaacacagatccaatgttgctgcagtttttcaagtctcaagggtaggtcacatgtgtggacacttgcttggtcttgactgcatgctttccacagttcattgaaacatcttggaactaattttaataattagctcgccatttcacctgacagtccatttcttgcttagtttcagaattgtcaccactcacatcttgaccacattactctgagatgttaaaataattgacagcctcatccaaagccagactgactttagatacatcctcagtgcatctcccatgtgtccagctggtcagtcctgccaggctgctgtgtgttttgtcactattgcagagagcattcaagtgtgacagcgagtgggacttagttcttgggaaacaggagtattaagttaaaccccatgctaggtccaaatttcaagaccaggtgtaaggccagcggtttgcttttatgctcactcacagatatttgtttttaggcaaataaacaagtcatttatttatatgctgttttcttgtgtagttatagggatggcccaggtaatcctcttagacataattatgaaggtactttaagagatcttctacagttcttcaagcctagacaacctaagaaactttactatcagcaggtatgagtccaaattaatgtaactatgggtcataaagagaaggctcggggttttggtgacggtatctgatgtgaatctttcttttcttaatagcttaagatgaaaatcacagactttgagaacaggcgaagttttaaatgtatatggttaaacagccaatttagggaagaggtaagtttttttaatactatgaattttaatttttattggaacttgcttattgtttctacctgtccccagacattgaaaactaagacaccacagaaaaacactctaaacaacagcacatgatgggggctgggggagccctgggccagtctttcctgcctcctggcaggacctcctgaggcctctggggtgcatgacatgtggagctaaggaacc

SEQ ID NO: 82157 - DNA, 1073 bp, Homo sapiens
ttttgagacagagtttcactcttgttgcccaggcttgagtgcagtggcgcgatctctgctcacctcaacctctgcctcctggattcaagtgattctcctgcctcagccttcctagtagctgggattacaggcatgtgccaccacacccagctaattttgtatttttagtagagacagggtttctccgtgttggtcaggctggtctcggaactcctgacctcaggtgatccgcccgcctcggcctcccaaagtgcatgagccaccgtgccctgcccacagcctccttttctaaataaatacctgatttaggttttggtcattttatgcggtttttcttcattggtcttctgaagaagtttctttggaacaaaaaatgagttttcagcgttttagtgtttaaatgtgttcagtgtggactcattttttgtcagttgtcaagtcttttctgtgctttcatacatattttcagatagtcgcagaggaccagttttgtggccaccaagggaatgacatgtacgatgaagaaaaagtgaaatacactgtgttcaaagtattgaagaactcctcgcttgctgagtttgttcagagcctctctcagaccatggtgcgtaccggtcccgtggatataccccaccgtggctcccaacgtccaccttccttccgtgtcactagaaaatactgattgcctttgggggtaggtgctgtgtccagccactgcctaacagtgaggagtgtgacccaggaacatttcctgcctgagaaagtgcaagaaaaccattgagcccctgactcctgcacaggggaacccacaggattttgcagacatgttttcaccccttttcctcatctcccactccactccctgcacccctaccccctctttatttttgtaaatgggcattcgatcctgaaggataagtcacagttgtccaaatcaaccggggaagaattagaattctttttcttagaatcacagtctttttttctttttttttgagacagagtttcactcttgttgcccagtggcgcgatcttggctcactgcaacctccgccttttggtttcaagcaatt

SEQ ID NO: 82158 - DNA, 3074 bp, Homo sapiens
ccgtctaacttgccttcctgcctctgttaattttgcaacactgatggtgaaatttggtcaagtaaatcaaaatttgtagagccagttaaaactaagtcaatttcaggatgtctgtagaatattaaaactaagtcaatattcagagtgggaaatatttttacatgtctttctgaatttgatttttcatgtttctcagtttgcagatatccttagtagtcttaacctcgaccttcagaatcatttcttgatatatttggaattcctccaccctaaattattcatagtgtatatttatgttgactaggaatagttatttctatcaagtacggattacgttatgtacttcataggccttcccaaggcaattcatgcttatcctattaaagatgagccagtacattaaatggccttacttactgtaaagtgtgatattttttgtgtaaattaatactgaatttcttttaaaatgttttctaataggtttgaattcccagagcagttaccacttgatgaatttttgcaaaaaacagatcctaaggaccctgcaaattatattcttcatgcagtcctggttcatagtggagataatcatggtggacattatgtggtttatctaaaccccaaaggggatggcaaagtaagtggtgggacccagggctgaatgcaagctcatcagaaagttaacacaagctctgcttcagcctgttctggttcctactcggaaccttgtcagggacccctaactgatctatgtattctctggctgctaaatgctgttttcccatccatttaattgctgagatttgaaggtaaatagtaaattagcatttgtgcttctctttgtgagtaatcaatgttgggccctacagaatcccttatatgtcatatgagacacttatattttcttctgaatgctcgtgggataattacccatgcggtgggcccagtcggggaggctggctggtcgcatgtccctctgcgtgccccctggtcctaccttgtttcctctcatggggatctcatgcagtcttcaccaccactcttgggagtgtagagggcgccatactcatttggcagatgagggtcttggaatctacccccaagaccacagggccagcaccgagctcctgccaaggggatttggtggagggacccgacagcacgagagaacagtgaagagtgcgtgtaacagcagcgttcatcactgtttaatgtggctgcatccacaacgcagatgggaagataactgttaggaacatgctacgttgacttcagtctggcccttaacttgcttccataaaatgccatgggataggataaaacagctcatttagtttgataactaaaggataaaatttgaactctcgtttggtgtgctcagtatggcctttttaattctgtaaagagttggtagtgtcagtagattgaatgtaagtggaaaatgggctatttcagtagattataaaaattgccattgggcgaatggtagcagtgcccacagaatgttgaatggggactgcgaaggtcctggtgaattgtatgagcggatgcctgaggcgctgcctgcctagcacaccgtcagattgtgtgcctgtataagaacacacatggatattttttcaactaggggcatacctagaagttcacacattttagaacaacgctgccttctagtgttgggtacttgtcacagtgcttgatcgctgctggtgtgtgttgttttccttgcagtggtgtaaatttgatgacgacgtggtgtcaaggtgtactaaagaggaagcaattgagcacaattatgggggtcacgatgacgacctgtctgttcgacactgcactaatgcttacatgttagtctacatcagggaatcaaaactgagtgagtagtgttcacttttgttctgttctttactgtggtggacttggacatttgtaccatgaatctccaatatccttttctgtccaaacacattttatgcttattccattgtattcacagcagcgcagaaatgagcagggttgggcttgcgcgtttcgatgcagacttatggtaccaagtaatttcatgttaatagattattttattttatttttttgagacggagtcttgctcttgcccaggctggagtgcagtggcgcgatctcggctcactgcaagctccacctcccgggttctcgccactctcctgcctcagcctcccaagtagctgggactacaggcgtctgccaccacgcctggctaattttttgtattttattttatttttattttatttttttttttagtagtagagatggggtttcaccatgttagccaagatggtcttgatttcctgacctcgtgatcggcccgcctcagcctcccaaagtgctgggattacaggcgtaagccaccacgccggcctaatagattattttattaatgatgacctagaatcgggagcttctaagaggggaaagtccatctgcaggggtcaaagaggatgcctttgtcctgcaggtgaagttttacaggcggtcaccgaccatgatattcctcagcagttggtggagcgattacaagaagagaaaaggatcgaggctcagaagcggaaggagcggcaggaagcccatctctatatgcaagtgcaggtcagcccccgcccttctgggactccgggtcaccatgcagccgggcacccatctctatacacaagtgcaggtcagcccccacccctctgggactcccaggtcaccatgcagcagggcatccatctctgtacgcaagtgcaggtcagtccccactcctctgggaccccttgggtcactgcacagcagggcagctgcccagagagaagctgctccacgtgctctcctgagcttggtcacagtcccagagtagttcctgatacacaaaccgggactgttgtgccttgagctgccctgggcagctgcctgagtatttgtaacacctggccctgttggtggcgggcagagccagttcaggagtaaagacttggttgtcagaagtcaggccaccagacagagaagtgattaagtgcacgtcaggttgcttcaaaaagtactgagggggttgg

SEQ ID NO: 82159 - DNA, 1110 bp, Homo sapiens
caaagagcccaaggaaaggaagcttataatcctgccgactcatcagttgtgttcattgctgcttgttctgtttgggcatttcataagcatacctaatcttgggtaattgtaaccagagttttctgattttccatttaatgatttttctgtggttctccataatttgcacagtgtttaatgactgtataacacagcagcaaatgactgtctaaatttccttaaccatttcttccctgattgctgggcatcgagttagaatataatccaaggtaagagaatctctcacagtcagtgctggtgcagcattattttaataaacaaagagacccataaacagacctaaagaaaacatttcaaagatgccctaaatggacacctaaacttccctgcctttgtctccagagtctccagacatgttccaatcttgctgaaccgctgttgctttcattgcttccaggagtaagtagaggctaactacatttgcatttgtttttcaatgtttaggaagcagagaaaggtgtgaaattcctaacattgccaccagtgttacatctacaactgatgagatttatgtatgaccctcagacggaccaaaatatcaagatcaatgataggtaatctatagtgggatataaagttaagatttcatcatcatgctggtctagggggttagtctcagtgctttcctcagtctttatattttcagtcccacatctgatttatttagattttccttctacctctgtgtcccaagagccgcagtgttaaaggaatgattttatgtcaagtttcagaggtcaacctctgccgagtccatttcccctctcaggatgctttgcccagtcccagccctgctctcagctatggctgatttaagtccacaaggatggggctgtttctgcttcacagctcttgcattcacaggatttctaataaatttaattttgaccgattataaatgttatttcagaggggacttttagtgtattcgtttaaataggattttccaatattttgttgtctctcagttggcgtcaacttttagaatgtgctagagttttcaagaatgctaaagtagttgtttgtatgccagttacaagtagttatttt

SEQ ID NO: 82160 - DNA, 1083 bp, Homo sapiens
ttttgccttttccatttatctacaatccacctggaacaggtgggggtggggagatgtcaggaccaacttccaccccaccccgtgttgacctctgaggaaatcgaggttttccttgtcattctgccacatcagccagccattcacatttgtgcatctctgcttttgagaccaaggggttgtccacactgcccaattccaagctgtcttcataatcatagctttacagtatgtgctttgttcgaataacagtaaaaccttaactgttacctccatattgtcattttaatgtccttaagaaagataccaatgacctttggccaatgagcaaaggtgctaacagcacatttacctacagtcttggctacagggggagagttactgttagtgttgtttaccttctctgctaatcctaaatatgctgatttaaataacttacacctgtgttggctacattataaatgaagctttagcacttgacttttctctctctctctttaaagtatttgaatcatttgtggattatgtggcagtagaacagctcgatggggacaataaatacgacgctggggaacatggcttacaggtaaattgagtgttttgtgctagtgtcctgttgtagcgttcttctttattttcaattcttttaattgctaaataaaaatttgcttgtgccttttcatgtgtttctggtatttagaatatacaaggattctgtttgtaggataattgaatggggagggagagggggatgttgggagatggagtgcagctggtttatcctgtagaagcacatccagcagtccggagggtcttgtggggttttaggcatcttgtcctttccccgttcctcaccttactggtgtcactgctccagttttccctcagtttctcctggtcacaagtgggatttcttagtaagttggactgtgtttaggttgtgtttctttatttttaaatgtatttttaatgaatttagttttctgaggatcacgactttagaatgagtagtgtgttctctagggttgtgtcccccaggtttctgggcatctgagagagcagtgagcatggtgggcgaccaggtgg

SEQ ID NO: 82161 - DNA, 1534 bp, Homo sapiens
attttaatactagcaggcagtaggcttttaatttgttaaattggtatatatacaggagttattaatccagaaaccaaagactggctttgttggctgtcccgttggtcctgagtcactgtacagtggtgacttctgttgttactccagtgtccagacccctcctgtgcagcgaggttctcattgagcagacctcagcatgcggtgattactctccccgcgccatcactaatcactagcaaatcctcattcttccagttgtgataaaagacgcagaagcacacacacacaacatgaaatggctgttcaaggtgattggctgggcaaggtgtgttttcttttttgcagcactagctggattgaatccagttcattaaatatccatggacaaaccagtcaatcctgttgacaggctcaacctcattaatctcttggtgtggaccattacgagttaagtttagtgaacaattttacatgcttttccacagaggtaaaaaatataaaaatgcttctaaaggcactacagattactaatttattccaaaggctgtataaaaggttaacctcaactgttgcatgtagagatgtttgtaaaaatccaaccaagaaagaagattttgtatgtttttgagaattgcatgccagaggtcatatttttatagtctacaacttctttgaacattgatatttctagtcaattataaaattactgtatatattactaagtacaaaaaagtttttttaaagccaaaacattctttttcagttgctcgataatgtggaaaataagatgaaaggcacctgtgtagagggcaccatacccaaattattccgcggcaaaatggtggtatgtggctaccagttctaaaagatgatttttaaaggttttagaatgtgaattttttgactattactagttaaaccacttttactttccttatttgcagtcctatatccagtgtaaagaagtagactatcggtctgatagaagagaagattattatgatatccagctaagtatcaaaggaaagaaaaatagtaagtgttgtgtgtatctaatggcatgatcttttgatgatttctactgtgttttaatgtttcatttacacaagtgatgtttttttaaatagtctaaacacagagaatggctcagatcttaagcaaacagctcactgggtgaacacaggcttgttacctccacccagctctggtgttggccagcactcccacagcccttcccagccaccacctcccctctcctcacaggaaaccaccacgtggacttctaacaccctgggttaactttgcatgttttaggtgtctgtttaaatagaaccttgtagtaggatgtatttgtttgtttatttcgctgttgttttttgagatagggtcttgttgtgctgtacaggctggggtgcaaccatagctcagtgcagcctcgaactccaggactcaggcgatcctcctgcttcagcttccccagtggctgggaacacaggcgtgtgccaccacacccagctaattttttttttttggt

SEQ ID NO: 82162 - DNA, 1102 bp, Homo sapiens
gggaggccaaggtgggcagatcccctgaggtcaggagtttcagtccagtctggccaaaatggcaaaaccctgtctctcctgaaaattcataaattagcctggcgtggtggtgcgtgcctgtaattccagctactcgggaggctgaggcaggagaattgcctgaacccaggaggcggaggttgtagtgagctgaggtcgcgccactgcacttcagcctggccaacagagtgagacttcgtgtcacgtgggtggtgattttcaaaatttatttttgcattcttatgttttccagtatccctaaagacgttcatgattttgtaaactttctcaccaatttggggatcgttaaaagccctaacaacaaccttagccattgtgttattagaaatgatttttttaaacatgaagattaaattcttactgttttttaaattcccctgcatcttctcagagtaaaaattcttatttcttaattgtttcaggctgtgtacatgatgccaaccgagggggatgattcgtctaaaagcgtccctttagcattacaaagagtgttctatgaattacagcatagtgataaacctgtaggaacaaaaaagttaacaaagtcatttgggtatgtattagacatctgcctttgccattctgcttcctctttttttttttttttttaggacaagtgagtagagaatagaaaagttagtagagcatactgtaggcacttaatttagggaggcttgagcatttaatcgtgtcagtgcttttatcattgtattttgttttatctctttggaaatagacactttgttgtagaattttgcttgagaaagaattcaccgcttaaggtttttacttttcaacacaagaacctgtactgctttcagatttattacattttcttggaaacaccacttccccagcagtaaatctatctttgaattatgactcccaaaaataatcttcacagaaaaggaatttgagaataatagctgattatccagtttaggttttcaatctaagttacttttaatttgctcatttgaaagttgagctttaaatggagttgtttgttttatctttgaaaggtgggaaactttagatagct

SEQ ID NO: 82163 - DNA, 3327 bp, Homo sapiens
tctttggcttaagtgctgtatgtatggtttttgaacctggatctagaggcccttttgtggtccaccccacacttcactgcaggtacagtagttctcttgtggttgtaattttgtgcctcatcgtgaattcgtcgatgccggggcaggacagcaagctctaaggccacagagctccccggtgctggttttcccccagcatgtgctggagggcatcctaggagagctcgagaggcatggcactgaagggctgtaggggcaggagcaacgctgagaggtgacccctatatcggcagtagaagcagaggtcaaaattgtatagatacaatgaaagaaaatttgtttcaacttctaaggaattaaaaaatgaaaccatgagtgaaatcactacagaatacactgggggagccccaaacacccatttctctattaaaggtaaaaatgcctccatcctacctttaaccccaacccgaaaggagagagcaatgaaatcataaatgggaattttggtgtgctatgtttactgtctttaaaaatgtataacatctggtaaataatgtcaactaaggctcagattattcttttaaacaggtcatggtcttgccatgcacaagcagtgctgaagataataaattacagagatgatgaaaagtcgttcagtcgtcgtattagtcatttgttcttccataaagaaaatgattggggattttccaattttatggcctggagtgtaagtaacagtgtatttagtctgaacaattggtgcattactgcttgttgttcccttaactttttgatttttcaagtcctttattgattttagagtcagatttttactttctaaattggacaagtgtctttgaaaacatgttttctccagtttcgtatcttacgtttttagcagctttctggattcacgtctcactttttagtcagacattcaaagggagttcccagtgggctaaatttcctttaaaagacataatgctgtttgaggtcctttcatgattcaggcatagtactgagtggttccatgtgactccagtaatcattcagttcactttggctgctttttgcagaggtggtaaccagtggaacaatcttaggaatgttacttcttactatgctaagtcacttatcattgcattctccagcccctcccctgcttagaggggcacagatttctcctgtccatgctgtggcactgagcccctgggtacctctgggatacctctgaggtgccaagcatttgctgtatttgttgtgagaccactgttaaaagaaaattgaaacagtctaaaattagcaaaaaagttgggatgtatttaaaaaaaaagtattttcatctctattaagtacagggcactaatgtaatttgtctcttgggaataaaatgtgtgttcttattcaagctggatattcttatttatgttttataggaagtgaccgatcctgagaaaggatttatagatgatgacaaagttacctttgaagtctttgtacaggcggatgctccccatggagttgcgtaagtttttctttaatcaggtgctgttaaaaatgtcttttgtgctgcagtgaaagaagctttagcgtgcatgtaatagagatgcacatatttaatcagtaagcctcctctctgcgcttgccctgtggcacacagagtcacacctgcttgacactcgtttaacagattgattgagcagtttctatatgttagacccttggaacataattgtataattatggcaactagacagctgtggttttctgttcctaaagaatgtacactcagctttcatagaggagctaagaccggtacataaatacccagagcagagatgctccgttgttactttgatgagggcagggaggaagtcctctccgagtgtgaggaaggggggactgggggaagaggtgagcatcaccgacaactaacatggtgagcgaggagtaaagaggggtgacaaggccgttaggtgtatttgagtgtttccaaggctgggagctaacccctggagtggcaaggtgctggtgaatggtactgcgcagtaggtgtctcccccagcactggtcccgcttggtgacggtcgtgtgttcaggtcgtggcattgtgtacagagggagatgggcgtggaggtgggaggattgctttgctttctggcaccgttctctgtggcttccttttactacttggggtgggggtgggaaggtacgagacacagttaattctgagaatcttatcttgctcccaaacaaccaccaaaatcacaaaataaaaaaagctctgggagtttagaagtctgaggtgaaacttggtgaatacacacttctgtttcttcttgtgtgtgtgtctacagaaaagatgagtttcagctttttccacgttgtgctgaccttgcgtgtgataagtgtaattatgtaaccaaactctaccatgaggcatgttgggtgtgagcatgcaggtctccgttaagtgtctgttggtgctgggcttgatcagtgacaggagtgccactgtcagcaggcaggtgcttcgagggctgtgcgaatgtgggggttgcatttgcaccagttcacacactggagcaagcagaagggaatcggtgaccattgaaggatgctgtgtgataagtgttcctggcctcggtttccttaaggctgaccttgagtcagattgcttcacacacactgcaggagcaatggggtatctgcaagatcccctcaaccttgaactgatctttcaggtgggattcaaagaagcacacaggctacgtcggcttaaagaatcagggagcgacttgttacatgaacagcctgctacagacgttatttttcacgaatcagctacgaaaggtaaatggatagtgttcctctcctgcagccttccgctcaccctttcttctcaggtatatcagagcaaagtcctctcaacaaacatggcgtctccctcccctggccctgtctcctcagatggctgctagttcatgctgcgttttcattccccagtgctgggacacctactttgtaacctgcctcagtgattcagagttaccaccgccaacctttttctttattgagatggagtcttgctctgtcgcccaggctggagtgcaatggtgtgaccttggctcactgcagcctctgtctcctgggttcaagtgattctctggcctcagcctcctgagtagctgggattacaggcacccgccaccacggccagctaatttttatattttagtagaggcggggtttcaccatgttgtccaggctggtctcgaactcctgaccccaagctatccacctgcctcagcttcccaaggggctcag

SEQ ID NO: 82164 - DNA, 1815 bp, Homo sapiens
ctggtggtcagggatgtcaaaatagcacctgattctaagccgggaacagccttccaggcactgcctgtagagcttggcccttggtgtggccctgggactcctgccagtcagtgagctgtgtgcagactataatgagataggtacagaaagtgaaaggaagcgtttagaagcttgtgtagcatgttgactttgctgtggcaatttcatgatgctttataaaagtattggtcaataacagattggtgtgggtgtgggaggactgtgccttcgcaggagtcgtttgggaagcagtaagatgctgcagggtttgtcaaaggtgattgaccgatggccacatgcaaatgaatagtcactgtcatcagtgaaagattgaattttaaatggagaccttcagttggacctctgctaagaggcactgtgttgtcagaaacttaaatatcttaaatcagcctttggtcttgttatcatttaacaatttatactactcatgtgggaaaaaataccagttcttaaaaaaaaaattattccccctagggtgtccaggctagtatttttgcaaaaatcgtgaaccaatgaggttagcatttattatcaggctactgttgtagcccttgtcttgcctctgagcagtgctgagcttccaggggaatggctgtttccctggctctcaagtcctgcctgtgtgttccgtgctctgtaaagtcagcccaagtcccatgtcgtggtctttacccccagaagtcccgtccttgaacagatatgagccatgtcgttccttctctccaaggtctctccactcacttggtgcctggggtccttgggaattcagctttagtaaagtagacattgttctcatgtggaactcagtctgacagggatggcaagtgtatggttagcactctgagttttggacttcataaggaagaattaatccattcagaaactgtatgttatctcagtcttcgggttttaataaattggaagcaattttttcaaactgttaggttttagcagttaaatcaggatgtatagaacagtttactccatgtcgattaatgctagtgcttttggtcaatgcacaggctctgtgactgatgatgtgttttttttgcagacaccagttggcgctccgaggcaacctttcagttcactgtggagcgcttcagcagactgagtgagtcggtccttagccctccgtgttttgtgcgaaatctgccatggaagattatggtgatgccacgcttttatccagacagaccacaccaaaaaagcgtaggattctttctccagtgcaatgctgaatctgattccacgtaagacagtatttcattactggaagccaaatttgatcagcctagtgcaattttatcttaagttatttgctgcctctacatagccttttgattttaaattagattaaatacgtgtttctctttaaaacccactggtatatgtataatatccaagctagaaaagtatatttttatcttgtaagtgaaaaaactaaaaatagtttgttagaatctaccagcccatggaatcagggccggcctggattagctgaccattgagccaccaggcttaattcttactctgtcagtaactgtctgagcagaaaatggcagctgtcagagccagacatcctttccattgtgtgatagctaatttgtacgggttgttcagaaagtacaagtaaaacatactttgtgaaggatttatacaacatggccctctgacttgaggaacatttaaacattcatgtatattatgaaatgtccaaaaactgagaaatcttgatggtccttctatttagat

SEQ ID NO: 82165 - DNA, 2585 bp, Homo sapiens
tagttcccacagagcaatctgttccaacatttccctactgtttttttctttttttttttaggggggaggtcttgggaggagacatagatatagggcggagcttcttagcttctcatggcaacttggataattcttggttgtgggaggctgtcctgtgcattccaggatgcccatggctgctgccctccacttgcggtcatgacatgtctctagacattgccaggtgtctcctggggagaatgacttatgaggggacaatatgggtaaagtccccttccttttgaggtacatttcactaaattagtagacagtggtgccacgccataggacccgaaagtggaaatgcccttcttgtgacctccttgatggaaaaagcgtataatccgagaaggttgagtaatcttccgtagcacctttccttggtttggaactgtggttgccgttgaaagacccagcatgtaatatctttctgatggcaaagtgcgtgggagggaggtggtcctgactgtaggagaagaacttgtagctgagggcagcgttttccagctgcagtacaaattgcgcaatcctcttcttcaggggataagtgtgttgtgaaaaatgcacaggattctaggaagttggatatgtgctgggctaaacaagctttatttactgtcgtatgtctcagggttgtcatatcagaagcagcataaattgcttatccaaaataagtttttgttaatgattccctaagactctggacttcagagctccccctttttttgagtgtcctgtgtccttgagtgttgagtgtccatttcagactagggcacacaatctgggaagcacctcattagaagtttggtctgtagccaaactatcagcgacttgactgatttgcacagaagacttcttagtaagggacatttcttgtgtaagatgctaaatagctaatgagacaaagagatgggagacatgtatagttgagggagagaacttatttaaaaatcctgttaacatagaatttcgggcaagtatcagaattatcttttactgtatctactcattctacttttagttccttattcactatttttcatgagatgaccaaggaagtaccgccatgtgtggctaattgtttgtagtgatgggatgtcactatgttacccaggctggtcttgaacttcttggctcaagcagttcttctgccttggcctcccaatgtgttgggattataggcatgacccattgcacttggcccaaggaagttttattttattttattttgagataggttcttgttgtgtcgcccaggctagagtacagtggcaagatctcagctcactgcaacctccacctcctgggtttttgcgattcttctgcctcagcctcccgagtagctgggattacaggcaaatgccaccacgcctggctaatttttgtatttttagtagagacgaggtttcaccatgttggccaggctggtcttgaacacctgacctcaggtgatccacctgccttggcttcccaaagtactgggactacaagtgtgagccaccaaggaagttttagagcaaatacggcctctgaagatctagatggatctagatttagaatgttgttctccatgaaactaatttgtggggattgactaggacttgcaagaagttgtattagaatgaagagcagaagtttgctaaaatcactgcaacagcaccatttggagaaatttcataccaacctttctgattcaaaaatctgaagtattctgtttttctttaactttctttctttttttttttctttttctttttttctttttggccaggctggagtgcagtggcgcaatctcggttcacctcaccctctgcctcccgggttcaagcgattctcctgcctcagcctcccaggcagctgggactacaggcgcttgccaccacgcctggctaattttttgtatttttagtagagccggggtttcactatgttggccaggctgctggtctcgcactcctgacctcatgattcgcctcgcccaccccggcctcccagagtgctgggattacaggcgtgagccactgcgcccggcctacctttctttttgcaactgaagcccaggctggtctattggcctttgccctgggaggataaaattgctgtaacaaagtgcacagtgggaacttcgtgctgtaggtaattgtccctgcccctggtacaagagtctccaggggccagattggaaggtagtgagagttatcaaggaatctggttgaggatttgtggtgacaccagtttgtagaagtttgttgctttgtcatttacagtaaaaagaagcatgcggtaatgaaatggtggtctgctaatgttagtggcatccaggcagattggagtctttgtgcatgaagtgctaattttgcagtgaatgtgggtgtccttgctaatacctagcatacttggaagttgcaaaaaaataatacataggatccagtgtactgttaactattttcttgggcaaagatctccatcactgagtctcatgtaattcctcgtaggaggacaatctggctggccgtatctgtgaaagctaatttccaagtccactt

SEQ ID NO: 82166 - DNA, 1069 bp, Homo sapiens
caggtgcctgtaatcccagctactcaggaggctgaggtgggagaatcacttgaacccaggaggctctaacccaggagtttccagtgagccgaggtcacactattgcactccagcctgggagacagaacgagactgtctcaaaaaaaaaaaaaaaaaaattagtgccttagctcaagtgtttggccaaatcagtccccatgtcttaaaaacttccgaaaaggtggcatataaaacttggtattacatcactcttacatggcagtaaatgtatgtgcatgccaatgttgtacatctgtcttgaacaataaaagaaggcagccttatcgtttaggctatttctagaagtctagtacagatttcttgtgtgtgtggctatcctgtgctttcatcatttacttctggactagggatttaccatgtcttaattaaaattttaatcctcttgcggaactaactcatttatgaggagcttttaaaaacgggatctcctgcccctgggagctgggctggaatcaccttggtggctgcttggacacccatagggctgttggtggccgggacccaccccttatgtactcggtggccaaccagtggccctttgccatttcacagccactggccttgaccactttctctgcacctgtcaggtggaaaagggcagattggccacaccaactcagatgtgttaatttggatgtaaaagctggggtcttgctcagattctgctgcaaccgcagacctctgcttgctttgcgttttcaaggccaactgcagagaagccctaacttcacactagaaccatttcagaaaataataggctttctttagtcatcacactgcaattaatcccactgctgaaaaatggggggtagagcttacgcatttcccccaccccatcctgtaagatgttatgcgctcttgaattgatcttggtttttattattgctgtaacttttggagacaatgcagtctctctcaagtcacccaaacaagcccttctttgagctctaatctgaattcacttgtgtctcagtctgatttcactgcatctcatgaaaccataacctgt

SEQ ID NO: 82167 - DNA, 1589 bp, Homo sapiens
actagagggtgttgaatttttagaaattcatcagtctccatgcacgttttcaaggctactttcttttctcataaaatgaagctttattttcatattacagtttgtattagaaaggtaacccctaggacagttaatctgtaaatttagcagaatctcaaattggatggcagaggttttagttactaatgctgattccttaaacttaagaaactcatttcttctgactgggcctctgtttcaatttcattatccaggaggtcccttttcttgtagtgagcacatgaggctgtggacaaataatagtgccctgtgagtacccactggtgtgtggtttaaaaagctacttgtgtcttaggccatctatttcagccttcccaatcctgaaatgtggtactagccttacgattggaatgtgacttaggacccgaaagagtgagagaacacttctgttaaaaagccagaaggctggaatttagtggactctggttggcttcatggaccaggctgtgagtggggtcctggtcagagctagagacttggcacctgttcagtgtctgcctcggttcctaacgaactagcagctggaaactgtcagggtctgaacagcttgaggaagggaaggctttgtaaacctggagcatcctgcctgcacctcctgggcagagtggtttcgaaggagcctgggagactgtttcgtttgttttgtctctatcaataggtcagtgtgagtttgctctccggcctcacattcttggggttgcatttgcttttgagtgaactctgcacagtccttgtatattcattggaaaacagcagtgctctggaatagttattttttgaaatgccctgagcagttaggaaagtgatgaagggtgaagtgcggagagggaagaggtggggcctgatgcagtttgctggggttgcaaccacacactccctgtaaggcctgaagcagccagttgcatgtttctagttggaaggcagatagagctgtggaggtggtggcatgattaggtctggctgggaataaggttgcttggcagtgtattatttattcgctaactttggtggccatggaagtctaggggctgaaggagtgacttgcatgggtctctgccctctgaatactcagatggtcggtgtagacgctattgaatcaacaggaagttatcaggaggccttgcttctgcatacaaactgtttttttccctggtgtggttcttctgcccaagtgagcagtctctgtttcagtgtcggctctgagacgaatgggatagatgttagacttttctatgacacttagactgctgctattaggagcaaattaatgggtcagctgcagcttctgatctaggcttctgtgttttttgttacgggggtggtggtgggtttcttccaaacttgtgcagttacttttctgctgaagcatgtttgggagtagaatgtgagttctcttgaacacacccagccagataaacttgtgctgttgtgattataactaatagaagattctttcaaatagcactgtaacgagacaaaagtcaaataattcgagagtgttgattttccttacattggcttctgttgct

SEQ ID NO: 82168 - DNA, 1687 bp, Homo sapiens
gcctcggcctggcctcccggccccggcctgcgaggctgcaaagtcatgccgggtccgcgggcgaggggcggccgccgggaccccggccccgtgcattgtcccgacctcgcgtccgccgggcctccgcggcacaaagcgccctgagttgtaaattcgagcgctcaggcagcggagggacggaggtgttttctcacccaggttgggaggcggactccggggaccgtccccgttctggggcgtccggttggatctggtgtggctggggaattcctgacctccccgggcgcggggctcgcccgcacctgctccggtgcgctcccccggagggcgcgccgtggctcggaagcgctcttccaaatcactttctaacagcactgcctagcgtcgggcttacgttcgaaaatacctgcaaggaacgcagatgttgtcaggttttggactggcccagagttctgacccgggcgctgttggtttccgaatccacctgtttttcggggagtttgtacttggcagtgtgtggtgcagccagcatccggccaggtgtgcgcttgcaaccgtgcgaaagccctgccgcacatggctgcctgcatcagaatcaaacctgactcgaaaggtaactcggttttctgccgatgtggcagtaattttccaaggcactgtagtttgaggtatagagtcttggttgtaaaggttggatgtgaagacgctgtaaagagaagggtgttggatttagggagttggtcgttggaaggcactttttctcacgacccatttcactgaaacaaagcaaagtccaaatggtctttaaaaagttttcttacctacgtgacgagttcaggctgtcgggagtcaaatggaggccacctgaatgaaaacggcgtggaatgctttagttttgcttttagcaagggatcttgggttgcctcaatgaatgaagctccaggggagctcaggaaaagcagtatttgtcctgtgcggtggctccaagtgtggggcgctgcacaccggttggtgggaacacttaagcgtgactggtgttcacctctgaatagaataacttacttccagtaattggatagtcactgaaaaaatggctggccaggttgcaaatgacaaagtggctgggattctgcagtaggcactccccagtggtatttatcaatggcagtaatgggggacagaagagcggagtccacgccaaggactgggttatctgtttcacttggccccagcaaagcagcaactaagagcgcctgttatgtgtgattaaaccaaatagctgaaaagaagtactttactgagggaattttgtgtattccttttgtgctgtattttgcagcccatctaaaacataaaagagggttgcttttcagtttccttttcaaatggtacccggtcaagacaaatatccaataacacgagcatatggatttcccatgacattgtcctaccgctttccaggtgtttttggacactagtgagaattaataaacagacattactgcagagcatgtgtgttacagacctgtatctttgggaaaatgaccaggtccacaaatttcaaggtatttgccccccccccccttttttttttttgagacggatttttgctcttgttgcccaggctggagtgcagtggcgcgatctcgggtcactacaacctccgtctcccgggttcaagcgattt

SEQ ID NO: 82169 - DNA, 1014 bp, Homo sapiens
ctactcaggaggctgaggcaagagaatcgcttgaacccaggaggcggaggttgcagttagctgagatcgtgccattgcactccagcctgggctggactctacctcaaaaaaaaaaaaaaaaaaaggaaaaagaaaagaaaagaaaaaagagaaaagaaaaggttaagtaagcttcccaaattcaagtttacagaaccatgtatggagctaggttccacctggtttctgaatcctaaagccccttactctcccacactgcttgaccttggctaagtcccttatcttctctaaacccaaatcctcatcagtaaccttgtggtatgggattaggtcatctttctaggtatggattatttaggaatttagttatcccggtggggcggggggtgggggcagatgaaggcgtggagagggggaaagctgttaatcccttttcttctctgacacttctattaaataattttagaccctgaccaacatagcttcaaggtagataaatattttggttctcaagaagaaaaaccaaccctctgtttatgccaagtcatgccatggccctgggagcagcaaaatatgttttgatccaagtaatgatagggtgggccctccctgccctttactggctctagctaatgacaagtcagtttctccagcggttcctgtctccccggtttttcatctccttagtccccggtttctgaaccacggtaggggtcatgaatttttttttttttaattggcagtgatcaaaaatggtgccctcagtcatcttccccttcagagcccttcatgtcctttggaggcatcttggcattcaccctctgaggaagcaggcattactcagcggattcacttctgcagagtccttccacacacaccccttctgtgtgcaaatggactttatagccaatgcaggcacaattctaccaggggaggaagaaaacaggccagccgagcctgctggaataatccagtgggggcctttttagtgggcctccaagggcactggtcttg

SEQ ID NO: 82170 - DNA, 1103 bp, Homo sapiens
ctagccgagatcgtaccactgcactccagcctggggtgacaaagcaagactccatctcaaaaaaaaaaaaaaaatttctaagatgtggcaacactgtgcccacacctcccctggcaacaagcagccagaattcaacaggagccgcctctttagaaagggcatgcaaccctagttcgccacagtctccacccctctctactgttgcccagggatgaggctgaaattagaatttcaaatggattacctttacatttgaactgctgtttttctttcagcaaagcagtatttctcagtatccactatttctcagtatcagaattgagaaagaaaggtggaaggcattttggcatttgaagagtaacccgaagtactgtattatgcaaagaaagattactcgaggctcccgggcatttagttccgggaacataactttttgaactttagattcttgctgaaacctgtcagaagctgacaagacaaggagggagggggctgagtgtaggggaaggtggagagaacaggagtttctagaattcagtttgcggcgtcctcgctacaatctcagctgttaaggaaagaaagtgaattccttgaggctctgggaaattggagatggacaaactgctgttttcttatggttcctgaatggggctatggtttttggcatacgctaattatatgagacaagagaaggaatttttcagcactatgtgttaaaaggtgactacagccatgtgccacataaggacgtttcagtcaacgatagactgcaaatacaacggtgggcctataagattataatatcaggccgggtgcggtggctcacgcctgtaatcccagcactttcggaggccgtggggggcagatcacgagttcaggagatggagaacatcctggctaacacagtgaaaccctgtctctactaaaaatacaaaaaaatcagccgggcgtggtggcgggcgcctgtagtcccagctactcgggaggctgaggcaggagaatggcatgaacctgggaggcagagcttgcagtgagccgagatagcgccactgcactccagcctgggcaacagagcaagactctgtctcaaaaaaaaaaaaaaa

SEQ ID NO: 82171 - DNA, 4114 bp, Homo sapiens
ttgctgcattgccgattcagggaagggccgcctgcgtcagggtgtctgccctgcgttccaagtgtgttttctgctccccagcccagctgctaaccttgaataccttgcaacttgagaatcgcggcggtgctctagctagatccaccggaggcgattttgacacctccctccgccccccgggacagatggcaacgcctggggacgtttttggttggcttctcctagaaggggctgttgttgggcacccagtgtatagaggctgctgaaggtcctgcagtgcccaagataaccgccccggccccctctcagcgaagaattatcatgcccctaaagtcagtagtgctcaggttgagaagcgttgagctggaagacggctgagccttgcctccctctggaaaagacattgagggaagataagagttgatgttttttgtactacagtcggaagtgggacgaactttatggaaaagattcttgagttaggcatttgaaagcgtggcagtctatatagttttgaagtgcttgaaagcttgctaatcggagtcatctgcgcgcatgttaacgtgctgctcttctctagcaatttgatcaagtgttttctgttaaaaggatcctatatttgattataagttgctggcaggaattctgttgagagttttgagtccataggtttgttttatggtggttcctttctggagttaatccccctccctttgtgatgacatgaagatgtgtaagtaaacgttcttgcccatttgtgcattcttggtaacggtgggtttagattttgtgccttactggttttgaagattgagaaatttggggttgatttttttttttggcaagatttttatggaaaaaggatttgactttgttaatcttaagaaatatgtaattaaatgttttcagacttttaaaagttgctcagaacagtaatggaactttgtgcatttcaaaaataccaatattggtatttttgccatatatatttaggccatatataggttgaaacgggctatgaaggtgctgcttgactgtcaagttgttaatttttgcataagaatgtgcaaatggccgcagcatcttgtaggaaaaaatatctccttgtgagatttcttgagtagactacagttttttgggacagtaatttgagaactggtaacaaagtggtgaaaagaaacgctaactttagggaatgaggaactgtaataataatagtccagtcttactgaaaaaagggaaacatggttaaatagtgcctcagtggttagctttgattttatatagctgtttgttaaattgtgactgagtaaattgcttcaacatctatcagtgctgacggtcttgaacgttttggaatggctcttggttttgtccaaaaacagaattttgaaataatacttaattaaaaaaaaggtttctgggagtgtaatttacatacagtaaaatcactgttttaggatatatactttgattttttttttttaagaagtagaatatatctatcacccccacctcccagtccctggcagtcactgatttgattgctgttttttctcctccatcatgtcctaaatagaatggtgcagtccttgtagcctattgtgtctggcttgttccagttactatgataaggttcacccatcgagttcgcattgcaggtgtgcatagttcagtgccttttgattggctagtattactctatggtgtggcagtaccatggtttattcttttgcttttgttggtattgctttgtgcttgaaggggaaggcaacacatttttagtgtttttatgtgccaggttcttagcctaggccgtataaaatgggattgtcctctggctttggtcctgttgggttcttgtagaatgtgtccctttaggactaacctagcagttttcgttagtgctaacttttcgtgtaagaagatgggttcagcagttgaactctgaaataatccttaatttgattacttcatttaaaaatgtttacaatttgtttgttttcctgctcagaaaacttaaggaggaacattaattttatttttagaaaacatcacatatgattcttggattattgtaaatgctagattgttagtctgaactagttttattttgtaccttgtttctgtacagtgaaaacacatcccttgcctaatagaaatggtaagttgtgtcttgtggaatttgatagtgcaacgttttcttatttgattcaaggagtgtgtggataatactctggatagcctcacactttttctttttcagggtgtggtctttagagaacaggcatacagctgtaggaataattggttaccttaaatagaaccaataaaattagcaaggtggtgtcacaagtgcatgcagcagtaagtagtactaaatttaaatgatattggttatagttctgattaaatatttaaatataatttaaggggggaaaaatttggtggatacttctaagtgggcagcaggcagcattcctgtattttgtataatatctgacaaggtaaaaatggcttattgtgcagcctggggacaatttggcactcctaccagcttcttgataactaccaagaagttcattaggtgtttatctcaatcctgaccttcattaagaaggtcaggattgagattaaaaacccagcagagggtcgcttttagttgtcagagggcttttgaaaagttgaaaattgagttaattggtttggttggaatgtggctagaaggatttggaagataatgtaaatgtaagttgaacttcagcaaggacagaattcaataaaatggagtgggtggttacctctactgtaaatagtagggtcagacttgtcttcccctttccaaaaaaggaaggaagccaaaatactgactgctggtttttgatttgataaatgcaaagaggatggtgtttcttcaatattcagtagtatccttagatcagtatattttttgattcctggaactaaagaaggggagtaaaaaatcattttaatctggctagggttgatgtttacccagtgtcattgtgagttggagtctactgccacattgcctgagttcagatcttggctctgttacttcttacctttatggtcctggagacagtgaagccaggtgttaattcaccattgtgctccttgacttaattaacttaaatagggataactaccacagattctagtacaagctcttagctttgtgcctggcatagtgagtgctctggcattcattgtgttggtggtcaagttttaagtattttttggatttttctcaatgtgggcagtgcttaaaatgaagggaagtaataatagtttattttctgtctttttaaaaattttttttgtgttgaaataaactctggtgtgtatttccttcttcatcttctttccctaattggagtaaatgtaagtagaattgacaggtgggaaaaatagtctgatgcccttaagtcctcacttttgatacatcttgatgccaagccctctttatatgtctcacttcagtgtggccattttggactcgtacactaaaggagaactgagcataactgtaaatgtgtgggccaagtggcaggtgacttagaaacaaatggccagaaatcatattctacctggagactggtggagctggtttgtgactcacttggctgcaaaaaattattactgagtttgagactttgttcaaaataccttagtgtggattacagtgagaaaccctaagcattaaatttctatttaacttttcatgcctgtaatcccagcactttgggaggctgaggcaggaggattgcttggggcaatatagtgagatcccgtgtcttaaaatttttttttaatgaaaaaattgtagctttgtcagaagcagtagcctcagttatacataatacttattttttataatagactgctttttttgtgtgtagctcttattttttttccttttttggagacgaagtctcgctcttgtcccccaggctggagtgcaatggcgtgatctcggctcactgcaaccgcctccctggttcaagcgattctcctgcctcagcctccccagtagctgggattacaggcgcctgccaccacaccaggctactttttgtatgtttagtagaga

SEQ ID NO: 82172 - DNA, 1055 bp, Homo sapiens
tgcctaccacccatgcctggctaatttttgtatttttagtagaggcggggttttgccatcttggccaggctggtctcgaactcctgacttcaggtgatccacccaccttggcctcccaaagtgctaggattacaggcatgagccaccatgcctggccatctttctttgcactctccaagcctgcttcagacttgtttcttgtatcccttttactatgctttagactttttttcctctgtttctgcagggctgggcttacctccatttggcttttgaagaataaaataccctcattctcttcagaaacagaaacttcttcatttacaagcttgattaaaagcaattcttctaggtaggataggtttaaaaacctgattgcttctaggttaacacattttacatttatcctttatgtggtgtgataagtttagttggtcaatgacttgatttctcttaatgcctccagctctttcagaatcatttaagttttaggtacagcactacaaggtcatctttaggtttgtccacccctttagggttggctcatctaaatcttttcctaaagagatgggaaaagtggtgaccctctctactgttatttacattcaaaatggagttcatgctttgtttatgaagaagtgagaaatcaaaattattgattcatgttataccagtagtgagacactggagaagttacttcactcttgagctgctttttatatttgtaaaattagaataatccaccttctcagagttgtgatggagaagatatgaatgcactctatagcatatcaggtttccaaattgatgttgaattcttgtcctggtccttttcattttaaagtattttttctttctttttaacatcccaggtcctactttgattatttttttaagagaaaagatctgtggacaatatccttgtttttctttgtctttagcaataaagactgtcatctgcttaagagtaggccttattataaagttctggttgttgtgcttccctcttgccattttctttaatagtgcaaattcagcttggcatcctctgtgat

SEQ ID NO: 82173 - DNA, 1976 bp, Homo sapiens
aatgacgtggtaaatgcagatgagcgtggcctgaggcatgtgcaatatttagacatctgttgaatgatgtgatgcaagttattttaggtaatttcattaaagatacctaatctctctgtttctgttaaatttttttttttaacaagccaagctccaggactgtgataagtaaacactgaatttagaccattaagattaaatgttacatataacattttcattatgactgaaatcatttcagtttatattactgatgggctcagaggccacatcatggtattcactttggttaaattgtaaaatggttttctttagaagggaatacgggctctaatggtcatgatacatgttttctttttctttttttctaacagaaagcgtggatacccatcaacgaagttttgatattggaattcagattggctatcagcgacgcaataaggatgtgttggcttgggttaaaaaacgcagaagaactattcgtcgagaagatttgatcagcttcctgtgtggaaaagttcctccaccacgaaactctagagctcccccaagactgactgtagtgtcccctaaccgagctacttcaacggaaactagctcatctgtagagactgatttgcaacccttccgggaagccatagctctgcatggtaaagccgtttaaacatatttctttggaaaaatggttaagagggtgcctgtggacccatttttcacggttaggtttaggtccagatatactgttttttgtcttacagtaaacagcttgctctagaaatgtttaatagaatgtaagctaagaacttaatatgggcgatttctgtcagctaacctatcctagaaaatgtttttagaaagttagtttgagcttattggtgttaaaatgacatatctttctgcagtgttgattagaatttatcgctttacacttatgtgttgtacgtgtttttttcctcttctgaagtcaaagaggaagttcttgtgtcttaagaattctgttatatttctaatggtccatgacaggcaagtaaggtgggaaattgttgggttagttctcatgggacctgggacctcccttgacacctttcttacttggtttgctgtagatggtgggagaggatggatgtaagacttgaccttctgcctgtcgtccctcaggtcccttgcactttaagaggcaggaccagcagagtgcagccagtgggcaggtggatctctatctccccaggccagacctgtcataagaaggcactcttggctaagggattttagtattgctggagaaacccgggaaatgtagtcagtgataagtctgttgttgcttgttgctgtctaatacagacttccaaatagagctgggagagttaacctgtgtgacagcattgaatactgctgtaggaaaaaaagcaacagaataataagacttgcttgaaaccatgatggaaagatggatcacgcagatggctaagcaggtagaagtaattaggtcatgaatcctttttttcttttttttttttttttggagacggagtttcgctcttgtggcccaggctggagtgcattggcgcgatattggctcaccgcgacctctacctctgggttcaagcgattctcctgcctcagcctcccgagtagctgggattacaggcatgtgccaccacgccggctaattttttagagacagggtttcaccgtgttggtcaggctggtctcgaactcccaacctcaggtgatccgcccaccttggcctcccaaagtgttgggattacaggtgtgagccactgcgcctggccatgagtcttgttgaaagttaacatttttgggccatagtacaggtcatctaaaacaaagtaacctggtaaggtactaagaaatagtggcatataaagaaactttatagacgttgaatcattgagactttataatacctgtagagatcttgttctctctggcaaaccgtagttctttcctgaaac

SEQ ID NO: 82174 - DNA, 1033 bp, Homo sapiens
ataaaaaccatgcttgttatcttaacgtagtagtagtgtacataatagtaaaaagggcaagccagccccctctgccctcgaaaaactgtattctccaactcccactacattttctcatattgaatctgttccacctgtgatttattgttttcctgaactttgggagttttaagcaatgatacagttgaagggactgtttataattttcacatgtttaagttgtgaggctttaaaacttaaatataaggctttgtctaggaagaaaatgatctttaccttcaataaatttataatgtagcactaatccagtatagattggagactgaatgcattcttactcttagggttcatacctctaattcatgtggttaagacagtgttgtggtgaagtaatagggccccttgaaagaatctacagaaacataaattatactgagttgtgctgtactggtttgtgagaacatcagtgtattaaggagaatggtagtttaatttgaatatttaaagaaagtaatttgaatggttctagtactagggccattattaactagtaacatagattagtgacttcaactgggtgtccttattatctgatttgtctgaagtgaaaactgttaaggtgctcttttaaaatgtatttggaaacaccatagttagggtaaatacaatgtcacaattcactcttgcatattatttgcttagccaaatttatgaattctaagttaggccaaattgaaggttttggagttttacattgtgggtgagtctaaattcatgcgtttggcaagcacaaggacatgggaaaagaatctggtattttgaggcaggcttgagtttataatgaaagcaaactcagttcctcttcatgtcctatgtatttaagagaggacagttttccctcagtttttttccccttccttacccctacccccatcaaatacagcccaaccaaataactgtgttcttaatttaaaggaaaatggcagacttgacacctgctgaatatttcgtgtagacagagtatgacaatgaa

SEQ ID NO: 82175 - DNA, 1089 bp, Homo sapiens
aggtcttctgagagcagaaagggatgtttcacagcacagcccggctgtgtggtgctcagggcaggccctctggaggaggtgagcctgggctcttggcctaatgtttcagctctcactttccagtcctgagctgttgttgccagtccatctttcatgagaccattggagtgatctttctggtcttgtcacttcatggtttaaagtttccctgggcctacacagtgaagtccaaattcagcatggtattacaagacccttatgatccagtcttaaccattggttaggtatcctacccatactgtttatctcttgaatacctctatgctctttgacaagtccagcccctacgtgttcatacctcacttctgtgacacagccttgcttcagggctcccaatctctgtagcctccctgaactgtgcatttgctctgctgcttgatttgtttctgtgactgttccattctcctcgggacacatagcagggaccttgtcttggtccttttttttttggctttaacagaacatagcaaagaacctgacataggtgtagtctgagtttaccactggggttatcacagaggtctgctaagtgaatacaacacagtggggacccagaacctctagaaagggttgaggattacaatccccagatagctacaatcagggaataatgtaacctgtttgcctagggtgctacatggtaatcttgaattagaacaactgagacttccatgggaccttagggtgataaccattaaacctactctttcagtgtttactttgtaaaagcatcacactaaggaggttgtcatttaatcctcacacctaccctgggttattaacactgttgatgaagaaagccttacttggctaagatatggagcaggttagtaagtggtagaatagatactccagtcctgtctccaaaatgcaaatttttttttaattaaaaaaatttctaattttcaatatatttatttttgattttttattttctgtagagttggagtttcgccatgttgtccaggctggtctcgaactcatgggtgcaagccataccccaacctcgaccttccgaagtgttgggaa

SEQ ID NO: 82176 - DNA, 6801 bp, Homo sapiens
ctggaagtattctttgccttaagaaaaggagaattgctggttggttccaggtccggtgggtaccctcatttcccctgggcaattttactgtaaaaatagaccaaggatctcaaggcccagtggcttttgccttctgggatacttttttacctccctgtttagtagtaagggtcacattttaaattgcagctatcacactggagggatcagatcatttagaactttgactgcttaaatattactcttgctaagatcttgagcttgtctcatgttgacagactagtgaagttggttacgttgtctgtctcctcactggagggagagattcagagttgccctgtccaacccagtgctatctctggaaagggttggattgaaatctagtctgccttcattctgaggtataatcatgagggttaggtgaaagggtcccgagtgagaagatggcatgggtcctagggtggggagcccgatgccaagtcagacttcactcggtatgtttattcaaagccccactttcactcgtagcatatcataggtggtctctgcaagttgctgaccctgattcagactgttccataaaagtcagacacttggttttagttcccaaactgattttgatgacattcttgactgcagggcttggagttaaccccactgggcctgagttgtctctctgtaaagttacacatcatttcagactcaaaggcctctagcatgcagggtctggtgtcataataggcaccaatgggaaccattactgtcattgccttttttggctttaatcttcccaattgtaagttcctttcatgtttaaaacaagtttaaaagacagggggacttaggcatgctcaggcagtctagcctttaatgtaagaatttcaaaacataaaggaaaaaaaacttttttttttaagcagtactttgtgagttacaagacagcagcagctccttagtgttgattgccgaggcctttttggtttgaaaactctgcttcctttgtgaatttggtgttaggagttcttattgttattctgcagcctttactattgtcctttatttactgaacacagtgaataccaagcactgtttattagaggttaggagtaggggcaggtgattaaaaaaacaaaaaagctaataatctcctcaagcaatttctggcctaatagaattatagtagacagtgaagtatctaaacccagggaatcagattgaggcaccatgtccatcgccttgagaattaataggctgcatttctgggttctcctttttttttttttttttgcccaactgagtctttctgtggacttacatggaacttcttattctcttaaatcattaagttacttgacaatattcttggatttggagaaactggatgtagggccgtatgaaaaaatcattcgaaatcagatttaggggtataaggttggataggaatgttttagaaagaagaatgtaaggcagataactaatttgtcacatccaaagtataaaactgctactttttccctagaaaagggaagctcattttaggcagcctaaaccagtaagattttcttcctcctccaagtgcagatttttgtacctttcgtttgtcaaaacattctttggccctatgcatgccagagtgatatagaaaggaagttaccacatttttttgagaacaaatcactcctgataaaatttcttagacaattgataatcattttaagaagaaatttaattgtatttagctctgtgtctcgcccctttggtgtcactcttctacctcttccatcactatagctaaatatttagaagtatatcttgacacctagcacaaatgttttggttaagtatcttaaaactgatggatggtatggctggggcagcatggctcacgcctgtaatcccagcactttgggaggccaaggcgggtgaatcacctgaggtcaggagtttgagaccggcctgaccaacttggagaaaccccgtctctactaaaaatacaaaaattagtcaggggtggtggcgcatgcctgtaatcctgtctactcaggaggctgaggcaggagaattgcctgaacccgggaggcagaggttgcagtgagctgagatcgtgccattgcactccagcctgggcaacaagagcaaaactcagtctcaaaaaacaaaacaaaaacctgttggtatagtacgaaagaaacgtcttgcagttttctgttgcagagaattaattagaaccaacctgttggattatacacattcacctttcagaatcctttcttctctgtggaaacccacactctcagcagtgtgtgggaacacagtagattcttaaggaatgcttgttgaatgttgcagtctgcatcttcttgaagtaacagaactgttggtagctgtttaaaagtaaaatgtgtctaaagaccttttggaaattaagatgtaagagattaatgcaccaaagcagtctcttaattacttaaaatgaattatttcaaagaatctttaattgaattttctgtgaagtctggaatttgtaaattatgtccctttgttcaaaccagcccctgaaaagaacaattaaggcaattaagatagcattaaagttttcaatgaagttggcattttctgtgtattaagattagatgttagctgctgaagtttgtggaggtcggacataaagcttccaacatcagtaatgcaaaattgtcttgaacctgcgataaaattttgttggacttttttttcattgcagtgaaaagggccatgtagcatgcctcaaagccaggttactcagcctagtccttgtttaagcagttttgatattcattcaagttcaattttctcactgattttatgattaatttcttggaaaatttgaaagttttcaagaagtaaaaaattaatatcttgttatcccagtatatagagattaacttcagttcaatgtttggtgcattttcttctagtctttttttcaatgtataaatattaaagttatttcatagttgagatcatactgcatatatgattactgtatcttgcttttttcattttaacgtcgtgagcaattttcccatgacattacaaactgtctttgaaaaatggaaaacatttggggctgtcagcataactgaaaatgttttcttggtgtgacacatgtatctttgtaattggtttgatttagtgtgctttatttcaataaaaattcagtattataatttacagattggggtggggagtggtatctacttcaaattactgaaatcttcctagtagaattcctttttaaatgtttgaactcccctggtacatcttaaacacgacattgacactgcaagtgcttggatgtcctggcacctcagaacacaactttgtgcaaaaggagtgctgtgcatctgaatagtgcaattcatttccaatgcaagaatgccagtttcttagggcccccggtcaggatattacccacttggtttaagttgtgatttcaaatcccattttctatgggagatacactggtggaacaaatctgcagagggccctgcacctgcgctggtggatcaacggtgtcttctcacctccagggctagctgccttgccttccctcgtggggcttaagtggctgggaagcagatagacagtgtagatgaagtcctgggccactggctgctggactgaggcagtgagatgactgggctggcatttgttctttctctgcctgtgtgtgacctctaactatgtgcctggaaactgaattacatgtaattaatgctgcaaacaggattttcttattgcctaagcatgaacttggtatgaaaataatagttaataatttactatgtaacttggattcttataacctggactgtaagtttgttttagctccagtgggagtttccttttcaaagtatgatgaaaccatcctcatcttttctacccctggactaatcatttaaaatggatacagacactttaaaactgctgagtttatcttgtgttaagcaattaagacttctctgtctaatcatgctacttgttctgcttttgtcaattgatactctcatagcccttttgaaaaagtatgtttttgtagaaattaagttgtatgccctcaggacgtacaacttggttttttttttttgttttttttgtttttttttgttttttttttagttctgaagcatgtttagatttttctgtacttgtataggtctgattgtttatgtggcttagctaaggtttcctaaagcatcttctagtagctgtcattggtttgtaaaataaaatttgggctgtcaaaatgcacattttttggttgttaatcttaattatttttgacccttgtgaaaagtctttttggggaagattaggtaggcagactttgaaaatattttcactgctatgagagtcagtcatagatcatattgcacattaaagttatcaagataaacacccaggtcatacacccagtagaaaaagatgatttcccagaagctgttagaattttcagattgaccaaattgatgtttaacacatcttctttttcatggagaatggcagctgaaacaataaggaacatttgcttgaaatccctagtccacttctgatacagtgttttgagccttccatatttgttgttaggtattaaacgtgctgccatgagactcctatgttaacaagggcattagggtggggtttgttgaattctttttataatttgaaatgataaaggggatcttgattttaattattgaagtagcccagtttattgctgaacgtgcccatattttgccataataattaccttttggattatgaaacaagtacgaaaggttatctttgaagaacatgggcaccttgtaatatgttacaggctgagacactaggatgaaagaaggcacatctctcccctcaagtttagtcttgcggtagaactttaaaaaaaagccaacaatggggataattgagttttaaacttgatggcaatgatttaagtgaagagaacacctgggtttattttctggtgttggagaggtgaataaacatcaacagttgaacctttgatttcagtggatttcaacatgagggggtaggactttgaagtattattctttttcagaattcgtaagtgccaggcactgtgcttaggtcattagatggagatgaaaagatattttctataggaagagacggttgattgtaccatgctgtagaaagatagctcaagatttttttttggtttattttgttttttaaaagtaagcttgtgccggttggggaagaggaagtgaagttcctttttgatggtgttgagtttgagatgtccagtaggcagttagaaatctgggagggccgttgagctcattagtctagttttgggaaacgtgtgtgggtaaggtaggggttgaggatatcacccagggtgacaccagcctttcaggggcagaagggaaccccaccaaggcgactgaggagtgagcggagagtttcaatttcaaggagggggaaagaggagccagcaggaaactaaaatggagaggtaggagaaccagggaaggagcctcataagggaggtgctggggaacaggtgggctcactcagggagtgaatgttgggagagacagacatttgcaaatgttggaagagacagatagttgcaggcctcactatttcagagagctgcaaattgcatgatgttggtagtcgggatacggtctaagggtgaagtgaagagagcaggaagggaagagagagaaactgttcaaagagatgaggcctaagaggcaggctggccctaggaccaacctgaagccacctttttgctaaaatactctaggcttggaagaggatcagaataactgaataggaatatagattacacttgggtgggagtgccagctcttgtttactacctgttgaccttggatgaattaacttttaaacttgggttttcacctgcagaatggagatattataggtgtcataggaagtaattgacatagtacctgacacaggaagtattctcatgttaatgcttctattttttaataggtgctagccttggaaaggttgagaggctgaagagggacagtttgatttcctctgaccaccagcaggaggggaggatgtgtcttctgcagggagagcagccagggggattggttggatcagtgcagaaaggaatgggggcacctagagtgcggagttgagcacctcagaagggaggtgtggccctcaggacattgtcagcatgtgcgatgatagtggaggccatggatttgagaacatttcagagaatatttgatggaggggaacgccaaggggaatgtaatagatttgtgataggaggcagagacttttcaacttaaaattcaaatttaaactacatttttagggagttcatgattagaaagaatgggcccctgtcaaatgaaacctctaagcttacttgaaaatcttataagtcctattctttgaaaattaattgatagtcaagcaataacagatccctaggtgaggagagaatagtggaaggggaaattcctaaggcagaagatcactgccagtgacggtaggtttttaaaaatgcaacactgtgtttggtgtttcctggcctgactcatacctttcacaggtttatcctgaatgtttaggagtggaatgtaagtttggctctttaactgtgtaagagtttaaggaaaggaataagtatccatgagtgctgggtatattctggattcagtaaagtaactcttttgtttttgagacggagtttcgctcttgtcacccaggatggagtgcagtctcggttct

SEQ ID NO: 82177 - DNA, 1220 bp, Homo sapiens
atagtggttgccataaaaggaagttctaggtatttatagtagatgcctcttgtaattatggctttcttaaaactataatcctagcagaggacatcagatattgtgtagtcgttagcaagatcatcataggcaaacatatatccgttccaaggctaaaagtgaccttaactgtatttattctcaaagggaaaggaaatatcagatgtttatttggttatagaatgctttttttttttttgggtccatttcctgctgtgttgagtattttgcttcaacagtattgccaggttcctaaaattgtctaaaaacatgatttggcttccatttttgcagctgcactgtaccatgcacctggtttctatatagtaacagtgtgcaattctaattattggactgtgccctgtttttagttttcaaatcaatttctaattctggtgattgtgtgatgtaaagaggtgctatgatggtcatgcaattaatactaaatattgaatcaatgcccagagctttattggattcactttgtgtgtgttagtgctctaaagtagcagtattattattaaactgtccccagagtaaccctgtaggcctaaagtactcagttttaagacaaacactacttcccatgcggggtactttccttatggtaaatgtaaacatgtagactgcattcgaggtgacctaaagtagagaggtcatgaactttgagaatgggcttcctttttggttcagtattagtgagagggagagggagatggatggtggggtaggttttctagtctatcattttacatttttcatggagtccctgcttagtgcagtttccattggaatgggtggaagatgataaagctctcttttttatctactaataatgtgattgcaacttaaaatagcaaaacccaactctccctgtccctccaatccctctcctaaaaagttcagtttggaatctcattctggaaaagatggaatcgcatggagattctctagctgttaggtagacctaaataaaaagttctcaatagattcctcttttgagtaaatataagacctcttgtagctacaatgttttagagcatgtttcatcttcatttttaatatcctgaactgaatgatagtgtttttttagatgaagaactgatgtcagcctgccaggtactgtaatttattctatcatattattatattatatatcaagtaggacagtgaaaaatgtt

SEQ ID NO: 82178 - DNA, 1068 bp, Homo sapiens
agtccagtatcagttacttcctatttttatccttaaaagaccattgcaaatcagtgtaagggtttttccagtaattactcacagcactttgttaaagtttgcaatttcttcagccatttaataatatctttctgtgaagaaactttgctgagttaaccataaatgttcattcattgactgggtgggatgtgaatggaatgttagaaatgttgtgtgaattgaagttctgtattcattatagatgtagcccttatttaaaaaagtgaattccatactaaaactaggaatgaaagtgagagatttctaaacttttgcgaaagtgggtcattttttgtttgactataatagcaggaagaattatagcaatctgtcattttacctgaaacagacaagcctatgtattatgaatactttcaagcttccctttggaatatacaagacatgcgtttggagttacctttgtttttctatcgtaaatttagattctggaattggggtttggtggtgcaatgtgttgctcacaagtggccagaactcctattcctaaaaggattttgagatggaggaacacatatttaattcccctttatgccttggttcttgctcctctttccacgttggataacaattttttggttgttttgtttaagttggtgctctgaagcttaatctcagtaccctttactctgaattgtcaaattttgataaaacgtgccattttctttggtaagagaaagcaggtcttaatgtctgccagaacacaatttatatgccttattggcttcattaaacttttagaaaactttagcatttgttacttttttccattgcgtttactttcaaatgcacctaatgaatttgtcacccagtcgcaacttttcccttctctgtcccattgctttctcctttccccgacgcacagaataaacatgaagctcagcagtagaagcgtaatgatttccctcaggaaaaacttctgacagctaggtttttcaagggtttccctgtgctagctgagatgcaaaacaaatcatggaagattgcatacctgtgtggtattttaaaaac

SEQ ID NO: 82179 - DNA, 1008 bp, Homo sapiens
ccttagactgcagcgttctgagcatggctgaagtattaaaatgtttaatattttttagagcaaaattgttggaaagcatttggctgaatctaaagacctgcagtcagattcttcaatgtggtttacccaactggagtagtgataaacaccttaatcataaaatgaataaaaacaaaaaaaccatggggcttgtctgcagttttgttttggtcatcacatctgaataactttttgatgcaatcaaatgaagtttaggcttttaaaaaagaattagctttctaaatgtttttttctaagggctactggaactcattaaactcgaataattgtggctttgggcctgaagatttccattcaacagtgaaaactggctaacttcctttatagtgagagggatggccaacatccaacccagagggctagtcagcctcagaggccagtgcaagacgccaagagatgattttgaaatggggccataagtttagaaaattatgaacagaatgattgagtttttggcctggctactacctctagtggtgactacgtcagcagattaatctcattgcattttactttatgtagtatgttgtaacctggtgcttcattcattagattggtgactgaggtatttagtcatggtgaggatgggaatcttcagagatacattctggatttgtggaataaagtgactagaaaggttcttccagagcaaccccttgtttaaagttataagtgtttatggtacctgctaccccttctggaaagttgtcggctttgatggtttagatgaccttaccccataaggccagcttctagcctccctttggaatatttgaggtgtgtgatgttttagtgggggcagcatttgagagacgagcaggcccgagcacccaggctggctgtcagaccgtgtgttgtgctgttgggtttgatgggatgagatatccagggttttacttcctataatgggatctgcaggctccttgtgaagttcagttagacagtagc

SEQ ID NO: 82180 - DNA, 1103 bp, Homo sapiens
acccaccaaggtatgtgccactataacttagagctttaaggaaggattctaagaccattcatacctcttcctcaggagtggcggtgccagggctgaagttccctggggaaaaggggatcacctgctaaactgtccttgagtgtagtgggcaggagcttaatcactcccaaactcttttccccatggtgagtctcaagatcaccatggccatgttgatttcaaggtgtatgtagaaatttgtaactaccaagaagttcttatttgctgtttggggtctcttaggttaatgtgaatgttgtatagaactgtgtttgcgtacacaattgcattgggcacaggaaggctcgcctcttgcccatcctcagtgtttctcagacatactggactatgatctgtggtaagaaatacctctcccatcaagatcttttacccagccacaccttttgtgaatgaacacacagaactgatgaaacaggtctcagcagttcttagctttttatgtcaaatgcactttatagcttcttgctgtttcactgaacaggatgttgtatgtgaccaactgtgttgatttcacagccagcttgaaaacctgggctctctggacctcagcatgcagcacagggtaggtatagacatttcttgaatgagttcataaaaggtggcttgaagttttctaggttttcacaaggaactccctatttttcctcttcctgggccttaggtctgtcaagaactagggtggtggtgaagagaaggactttggggtcagtagggtgtaggtgacagtcccactggcggcctgcctcccgggcccctccctcaaggttatggtgtggaggatgcctagcaccatgcctggtgcgaagtgaggactcagatgttagcctttaaatgtgcttgtcgtggcatggctggataagattcccttctcagagtccgagggctcgcttctgggttctgcactggcctccagcctcagtttcccccgtctcctctttgctctctagttttgtgtttctcatccttccttcatgttagaatctgccactgggcatgtggtaccccagaagaactagatgggactctggggtggggcccaggca

SEQ ID NO: 82181 - DNA, 1080 bp, Homo sapiens
tgtaatcccagtgctttaggaagtcaatttgggaggatggcttgagcccaggagtttgaggcagcagtgagctatgatcatgccactgcactccagcctgggtgacaacagcgagaccctgtctcaaacaaaagaaaacaaaacaacaacaaaaacacacaaaataacaaaccaatagacagtcccactctgcccctggggatttttgatttagcacccatccaagtgatcatttgcaaactttctttctttttttttttttttttttgtagcccagaggtcctttattttttttttttaacacctattattccatgaattcatagggaataggttccagcagctcaggctccttcccattggttctcacaaagtgtgctactctgggtggagcaggctggcgctttagttgaacccaggtacctttctctttggcttctttctttttctgatcattttccttcacacgtttcaggaagctatctcggctcttagagtgcttaatgtgctcaatacgcacattaattctcttggcaagaatcttgcccttaacttgtttgtttacaacaatgccaacagcatgctgggtaacattgtagactcttccagttttgccatggtaacacttgtggggcattcctttttgaacagtacccattcccttgatgtctacaatatcacctttcttatagattcgcatatatgtggccaaaggaacaactccatgttttctaaaaggcctagagaacatatatcgggtgcctctcctttttccctttgtgtttgtcattttggcgaattactggaagatggcagttccggccgaaaggctgcaaactttatttcttaagccacggagccctctttttttttttttagacttgctctgctgcccaggctggagtgcagtggtgcgatctcagcttactgcaaccttctcttcccgggtgcaagacaatctcctgcctcagcctcctgagtagttgggattacaggcacctgccatcatgcctggctaatttttgtatttttgtagaggtggggtttcaccatgttggccaggctgctcttgaactcctg

SEQ ID NO: 82182 - DNA, 1034 bp, Homo sapiens
cctggccaatttttttagagagacagggtttcaccatgttggccaggctggtcttgaactcttgacctcaggtgatctgcccgcctcggcatcccaaagtgctgggattacaggcgtgagctgccacatccggctgaaaattcactttttaaatgccaagataaacttacctccttgtagctccctcttactggatctaattgtgctccccagtggcctcacaaagtatgtcttgtctgtcttctacctaagtgtcctctgaacatttgaaaagagtgctcaaattcctaacagtctctctctttctctctctctttttttccctttaagctaaaggaaaacagtttctcaacctttctgtttgctctcctaccaacaatttcccatagtctttatctcttttgaaatggtggccttgactgcaggtgtgtgatctcaccagtaggaaccaggcttggcatgtcacctcctttcccttgaacaatgcacctctattgatgcaacctgaggtaacattagtctttaaaatttttttatttttagttttctggcagttccactttacactgctagctagtgtttagcttaacattgatgaaaaatccttaagtcagcggctgaggagccaaatgctgtcacaggcaagacaggtaaggcaaataagtgaaacattctgggtgaggcttgttgtgacataaagagttcatgcccttttcatagtgggcagcagctcgcagctctagcagattgttgctatgcagagtgtaggctcagtgttaaaaattagaagcttccacataaaaatccagactacaacttctttaaaaaaaaaaaaaaagaacccagagatctggcaaccttgtgttcatattccagcatagctggagatgagttgtggttgccagaaacccttgggcaatcctgcagaagaagccaagagggcacagggccaccttccatgtgacagtgctgatctaatccatgagcaaacagcgtggaccaaaacagtccccaggagaggctggtgcaggaag

SEQ ID NO: 82183 - DNA, 1065 bp, Homo sapiens
ctccttccctccctcccttcctgcctccttcccttcctcccttccttcctccctccctttctccctctctcccattcttcttcgcttcctctctttctccctcccttcctgcttccctcccttccaccctccctcccttcctgcttccctcccttccaccctccctcccttcctgcttccctcccttccaccctcacttcctccttccctcccttccactctccctcccttcctgcctcactcctttgctccctccctcccatcctgcctccttcccttcctttctccctcccttcctctctccctcccttccttcctcccttctccctttcttcttcccttcctccctcccttcctgcttccttcccatcctgcttcctccccttcctacctccctctcttcctccctcccttgctgcctgcttctgtcccttcctccctccctccctccctcgcttcctgcttccctctcccctccctcccaccctccgttgctccctccttccctttctttgtctccatctttttattttaaagcaataacatctcttcgcctctactaggtattctgagtaaaggacctggtttagaaattacaaaggtagagacacaaggatgaggacaggcgggagatggatgagagagacacttccttaactgatttatttttgttcattttcattttttaaaatttatttattgtctttactttgtaattttttccttttatttttatttggcacctaataattgtacgcgtccgtcaggtacagagtgatatttcagtaggtgtattcgatgtataatgatacaaatcagggtaattagcatatctgccatctccaatatgaaccatttctttgtgttgtgaacattcaaaatcctctcttcttgctttctcaaatatacaataaattatagttatccatttttgccccacagtgctgtagaataccagggtgagttctggtgttgatttatcttttagagataggcagactctattctaagggggtcatggagattgccgtagggatccccgcaagggcttcttgcagtgggaga

SEQ ID NO: 82184 - DNA, 1036 bp, Homo sapiens
tgcaaatgataatgtaaccaccaccctgatcatctgcttctcaaagggtggtccaaggactagcagcatcactcaggagcttgttagaaatgtggaatcctaggcttcactccatctactgagttggaatctgcattttaacaagatcccctggtaatgagcataaacgttaagtttgagaagctctgatctagtctagttttagtttttaaaactatgctgtccactatgatagccacatgtggctatttaaattcaaactaatgagaataaaatatattgtaaaagttagttccttagtcacattagccatattttcagtgctcattaactgtacatggctaccgtcttgcaccttgcagctgtagaactttccatcaccaccagtagttctaccggaatgccctgtttcagaaggaggcatcaaaagaaccttctttgtgaaccaacagatgggcattgagaccttgttcaaagacaaacataaaaatggttatgggtcagagaggcaaaagaggtgccgtttggcagaaatacctgagccatctgaaaaagatgggagtggggaaaggaaaaccttcttttaaagttggctgaagcctggggaacatggcgaaaccccgcctctaccaaatatacaaaaatttagccgagcatggtggtagatgattgtagtcctagatactcgggaggctgagatgggaggatcacttgagcctgggaggaagtggaggttgcagtgagccgagattgcaccattgtgctccagcctggatgacagagcaagaacctgtctcaaaaaaaaaaaaaaaaaaaaaaaagaaaagaaaaagaagagaaagttttaaaattggcagagttcctgggctagccacgttgcagctctgctggagaaatgctgcacaatgccgagtgtaagtgcatgtggcatccacattattatcagataaattcattatgatggatgcgatcacactgaataccaaatgaagtggcagtagcaggacaataaattaaagtgttagacaaacagcac

SEQ ID NO: 82185 - DNA, 1035 bp, Homo sapiens
ttgagatcacccaacactgaggcttgatggtggcagaaagaatgttctcctatctgaagcatccactgtagctttcccaaattaggaaaaggagcatagaagtgtggaccagaaggtagagaattctccagggaactagacgagggaagtgatgttgggctagcaaagaaagggtcaaaacaaagaccctggatgtgtggtggtgggcaccataccaccttggaaaagatgggtcagagagttgagccaaggagaccaaacacacagagaaagcaaactctcccaaggaatggggctgtctgtcttgatcttggtttcatgatctttccagctcccggtacagtgtctggtccctgtacgtaccccataaatgtttgttaaatgaatgataaacacactttgcaaaaaaaaaaaaaaaaactttggtgtttttcaataccttgtcatgattggcccccatggctttctctcttgatccttctgagtatcagaataagtatgatccaggactggaagacatccatgtatgactgcaaggtgctagaaagagtggaaacatattacttgaggagcacactagggtctaggaacatgttggggcattatgacgcaaggaagtaggaactaatgcacactcactcggctttgctgtgagagcctcctggattagataaggcaatattactcctaaggctgctaactgaaggtccatgcagagaatctagcctgtagatattttgcttgggtcaccattttattaacattatttttaatgtgttaccaatccttaaaaattgggagatctctttagaaatctagatttctggcttcttttgaagattcagaagctgatgcatccctggaccaaaattcccactggcaatagtaggctattttggaatagctgctggtccctttggacagatgggccctctcccatttgttttgacctctgtccaggttgctttgcccattttcattgccagcctggtccctgtagaccctggagtttgagactccctgtgctattccttt

SEQ ID NO: 82186 - DNA, 1656 bp, Homo sapiens
tggtccaagtatgtaatatattaaacaaaattcaggtgagtagtaacataatatgctgaaaaccattttacacatgagggttcttgggctttagagaaggtaaattagttgcctatatccatggatgaaaaatagttgagtctgtatttgaaccccggcagttcaggttcaaaatctgtactctatggactctggttatgtcctaaaatctactgcttgccaccctcaagggaagacataatgtttgcagcaaatgatataattcctacaggctttgctttgcaaaatacaacgatgacagaactatccagcagaattcggttcccgtgagcctttgttcaccagatgctatttttgtgccagttaagagtagagctacaaaaactggcgtcatagaacccgacaattagaagaaaattttggcattcatccctttaactaccagcttccgagctcatgctgtggcagccagaacatggaccttggagtctgattggcttgatttcaaattccagctctgccactcaaaagctgtgtgaccttggacatgcaatatcagccctctgaaccttggttttatcacccgcaaaagacaggtggttctaatgaggtcaaacatgcaaagtgctttgcacaatacctagcacatagtaggcactcaacaattactagtttctggatactatgctcttccatctcagttctgaagtcaaccataagtaaattttttttataaaaattatctcattttacatataaggcagacgttaaagggatgtggaaaattcttttgaagatttcataacctttatttctaggtttggtgccaaagaagtaaacctcagttcatcccactataaaagagaaagaactttctacctaatggacagtacagctgagatattctatgatttaattaaaagctgcagagtgtcttcctatctgcaaatgaatgacatttaagtagaaactagtgttcagctatttcattacctggttaagtaatatgccccaaatagcaagctttagtaattactgtacacttttcttaaatacgctgtttactgattaccttataaccggataatacacatacataattttatatttatagataagtgctctttcccgacaacttgaacacttaaattatgcaatgcaaaaatcacataattgtggagaaacatttgtcgtctggcatgtgagatctccaggtaaatagcataattataggtatctgtttggaatcaatagaaggtaggtccttctattgatttacaagttatctttccatcatttttccacttttaaaagtgaaattcaagggctgggtgcagtggcttgtgcctgtgttcccactttgggaagctgaggtgggtgggtcactggagcccaggagtttgagaccagcctgggcaacatggtgaaacccaactctccaaaaaaaaaaaaaaaaaccaacaaaattaggtttgtcggtgtgtgcctgtagtcccagctgcttaagaggctgaggtaggaggatcaattgaacccagggaagttgaggctgcagtgaaccatgatcgcaccaccgcactccagcctgcgtaacagagcgagatcctgtctcaaaacaaacaaacaaaaaagtaaaattgaaaattaccttaaata

SEQ ID NO: 82187 - DNA, 1089 bp, Homo sapiens
ggattacaggcatgcaccaccacgcccaactagtttttgtatttttagtagagacagtgtttcaccatgttggctaggctggtctcgaactcctgacctcaggtgattcacccagctcagcctcctacagtgctgaggttacaggccgagccactgtgcccagccagtagctatttttaaaaagattgtccaacaaatttgtgcatctcccttcttctgataacagatatggccaatgaggttggcatatgactcaggtctgaccagtcattgacctctatttcttaggtgtcagtaattggttcagtgggtggacatatgaccttaacagagccaattagcattcttccccggaattgatgtataggaaagatactgtgagaaagatactcttgcttttggctctaaatacaaagtagggtgtaaagttggaggtgctgagagttatcttttttcccgtcatgtagaaaaggcctgtttgtagtggaagatatgaagccaaggagggaaaagggaggtgagaaatatatgggggggagagagagagagagaagagagggagagaaggtgggggagggagggagaaagtgggagtgagagagaaggaaagagagagagggggagagaggaaaaaagagggagcgagagaggagagagaaagagagggagagaaagtgagggagagacagtgaggggggagagggagggggaaggggaatgagagagagagggagacagaaagagggagagagggggaaaaggggagagagagagggagagagagaaagcacagggagagagaaaaagagagacggtgagagagggagagggggagagagaggaggaagagggggaagagaaagagggagagagagagaagagagaaggatgagaaatgtattttggcagtgtcgagtgccagttcaactgcttggggacattatccctgtaacccatcctttcaatgctatatactccttcagtatcattttcaaagcgtgtgagccaatacattccactcccccttagcatggcttaagttcagtttctgttccgatttctcttgcagatttccctatacattttaag

SEQ ID NO: 82188 - DNA, 1044 bp, Homo sapiens
tgaatttaaacatgataccttgaggtccccgtggcaggccctgtccctcacccttggccccactggggcagtctttggattcttgctggaaaaaggcccagtcagcaggatatgctgctggagacaccaaggagtctataaaagcccctgggagtttattctcaaggtggcggcccttccccctctcctgggagctccattaggcccagtctgaaatctgcacttgtaagagatggggatgtgagggtcaaccgtgaactccatgagaatacaacctgttggtttactttgtcattgtatccccagaatttatcatgaggcctggtacatagtagaacctcagtgaatatttatttgttggattaatgaaagaattcttccccagaaggtactggaaggccagaactcactctcctgaattttagggcccaggaaggcaagtgtgttgccaagaactgagacatgactatgcatgggttacctcaaggtgcttcacttcccctgagccctgggactcttcaggagttgtattatgtggtcggtctctcatgtatgcatgttctaccgtaatggagagacagcgtgcaatgttcttttatacaccagtggctttacacagaccaatccctctgcctggtcacggttccttcctcctcacttcccgttgaaacagcctttgcaaaattataacagtgagagaaatcttacataactgactccgtcttgattctaacctcacaagctaacttcccttgcttattcttgtgcataggccaagctaaatgaaggaatttagtttatagtttaacttcaaagcaaggatgaccttctcaaaactgaccccatccttgtttgggaactgcaaccacctttgtaaaactaatgaaaggtcataaacttagaattttgttaggcatctgaattctgctaagatgtagagatgaactctaaccagtcattgcttcttctgctaagctaggaccataaacaatagtcagctactattctctagcttcttttctgtaattgcttactgctcaggag

SEQ ID NO: 82189 - DNA, 1818 bp, Homo sapiens
ggtaactggttctagaacctgtgattgaggaacaggtaggggaaggggtagagattcactgctttcctgagagttctataaatcctgagtaacttgggatctgatgtaggaggcaaacattgtggagactcagagttgggagacgaaagtatggaagtagctggggcagctgggggcttaggtggctccactggaggtgattgtatattatcatgtgttttaagaataagacaaagttttgaattgtagcttaaagatacaaatctcaatctctgcttttgctattgatttgaatttaaaaaagtaggatgttgggttttggtcagaggactgagtctgcatagggaaacattttgagataattcttctctgtgggccagaggtcctccataaaacttttgtagaggttcccatagtgctgtgggtaagtagactccgaggtcagaagactagggctggaatccctgcttctctgctcatcagccataagtccttggaccagatacttagctgttctggacctcagtgacctcttctctaaaatgggcatattgatgcctacctcgtgggatcattacaggaaagaatagaaggcatgttaaatgcttagcttagcgcctagcattcggtaatgtgatcattaaatgtcagcttttgttatttttaatacttttaaaagctcaggttttggaatcaacacagatacgtgtttcaaaaaagcattgtcatttgcctgacaatggaagggtaaattaattaaacactctgagcctcagtctttctccttgcaaaataatagcagcaacaatgaggaggacaacaaccacataacgcatcaggatcttgtaaatttcaatgaaaggtaaggcctgtgaagtgattagaaaactggtaaacattcaatacataacttgtattattttttcttattctcttggtcttactggtgaagggccattgtctgcttctgtgaaagtacagagagtccagtaaatctttagaaaatatgcaagcttgactggtctgtgttctcaacactgtctgaagaacctggctgagtcctactcacccaagacaaaggctggagatatttggtatcttcctttgattggtaactggttccggaacctgtgattgagtaatacgtagagaaagggggagtgattcactgctttcctgagagtcctataaatcctgagtaacttgggatctgatgtgggatgctgagaggaggaggcaagcatcgttgagactcagagttgggaggtggaagtatggaaacagctggggcttttgggggcttaaatagctctgtcggagggtactgtgagacctgggccctgaggggttatgatggcagcaaccaagacaacgtctgtaaaatacagagcatgatccatttgcagcaggcacctcagcaggggtccaggggagctgggagcgggatcatggttctgagtgcacaaaagggaaggctgattagaggaagttctgcccattttcctgctatttcccagacattccaggaccaagagtcacttttatttttatttatttatttatttatttatttatttatttatttatttattttgaagcagaatctcgctctgttacgcaggctggagtgcagtggtgcaatctcagctcactaaaacctctgcctcccaagttcaagcgattctgctgcctcagctaccagagtagagtagctgggattacaggtgtgcacctccacacccaggtaatttttgtatttttagtagagaaggggtttcatcattttggccaggctggtcttgagctcctgacctctgg

SEQ ID NO: 82190 - DNA, 1048 bp, Homo sapiens
gagtgtcggacataattgccaggtttattgtgagatgatgatggaagtcatggtttcatttcctaagacagaagatacaggaagggagggggcagatttggaaggggagggcaagagtccagcttttgtcagattgagtttgaggcttctgagagacacccaaatgtagattccaggagaggagttttttccaaaacatggagaagtcatgttcaaaatatcttgactgaaaatgcctatgagaactcatcaaaatatagcattttagagggaattgttgacatcatctgaaggaaagcacagagtgctagggaagggtaccagggttgggggtggaggaaagatggattgagggaaactgagagggagcacccagagaagtaagagaaaaccaagaaatgagtgtcatggaagccaagagtaaagtgtgctaaaaatagcaatagcagtgattgtcatagtaatagtagaaataatagtaataatggcattagtagcagtattagaatagcagtagtagtagaagaggagcaagaagaaacagtggtagtaggagtaacagcagcaatagtagttgtagacatagtggtagtcataacagcaacagcagtagtggtagcagtaacagcatcagcagcagcagaagtaacagtggaagtagtagtagcaacggcagtaataatgtcagtagctgcagcagcagcaggggtaggagtagtaaatgcttggagttattacctgtttggtgttctttagaatatagcagtctgtgtttttttttttaagcagattgagtcacgtgaccacttcatgcaacagaaagtgtaagttgcattgttcccactttacagatgaggaaatgaagaaatagaaatgttaggtagtcttactgagagagaagctagttagcaacaggactggagatagaattctggtctcctgagtcctcattaaatatcatgttcaccatttagatttacggcatagcatttcagaagttccatggtgtttcctactggaatgtaacttctgcagggcagggcttttg

SEQ ID NO: 82191 - DNA, 1049 bp, Homo sapiens
agaactggtgtgtagcgggggcaggggcagtgtatgcactactggtatttagtgagtggaagtaaaaaaatgctcctgaacatcttacaacacacaggacagcccccacaataacaagttctctggccccatgtcaacaatgctgaggttgagtgctgaactctgacttagagatatttcttacctttcctgacccaggagcagcctctcctctgctgtcctgacctgtgtttgcagagaaaattggacaaagcctaggggaactgcctctgctttctagctgtctagctcacgtactttctatttctgcttcctgagagaagtcagtgaagatggtgacaaagatgagtgaaaacatagagaagtttgtctgaggaaatgcaggattcactgggagttttttcaaactatcccattactaacccatttcttcctgttatctcaaaatggagggaaagatataaaccacatttattgctatggactcggttgcatttgagttgggaagagatcatttttcatgtgtagctcttggggaaaagcctggcttggaattcctgccaacttggagatatatggacaaaattactaagaaataaaatgggacagtccataattaatcattgtgtaagggctggaaaggttaactttgcctgatattcttcaattctgtccccacattttgatgcaccaatgacttcctaaacaagtgttaattcaattttatgtgccaggcattacgcttagggctttgtgagtgtaattccaattaatctgaatggcaaatgaagtaggtaccatcattaacttcattttgcaggtgaggagactgaacccttcccaaggtcacccagacactaaggtgcagagccaagacttgatcccagttctgactaactccagtgactaagctcttaactggctgtctaaaggctgattttggcccttaaatgtgtttgttgacctctacagtatttttaaaaagttggccaggtgcagtggctcatgcctgtaatcctatcactttgggaggccaaggtgggagggtc

SEQ ID NO: 82192 - DNA, 1543 bp, Homo sapiens
tttgctcttaagatttatatattaagctgtaagtaaatttgcatcaaaagaaaaaactgcaaaacaatattgaacagaagttaatgttatgcgtgctgaaatacctagggggaagtgtattgatgttggcagtttactttaaaatgctttggaaaatgaagtggattaatagatgggtatatatatatataattttattatatatattatatatattacatagcaaatatcataacatttaaatggtagaatgtaggtggtgagtgtatgagctttccctgaaaaattctttcaactttgctatgtttcaaatcttttataataaaatgttggaaaaaatattagtagagcatctatggtccgccaggcatggagccaggtgatagggcttgaatggtgaagaagacagacaaggcccccaccttcatgaagcttgcattttgtgatactttattagcatctgtggtttcccgtgatgcatccagtgggcacattcatttatgaattaatcagacctaacctgacctctgtacctacaacgcaattcacatttagctgctcaatgaacatgggcccattagctttctgcctccactcggatgataaatttgacagtagcccctagttgtgcagagataaatcactccaggtctaagtggtaaaccacagaaataacagcaatttatatataccccaggagtccctggtgagaactcctacactatttatgatgtgtagtgacgaaagttaaaagctagaacgggaatggcagctttattttattaccatctgcacaccacaaaagaaacccgaatggaaatgcttattggaaagccacttaggaaatcctcacgacacaaaatttatcatgaagaaaaacaaacaaaaaaacgcaaatcacacagagctgcagtaatatttttaatactggctgaatgcttccgaattggaacaaagagagatttttcagtcttctcaaataacttctaggcttatggtcagaatctcgatgagcaaaatgttacacggactccagtcacaataatagcaaataaataattcctttgcagtgtttatatttagagagtttgggacacctggatgacacagaaaataatcttttcacattacacatgagtttttctatgatgtcatagcctatgggtttgaattttagttttcaagaggcaaacataggcaacttactttgactctttaaatctcagtttctttatctctaaaatggagataaagtactactcattcagacagtcctaaaaatttgaaacaaacatggaaaatatttaatacctccttagtatctagtctgaattttatttttatttttattatttatttatttatttattgagacagagtcttacttactctgtctcccaggctggagtgcattggtgtgatctcagctcactggaacctccaaatccggggttcaagtgattctcctgcctcagcctccagagtagctgggattacaggcacccactaccatgcccagctaatttttttatttttttttatt

SEQ ID NO: 82193 - DNA, 1071 bp, Homo sapiens
gacatagatttttgtaaaatcctggttaaagttgttccaggtatgacttaatgactgggtttgtgattctccttccaaaactgtttatttgcttctcaaaaaaccagtctttgttctaggctaagcctggcccaagacagaaattctccactaggaacttatatgcaataatgctacaatatcccccaactttttccccacaattattgtggcaatttatgttgcaagaaaaaagggaaatatttaggatgcggtttcgtctaggggacttacctttgccccttactgttctaagatttacaacattaccagtgctgaggcaagacctttctaaagaactttggccagtgcccagggaatcatgagtttttctagtctgaccagtaggaacaggtactgtttctgaccctgtgtgagtctcaggtagtgtttcttctaatccttttggacgttctttccacgggcttgggtagtttcctcacatccagatgctgttcagtgttctgctcaatacaccaggggagcctctacaggtctctctcctttacatcctgcaaactctgtttacttcagatttcctggtcttatagctccatctcctcaactccaagagtccatggagttgaggaagctcttcctggcttccctctctttgggctgctcctggaaattctgtcaaggcagtaagaatcataggatttaactcgtttgtttctcacctcataggggtcactgtctccattgtctgccgtccactggctttaaaaccattactttggctgggtgcggtggctcaagcctgcctgtaatcccagcaccttgggaggccgaggtgggcggatcatgaggtcaagagttcgagaccaccctggacaacatagtgaaaccctgtctgtactaaaaatacaaaaaaattagccacgtgtggtggtgggtgcctataatcccagctactcaggaggctgaggcaggagaatcacttgaacccgggaggtggaggttgcagtgagccgagatcatgccattgcacttcagcctgggtgacagagcaaaactccatctcaaaaacaa

SEQ ID NO: 82194 - DNA, 1091 bp, Homo sapiens
ttgcttgagtgttgacagagcttttgggggtgcgccaggatggaagaaaagctgcctgacagggacaagatggaatcattcatctttgccttctgggtggggaactgagttgaagagaaagactggggaaagcctctgcttgcttaggagcagaacgagcacacagttaatgctcattatgttaactaagcttagaacttctatactaactatataagagctgcacatcttccacatagcccagtgagatggatccccgatgctgcctgtgctggcctggagctacattggctaattgaagcacatcttgctgtgtgtctctggaggggaaatcgtctgcaaatactacattggtctagactttccatcctgctgctaatatttattcctgagttgtttgctagaaacaatcagcctaaggagggaggatttttttttttttccaaaaaagaactcatgggcaattagtgaggctataaagttaatgtcagcctgaacgaattttctggacattgtatctagcatttactgtgttaggttatgtaagcccagctgtagaattcaaacccaaacatgagtttgtgtgtgcatgtacatcaaactttagggatggaaagtgaaacagtctctgccttagctagttcatctgttgcttttgctatcttaagatttcctgggatttacttatttattgatacactgccttgttccaaaatggactggaagccactcggatgcactggaaactgcttgcaccagccttcaaaaaccaattgttacatcattaggaattttgtgagtcagttttaaaatcatccctagtttcaaatcagctatagtgagagtatttacactgtgggaattggcaaacgctacacattagggcttttaccttttccttggagaggtggttcaccagtgcagcccaactggagaatcctgcattaactatccagagtcattcttaagaatatgagctgtgaaatcagactcttggggatttgatatctagctttggggatagccaaaaaatgggctttggggtttacgtctgctgctgtcatttagtagccacatgaccttaggccaag

SEQ ID NO: 82195 - DNA, 1144 bp, Homo sapiens
ttttgctttgcttgtactgaaagtgagctttccctccttctttccctcccctaggctggatgctctgacccctgctgtgagagttcaatcccctctcaaatttcatctggcatcggggtcctccttccagctgcttcctactctctgccctccctcactgctggcaggttgggcctgccagtatgatttgctctgacatgctgctgttgtctactttgtctgggaaagggaaggtgaaagttgctacagtttcatggattcaaaatatcattcttgctcttcctaatgaggaaggcagggctgatgccagctctggtgccacttgtaaaactacagcactcaggagtagctcctactggcctccagtgctcctcagtggtagtgtggctggctgtcaagtgccaagtgggtgaggcagctggcaccttcagaaacagggagtgggagccagccatttctgagggatgctgtgaaactctgagcccttgctctggcctgggctgctgggtgaacagggatttatgaacagtttgatgttttcattatgaatagatgaggatgaggaagaatggtgtaaaaattaagctgtggaatcagactgctttgaaagctgtgtgatagttaccaaggtgccatgcctctctgagcctcacatctcacctgtaaaatggagagggttgtgaggattacaacttattagatacagacacgaacctagacattgccaagatctgagagggcagatagtttcctttcttatgaatgaaaccaacttcattcttttcataatagctgctatgttggggaggattcagagatcagacccaggttcatcaggagagtgcctaactgattagtgatgtctgtcatggatgtaggcatggggaggggaggctgatgcttgattgattagcgatgtctgtcatggatgtaggtatggggaggagaggcctatgcttgattgattaatgatgtctgctatggatttaggcatgaggaggggaggtatgtgcatgactgattagtgatgtctgtcatggatgtaggcataaggggtggcttgttgtctgattagtgatgtctgtcacagatgtaagaatggggaggggaggcatgtgcctcattgattagtgatgtctgtcgt

SEQ ID NO: 82196 - DNA, 1062 bp, Homo sapiens
tctcctctctgtctttgtccactttatatggctcagatgaggatcaaatgggaacacgtgtgttgtagacagtacgtggtgatgaaaacaaggtgactttctcacccctcccaacaactagcctggatattagaaaagagtcagcaaaccatgaaattaatacacaatgggtcagggttaagatagaaaaaacaaatgagctcaagttcctaggctgagagagacttagttgtagttgttcatagctaaagacaatgtggtctataaaaagaagcactggtcaggaagaaacatgtgaaataaagagtgtccgagagataataaattgtagcactgctaattcagggtagagtgtgtctttgttgatggactttgagtattagggccctgtgggaaggctcttatggtgtgcaaatggatgcagtcagtctatcagagcctgatcccgttacacatggggaataatccaatggacccatccatgcttgttaatactcagtcctggtgaggctgagatacaaggagtctcactttcatgggtagctggtatgcaagcactggtacatcttttctggagggacaatttgcagtgtgtatcaagagacttgaaatgttcatgcttatgacccaatgatgccactgctgggaatatggtcacaaatgggtgatacagttttatatagggaatattaatcacagggtcatttgtaatagcaaaaggttgaccataggggaataagtaaattttttgaccataggagaatgagtaaattttttggccataggggaatgagtaaattcatcatggggccatcgtaagaacaaataatattaatttggaggatacaaaatggcatgaggaaatactcataagttacatcatctaaagataccttgcataattttcgtctaaaaacccaagtagccgtaatgtcaagtgagtaggagtaagatatagtactttgatataatgtgatccaagatttaataggtgactttcactgtgggtatttaaactgtttggttctgaagatgaccctcacccagggccagatgcagtgt

SEQ ID NO: 82197 - DNA, 1013 bp, Homo sapiens
attaatctggctgttattctactttctccaccccaaggagaccactttttccttaaagataaagaatcgctttgcaacttgaatacttgaatgcgtacaaacggtgtttgcctccctccctccctctctccgttcctccccaccttccttcattcctccctccctccctcccctccctcccttcctccccaccttccttcattcctccctcccttcctcccttccttccttccttttccttccttccttccattccttcctctcctcctttttattgtctctctctgagcttgttccttatattctggctttacattatcttcataatcatcatcattaccattgtcatcatcatcatttgcctttccattagatacatttttcagggagttgcatgacctgacttaatactcttttcaaaaggctcatccagatgaacctgctggtgcattttaaatttcctccctttgtattcctaagtgtttataagaagaaaacaagttaccgctaagaagaaaaagaaaagaagaatatgccttttacagactcatggacagaaaagcctacttggcctctcccctgggatgtctgacaggcatctcaagaccagagggccccaaactataccactgtatacctgctttcctgtatcctttccatctttgatggtaagctgtcattccagttgcttggactcattctcgatttcactgtttctttctacccatatccagtctatcagctgttggctctactttgaaacatacccagaatccaaccagttttcactatttccaccactcccactgtgttttcatccaccattatctgccatccattcctacaaattctcccaaatggtttccctccttctttctcagccttcccctttgtggtctgttttcaacacagcaacctgagcataagtcaaatcacatcttccttaatatctttcctttgcataaaaccttttaatgttgccccgattcactcagtgtaaaaatctagtttct

SEQ ID NO: 82198 - DNA, 1078 bp, Homo sapiens
atttaaaagatcccaagattattttgataagctaccagaaagtattgtaaagcagcaattggcaagtgttttatttaaaagcccagatagtcaatattttaggcttggcaaaccaagaggccacacattctgctgctatagcacaaaggcagccacagacaatacaggaaagggcttggctgtgttttggggctatataaaagaggctgtggggaggatttggtccacaagccatggattgtcaacccctgctttagaatgtaaatatcacccttgattgtgatcctgggtgatttcctctccattcatttattccttaattccacacattttattttattgggtctcagctgtgtgctagacatggactggacatcagagatggactgttggcttcctggcaggatccttgctctcatggagcctgccatctcttcaagtgtcgaggaaattattaagtggaatcaaaatcggttgtgatttctgcttaaaataggggaggtagagtttgttcactatcccaaaagtctcttattctatagctcagcccaacatgctttgtgttctatttcctggcttcctcactgcccaacttttaatgatattgaggcagctttggggggcatttttgttccatctccccagttgcctggaattttttgcaaatggttaacaaagttccgtttaccaccaggctgtagccatttgtgagtcagactagaccagctggttgatacggcacagagggttaggagaggaatctgttctagctgttggtatggagatgctgaaacaccctgcagtctttgttctgccagcgtgtgagtatgcaactgatagtatttagtgaagaagtcttactttattagaaccttttgcctaaatggaaactctaggtttgtacatcatttggagtagttccctgagacctgagtattcccaggatttacacctaacttggtttatatttgcatgcttattggtccagaggatttggcatttccttctcatactcttgaatcacatttaataatagtaatatagttcctgacaattattaagcacacactataagcca

SEQ ID NO: 82199 - DNA, 1113 bp, Homo sapiens
attctttgaaggattgagccagaaattttatctatgtataatagcacttaggccagcaaggagaaattggtcaataagtgatacctagtcttacgtttaaatgtttttgagatataattcacataaaatttatcatgttaaagttcacagtccaatgctttttagtatattgactatattgtgcaaccatcaccactccctaattctagaacagttccaaaaccacaaaaagaaacctcatatttttagccgtcactctgtctccctttgtccccagccctagaaaccatggatctactttttgtctctatggatttgcctattctggaaatttcatgtaaatggaattgtataatacatggccttttgcgtctggtttccttcacttagcataatgtcttcaatgcccatccatgttgtagaaggtatcagtacttcattcctttttatgggtgtataacattccattgaatggccatatcatatcttgtttatcccttcattgattgtaggatgtttagattgtttccagtttttggctgctatcagtaatgctgctatgaacacttacatacaagttattgtttgaacatctgttttcagttctcttgggtatatacatacctagaaatggaattgctggatcatataggagttctatgtgtagctttttgaagaactgtcgtactgttttccatagcagctgtaccattttacattctcacaatcagtgtacggggtttcttatttctccacatcctggtcaacatttgttatttccattcttctgaatttagccatcctggtgagtgtgaagtgctatctgattgtgattttgatttgcatttctctaatcactgtttgtattgagcatatttttatgtgcttagtggctgtttgtatgccatcttgtaagaaatgtctattgagaccctttgccttttttaaaaacggagtcgcctttctattgttgagttgtgagtgttctctatgtaccctggatactagacttttatgagatatataatttgcaaatattttctgtgtgtcgtgttttcacttcgttttttttttttttgtgacgggggtctcactctgtcacacagattggag

SEQ ID NO: 82200 - DNA, 1051 bp, Homo sapiens
ttggtaatggaaggggccgttgatctctctggagcctcttttatcagggcatgaatatcatttatgagggcttggccctcatgacctaatcacctcccaagggccctacctcctaacaccatcacattgaggattaggttttaacatctgaattttggagggatacagacattcagaccatagtgcctaccccatgggcttagcgttttcctctgcctgaaacatggctgcattgtctccatctcattcttcaggtctccccttaaaggccaactccttaagaggccttccctgactacccagtcagttctctcctattattctctagcttgcactttatttctttcacagcctttatcatactgtgacattaccattttttttggttgttattatccatatgcccctctcctccagtccctactagaaattaagctcccaaaggcacaggccttgtgtatcttatttgtgctaagatggtgcctgacacctagtgagtcctcagtgagtgtggtatgggtggttggaggaaggagctcggaccttcagtcctcacagatgcacaacaaatctcaggtgttgttgcatggctgtttgaatgaatggagctatgagcataaggctgtattgttattgttgtcactgtcatgatcatggctggtgaaaaacagaaagacactggggattcagaatgcacaacagtgtttgcaattgcaatgcagagacggtgatgtggcaggcagtcagtcagccagtcagtcagcatgctccctttccgggatctgccagtggagtgcactgtgccccatggatgggcttcggagggggtagtggtgacatcagctccccagcagcttctcacctctcttggcctgaagggggctgtgccctttgtttcactgcagctgctgcagacagagaaaggaggagattcccagcctcgaggttgcctcgcagggcagtagcaaccgagggcagagcacagaggagcagctgcattctccatggggacatgactacgtggcctggcttctcctgcccccaggggctg

SEQ ID NO: 82201 - DNA, 1039 bp, Homo sapiens
ttagaaatatgcatttaaggtccctcaatgtcttttcacggcttgatgtcacacttcctttttgcgttgaataatattctattgtctggatgtaccatcttttagggtatggctatggggagagttctgacctcagcactattgcttgtcaagaaggtgacatggatttaactagcggaagagtgggtttatcattaaaggcaatggtgaactgaacatgaaaccaagaagggtgatcaagctagagaaaaatcagctgaggctcctggagaatgaaccaggtcagagtgagtgatggttggggggaaaacggactggactcagtggatgtatagaatttcaatagtggagctgggggaagattggcacatgggatccatggagttgaaccatcattatgtccacgttaaatgctaactttggcaaaaataaaccatttccatgagcttctccagccggagaaaacagcatgaataaagacacgtaggtggccaagtacatggtgcgtatggacagccatatgcagatcgctttggttggagcatggggtgtttgtattttaaccctgactcttcctaactttgatgctaattttgagcaaatggaaatggcactagccacattcttggatctgtctggtatctggatttttgggttacactgcttgatttttttgcgcagtcctaggtcctcccttactgagaccactattgtactggcttccctggtggctgctgccaggggcagggtgtctgagatgggctccttcaggcacactgtgtctccttctcaggacgaaggacaagagcagcatctctgtagacatggtgctaagtcagcagaaggttctgattgtgcagattcagcatttctcttcctgctggtttgaatgaatatctcacctgcagctgccttgggaaaagctgtagtgtcagatgaggagggtcggaggtcagacagaggctgggctgttttggtgactcagattctttcgtttataacacgttggtaattccacttggggagcctttaatgcctc

SEQ ID NO: 82202 - DNA, 1028 bp, Homo sapiens
acattaaatcgttataccaaacattataatcatggatggtattgcagtcacattatctgccaggagaattggcagggactgtagaagggatgtccactatttaacttgaaccatcatacagatgtgaaatatgaggctcagagaggctcagggacttgctgagggacacactgcttcctgagtaccagtcccatgggtctcctggcccatcagatgttgattactggtgctgatgaaaagaccaacaaggatattcattttctgtgatgggggatggtaataaaacttcttcctgcaaactcaccatgtgcactgcattgccttcagataaaatgtaaactcctggctgcacaaatccctgatttctgacccctgctgaccttttgagcttcaactcagttctctcctcattttgcagtttgctctagactttcccaaagagggctctgaggaatatgaccctacagaaaaaagtttaagccaaaataaatttaagagatgctgtacatcatgggatcctcagatatttacaatgcacatgagcctcttcaaagctctgagaagtcctgcgctacagacacggtttaaacttatttcctgctgtttgaacgaatgtttcccaaatctatttgatcagaagactccccttctgttttttatacaacacttgttcttgttggcttgataaaatatgacaaaaaccattgccctgattgctaaaatataacaaaaacccacattgctctaaatgtgcctctttcacattttctggcacttgtctgtgctgctatttctgtctgtctcatatccttcaaaactcatctcagaagccatgccctctgagaaaccttggactgctgtcccccacaggattaggtgccgttcctatacttttgtagctcctgcattctgataatttatttgttgatttagcttcccagctgtcctcagtgaggacaggaacagtgtcttatgtgttaatgtgttcagtgagtcattccataaacatgtactgagcctcctctacc

SEQ ID NO: 82203 - DNA, 1019 bp, Homo sapiens
tgagcacagtggagaaaacctaccatggacttaatacctagatcttcataaacaaacttttgatagaaatatagacattaaaagcattgttggtgaggacttgaaaggaaatgaggatacatgttattggaaacaggaggaaaggggatttgtgttacgtagtggcaggaagtttagttgcattgtatcctacattatatggaaaacaacttgtaaactatgaatttggattttgtttgacttatgagattttatttctttttttattttttggagtcaaagtctggctctgttgcccaggctggagtgcagtgacacaatctcggctcactgcaacatccgcctcctgggttcaatcaattctcgtgccttagcctcctgagtagctgggattaccggggtgtatgaggtttctaagcaaagtgttgaaggtttggcctgatttcctcttgcttcttttcacaatgtgagaaaaaaaaagagaaaaattgaagaagaaacaaactgtttagcagaaaggaaccaggacttaatgatttaggcaattctcagcctgaccagattgcagaagactctaagaggctcactatcagaagagtatgccccggagagaaagtcaagattttggctggacacccttttgctagtgccttggaaggatcaaatgtctcagtatccagtcacagggagggctctttgaaaacactaagcataggactccctttcagcaggaagttcccctgtttaggtttagtgtgtagatcctggcctcttcttttaagctgcagtttcaatgacagtttacttttcagagctcttacagtgccatactgcttagcttcattcttctggctccactgggtctcccatttagcccctgccggtgccacctcaatccccagtgccattgggtgggaaattcaggaaaagttggcctatggtcactaccactgcaatggattgggcctgccattgccccagatgtcagatgagcacccaactgatagtgctgctgtggt

SEQ ID NO: 82204 - DNA, 1153 bp, Homo sapiens
acttgaagctgaaacattcagtgttctcagctttggttgagaacttgcagcattttatatatatgtaaatatatatgtacattaattcaaaaggatcaaggacagcatgaacaaaaatgcactaggtgccatggaagctgggcacccatctgttgccccaaacctgtagcagtggtggctaaccccccaattccatactggtaggattagggggcccaattcaccacagcagcactatcagttgggtgctcatctgacatctggggcaatggcaggcccaatccattgcagtggtagtgaccataggccaacttttcctgaatttcccacccaatggcactggggattgaggtggcaccggcaggggctaaatgggagacccagtggagccagaagaatgaagctaagcagtatggcactgtaagagctctgaaaagtaaactgtcattgaaactgcagcttaaaagaagaggccaggatctacacactaaacctaaacaggggaacttcctgctgaaagggagtcctatgcttagtgttttcaaagagccctccctgtgactggatactgagacatttgatccttccaaggcactagcaaaagggtgtccagccaaaatcttgactttctctccggggcatactcttctgatagtgagcctcttagagtcttctgcaatctggtcaggctgagaattgcctaaatcattaagtcctggttcctttctgctaaacagtttgtttcttcttcaatttttctctttttttttctcacattgtgaaaagaagcaagaggaaatcaggccaaaccttcaacactttgcttagaaacctcatacaccccggtaatcccagctactcaggaggctaaggcacgagaattgattgaacccaggaggcggatgttgcagtgagccgagattgtgtcactgcactccagcctgggcaacagagccagactttgactccaaaaaataaaaaaagaaataaaatctcataagtcaaacaaaatccaaattcatagtttacaagttgttttccatataatgtaggatacaatgcaactaaacttcctgccactacgtaacacaaatcccctttcctcctgtttccaataacatgtatcctcatttcctttcaagtcctcaccaac

SEQ ID NO: 82205 - DNA, 1025 bp, Homo sapiens
acacccagctaattttgtatttttagtagagacagcattctaccatgttgcccaggctgatctggaactcctgacctcaagtcatctgcgtcctaaagtgctgggatgacagatgtgagccactatgcacagcctccccagttgttttcaatccattcttttgcctacttgtaccttctttccctcccacccatccacatttttcgtgttcccttcctttcttcttctcaccatctattttcctttctgtttctcctccttcccctcttcttttccccactccacattttatgcctaattccttccagaggagcacagacctcattagttgagatttctttaaccccaacccacatgatttttagtttgaattcctaaaacttggctatagattataaatggctctgtgtttgtagacatctttgttggcctaacgagaaaatttgcctctaagatcatttatcagagatctctgtcccatgtgtaaacctatctagttgccagttacacaatgtctaaagtgtttaccttaaggggaatttttgtcaccttaaaaattttctatatttggtacctctgtatcttgaactttaattaaaagtgtatcttcataattcacagttttataattttaattcacatttaattaccaccaaagatgtaaactatagcttaaaggctatggaattgattattgcagataagatttacttcttaaaccttgtgttgttcacagaaagtccagtatcccccctggagtcacattcgaaagctgcttcaaactcaaaggaaacaaccccattggcacaaaatgcagtccaggtactgaatcaaagtgctctgtaagggatatttattccaaattgagtgggaagtagctatgttactcttgaagaaacatttgggtcacatttcagcttagacaacaatttagtgtgctgttgttaatctacttatttatacaattaaaattattcagttgagttttacagaagctacagaaattaaaacaaatacttttttta

SEQ ID NO: 82206 - DNA, 1762 bp, Homo sapiens
cgcacagctaatttttgtatttttagtagagacaggattttgccatgttggccaggctggtctcaaactcctgacctcaggtgaggcaatgcacccagccatgctgacacttttcatgtaaattagtatagtgtttgagagcgcaatttggaaatgagatggaatatttatcccacatgtctggaacctaacccattctggattattgatattccaggatatagaaatcttaaatccaaaagaggattctgcttaaaggactggatccagcctcacatattactgaaatatccttttattattttgataaatggattgaagaatgagaaatatatatttctacaactgcaattgaccactttaaaagctatattttcttacaattgtgtttttaggttcctgagtcctttgagcacctgccacctctcccagaaccaccagcaccactacctgaattagtagacaaaacccgagacacacttcctccccagaagcctgagctcaaagtgaaacgggttttcagacccaatggcattgccctgacttggaatataaccaaaatcaatcccaagtgtgctcctgtagaaagctaccacctcttcctgtgtcatgagaactctaataataagttgatttggaagaagattggagaaattaaagctttaccactccccatggcctgtactttatctcagtttttagcttccaacagatactattttactgtccaatcaaaagatatttttggacgatatggaccattctgtgatataaaatctatccctgggttttctgaaaatcttacgtaaaaggtgtttaataatgatatactactttttttttcatatttgtttgtttgcaatgttactgtaatactatttgccattgtaaaaggccagctcagattgtgagccctttctattgggacagtcctcttctatatgttttaagtggccagtaatttaatgaatttctggtttgtattaaatatgtccttccaatggataagttctaaaacatacgctatcattggcccatgttgctgaggtgcattgtgaacaatacctttagtgactgtggaactgctgcttctatcagaagacctaggatacaagcagccactgtttcctccgttaacaatcagcttttagtaacctgctgtggtcagcatagctacaggaaaagtcagcccttgactgagggccagatcatccctggagtgcacctctactaagattttatgaaaagatgacatgttgggctgcatgataaaagttaattataaaaattaaaagatttttttttttgagatggaatattgctctgttgcccaggctggagtacagtggtcactgcaacctccatctccctggttcaagcaattctcctatgtcagcctcccaagtagctgggactatagtcacttgccaccatgcccggctaatttatttttagtagagatgaggtttcaccttgttggtcaggctggtctcaaactcctgacctcaggggatccacccgcctcggcctcccgaagtgctgggattataggcgtaagccaccatgcctggccaaaaattaaaagattttatgaaacgaaatggcttcccattctttctattcagcttctaagtgggctattcatttgtgctctcctcttttttgttttgttttgcactttgtcaatcatttggggaaatagcctggaggtctttcctgaatctgtttgtagacataataaaatttgtgtgctgtgtacaca

SEQ ID NO: 82207 - DNA, 1052 bp, Homo sapiens
cactttgggaggtcgaggcgggtgggtcacctgaggtcaggagtttgagaccagcttggccaatatggtgaaaccccgtttctactaaaaatacaaaaattagctgggtatgatggcatatgtgcctgtagtcccagctacttgggaagctgaggcaggagaatcgtgccattgcagtccagcctgggtgacagagcaagactctgtctcaaaaaaaaaaaagggggggcaaccagcagccatcagggttgttctgtctatggagtagccattcttttattcccttactttcctaataaacttgcttttactttaatctgtggactcaccctgaattctttcttgtgtggagtccaagaaccctctcttggggtctggatcgggaccgctttcctgtaacaccgaggctgtgtgtcacaggaatatccttaaccttggcaaaacacactttctaaatcgattgagatctgtctttcatacttttgggttcacaactgaaatgtgcagtgagacttattttataccatattattttgtgtattttctttgtttattatcctttttgtttgcttatttttctccttctattccttctgttgaaacgtttcctttcttccttcttccttctgcttgtttacagtaatttcattgtttttctgttctttcagtgacttccctcaaatgtcaacatacattacttttttttttttttttttcgagacagagtcttcctctgtcacccaggctggagtgcagtggtgcgagcttggctcactgcaacctctgcctcccaggttcaagcgattctcctgcttcagcctctggagtagctgggattacaggcatgtgcctccatgcccggctaattttgtattttttagtagagacggggtctctccatgttggtcaggctggtctcgaactcccgacctcaggtgatccgcccgcctcggtctcccaaagtgctgggattacaggcgtgagccaccatgcccggccaacaattttcaactcgtgtcaaccttgtgtcatctaaaccctgtataccttct

SEQ ID NO: 82208 - DNA, 1014 bp, Homo sapiens
ctcagagtccactgattcaaatgtgaatctcatcccaaagcaccttcacagaaacattgtgacccagacaagttgacgcattaagtgaactatctgagatgctttcgttggaccagacacatagcattaagtaacatagaatccttttcaaatcactcccttttaaattctctttcacctcttcaaagaggaaatctcagttttgtgcgaatatgactttaaaacttcccaaacatgagtgacatcctgttttagcaaagaaatagaaacccagtcttggacttggagcttttgagcagcaagagcttggagctggaatttaataacaatgttttgttttcattgtgtttattttttccagcaccttctatttatggcaggtgatgctgactttccatctcatttgcgatataaggttgccttttataaaaatataagtttaaaaagtgagtaagctaaacaggaatggcagatttggggaaatgtcgacataagcgttgctgggacagtgcctgaaatgtctcctacttgtccacatgccccgagctgcctgtttgcatttccttccctcctggaggctgccctggtggtttatttccatttggtggcttcctttctgagaatggtggtggtggatgggaggagagaacactggctttctggggaagaaaaaggcctgggggtatctattctatgacagattccttgactacgatgctggtgatgattgataatgaggtaggaggtgggactgggaggtagggcccacatatcagaccaccaaactagctaaaatagggacagggcagaattacctttttttttttttttttttttgagacagagtctcactctgtcgctgaggctggagtgcagtggcgcaatctcagctcactgcaacctccacctcccaggttcaagcaattctcctgcctcagcctcccaagtagctgggattacaggtgcctgccaccacacccagctaatttttatatttttagcagagacagggtt

SEQ ID NO: 82209 - DNA, 1063 bp, Homo sapiens
cttttctggcctaacctaagcaaaattaaatggacagattttggggtagtaataagatcaacaggaagtctgaacagacaggacccagggccgtcctggccatctgggtagcaggagcttgtcaacagcctctcgggcctgccacgggagtgagagagtgcgctggatctgcttctcatatccttacatcatttcgctcaagattcactccccaagggagtgaaattcctctaaagggaattgattaaattgttccctaaaggaagggcatggagacagagtcactagaaacctgagagtatcgaggaaagtctctatcacagtcatagtgatagtgtcatttccccgtggatcattgacacatcagtcccaagtatcaaggtccggagagagcaagtcaggttttccgatgatgtcgctctgctgttctccccggatggctccatagagggcacctgaggccagtgctggtctgtggatggcgttttcccgtgcacaagtttgagacagcgctgggtgctgaggaagtaggaggctgggtttgttgagaggattgaagagggtggcaagaaactaattcagggcaagttaaaaagtgacgcggaggtgcagcactttggatccgagtcattgcagctttcaagatgaatactagccctgttctcagaaggttcctgaaggccgtctcagacctcctgtatcagaggggaaggcttggggtggaatggggtcgcctgaagctgcacctgagtcacaactaaagagcttttccaggtttccatcttactttaagtttctgttctgtaagtttagcctaaaccatcattcaccttcaggatcaaaggaaaacagggcttggtcagggttcagctagaggctccactctggtcctccacagcaggcccgtggtgtactggaaagagccccagttggggccgaaagacctcagtttatgtcccagctctgttccctgcttattgaactggtcccctctgaacctcagtttcctcctctgtaaaccagagataatgatacttaccttctaggcacatggccgcctcag

SEQ ID NO: 82210 - DNA, 1037 bp, Homo sapiens
tacctgggaggctaaggcaggagaatcacttgaacctgggaggtggaggttgcagtgagtcaggatcacgccactgcactccagcctggtcgacagggcaagaccccatctcaaaaataaaaataaaaaataaaactgtggtgatggctgcatgcttgtgactgtacagaaagccactcattcaatgggtgagtcatattgtctatgaatcatgtctcagtaaatctgttgagaaaagtaaggcttcatcaagaaaattaaactttcagtgtgcgctttgtgtgctgctggacacctgctggggggaagaggtctgaatcttgttgccccaggaagctcccctttgtggctggagctgattggggacaggttctgaatcagctgtttcgtgagagctcattcccttcactcctgtgcttttacaaaagccacctcattgctccacaggtatctgcattttctcatcagtccccagccgatttttatgactcttttaagataccttagacacaacatcatatttgaacttgagtaactttggttccctatctagacatccaagtagagtttccaaataacccagcttagggcacaaagggagttgagttgcatctttattacccacgccctagctgttcacctccttttaggaatttcgtggtaccatgtaagacaatgaattatattttaaaaaaccatcgtcttactttgtacaatttgtctgtgcatgaaatgtgaccagggtacatgatttctactaatgaacatcggtgctcatgttcacacaggttcaccagagtggctcaggctggtctccagtggtgagttttcacctctttgccctattttcacagtagtgtgtggttgtgtgtacataatgggtttgtggtttgttggtccataggtatttattagggtacttttcgaggcacagaggatgtgattaaaaccagtgattggcaggctttttctgtaaagtgtgggacggtaaagattttcagcatgtgggcctacattccttgctgttgtagcacaaa

SEQ ID NO: 82211 - DNA, 1059 bp, Homo sapiens
cagacttcatctcaaaaaaatgaaaaataaaaaaataaaagagttaaggagatgacatttacttattttagctgagttccctgtcattgccgtcactgcagcccatggacatacagtgcctctttcaaatcccccaacatggtacccttttttttttttccaaaaatgatttaggagcaaagagtgaatatgctcataggtcacatggtagttttgtcctgaaaatgtttttttcagtcagagctcaaacagaagacctgggggagggcctcactgtgtggttttgagtaaagcgtgtcttgccctcaccctgttccctctgcagtacgtggaagacaacctgggggtgatgtcagtgggcttcctgctcagcagtcctgatgatgctgttatctggaggggacccaagaaaaacggtttgccactctgcctttttttgtctctcacattcttccacgagcgttgtggctcttggctttatctgctccctgtcctgccagtctcagcctgctggacttcacagtatattatttttaaccatccagtgcctctttcttcactggttgaaaagagctaatagaaataccagtttccattacgtaattataaatatctgctgtgagtttttctctccttaaaagctgtagaaccctggtcgggtgtggtagctcacgcctgtaatcccagcactttgggaggccgaggcaggtggatcacctgaggtcaggagttcaagaccagcctcgccgacatggtgaaaccctgtctctaccaaaaacataaaaaattagccgagcatggtggcacgtacctgtaatcccagctactcgagaggctgaggcaggagaacccaggaggcggaggttgcagtgagccaagatcatgccactgcactccagcctgtgtgacagagcgagactttttctcaaaaaaaaagctatagaaccctgaaattatttttatcatggttttatagtggcttatttgggtcagagaggtgagatcaacaggaggttgatctggtactgagacttaaggtaataatgtgaaagtgttatc

SEQ ID NO: 82212 - DNA, 1648 bp, Homo sapiens
tctctgagtttgtggctgggttttacttgcctagaagaatgatgtcaagggtaaggaaacagcattcccagaatcctccatctatagatggtccgaggaaggccgcagccactggttatgagcaagatgggtagtgtgaggtattccggtcactttcaaagactcagggcatcacagacacaggtctttttatggaactagccagaggattccacccctgtcaaaacacagccctccccagcacaggacagggctgtcaaggggtagacaagccattagcactctatgcctgtcgtcttgttttccaggaatccaagagttttgtaatctccatcagtcaaaagaagagaacctcatcagttcctgaaacgagagaatgttcaggaccaagcagttaccgagcgaggcactcactgggcagcacatccagccagacccgaccagctccgggatggggtgggtcacagcaaaaggaccagatgctggtgtggtccgaagccactttctcagagacactttaatcattgagtatttgtacacttttctttagaacatatataaagggcattctctacaaatgtgccgttttaagaataaaaccccctcaaatctctcccccgaggcctgtttcacgtaaaaaacaaatgggttgtgggatcgtgggattctgctgtgtcggaagcttagtcgattgtagaaactcccgtttaagccatttctgcctgtgaagataagaaagcctagaaaagaaccaaaggggtgagtgtgcggcttcactgcagaacacacaggcttgttttcaaacaccacagtccaaacgcttttcttcagattgaggaaaaatctaaaagcaacagagctcaggctgggcttcgttctaaaatcactgcatatgacacagctgggtcaaatcaaaaagcccttgaagagtccttgaatcacccagtaagacagaatgtggggtctgtgtaaattccctgtgtagtaatatgtgcacagtatatccagtaatgtccagtgtcatgcaaaccaactttcaggttttttaattatataaaaaagagggacagatgtaaactctacgatcatcctctttgccatgaggtgcttgctctgtttgagacacacaggatctgagaccacgtgggagaagagtaaattcctgttttccctccactctggggcataaaagtgggtgggtgggaaacaagaacaaatccccttgttctttccctcccttgtctcttccctccccgcccttccctaggaccatacatatgatcagatttgcacatgttcagtgtgaggaaggtgtgacctcgccccccgacccccagctcctcacgccaagagcaatgaggctgcaaagcccagggcaggcccattgcccagtctgcttcctgcctggtcacatgcctggccaccccagggaacaggggaagcccacccagaccccgggcccctgtgccccaagagctgcatttttcagaattccccagttcctccacacgggtgccatgatccatttctcacctaatgctggtgaatctccagcccctcgaggccaggcttctgaaagtcacctgggcaggcctgcaaggggaaaagtcaaccatggttttctgtccttacacgcgagtggggcgat

SEQ ID NO: 82213 - DNA, 1063 bp, Homo sapiens
gaggaggagggggagttagtgttttgtgggtactgagcttaagttttgcaagatgaaagcagttctggagctgggtggggtgaaggttgcacaataaagtggttatacttaatgccacagaactatacattttaaaatggttacaatggtacattttatgtaaatcttacaattaaaaaacaaaactgccaggcacagtggctcactcatggctgtaatcccagcactttgggaggccaaggcaggcgggctgcttgagctcaggagttctagagcagcctgggcaacatggcaaaacttcgtctctacaaaaaaaaaaggccaggcatggtggtacacacctgtagtcccaactgtgccagaggctgaggtgggaggatcgcttgagcccaagagatggaggttgcaataggccgcgatcacaccattgcactctagcctgggtgacagagcgagatcctgtctcccaaaaaatatataaacaataaaacattggcagcctggcggatatgttacattacaaaccgcagttgccagcaggccaccttgactttgactacctggagaggagtggtccaagagtcagacctcagttactcaccgtctggaacactgtctgggacaggaaactggctgtgaccttgccaatgtcactgttgcctcccatcttacaaaggatgtagccatacaggtttgcagcttggagagagatcccagcaaccaccagagcctgcactcagacaaagaaagcaaaggtcacttttttttgagacagagtttcgctctgtcgcccaggctggggtgcagaggcacgatctcagctcactgcaagttccgcctcccgggttcacaccattctcctgcctcagcctcccgagtagctgggactacaggcgtccgccaccaggcctggctaatttttttgtatttttagtagagacactgtttcaccatgttagccaggatggtctccatctgacgcaaaggtcactttctaagagcatttacagaaatgcacctctcaagccacgtagaaatgctctagcctgcacctaagaatagt

SEQ ID NO: 82214 - DNA, 1021 bp, Homo sapiens
attatactgtctttctgaataaaacttcccaataagtctgtttgagaacacttttgacttggctgagtctcatcgccaatggggcatctttgccagccagcagggaatggtaaacggtctctggttcctttgcagtatcctgggaactgcctgggttcattgtttagatcacatgtctatcggatgcttctttggaaacccaagttgcctgccctgaatcaggcagatcagcttaatccatattacagccccaagaacctgagatttgtgtattggtgggggggttagaagatcccccagtgacttggaaaagagttttgtaaacagccagtgcccaccctggggcttgtgccactctgcatttggctctgttggtaaacatcttgggtcttgggtacagaacagctcgttccctgagggagtttgcaggctggtgggggagacagctgtagagccagtgactgtacagtgtgataagtgctgagatcgccatggacccagggttctgtgggaacccttattgggagctttctggaggagacaacaccagcgcgggttctccaagaatgaacagaagccaccattggcgggcagcaggggcgggaggcggagcactgtgaccaggaccctgcgggttttgtggcatgtccaggtgggggctgatagctgtgggaaacaaggctggaagtaggaaggggcttgggatttatctgacacttcgggtgaccaaccgtcctggtttgcctgggctgaggggtttcccaggatatgggactttcagtgctaaaactgggaaagtcctggacaaactagtataaactggtcaccctaccagtgacaagtgacagttcttaatacactcttaccttgacctagagcagtatggatggagagggaaagtttaagatagttaaaagaattatttatttattattattattttttaaatacacaaggcatctggaaaccctcttctttttttttttgagataagagtcttgctctgttgcccaggctggag

SEQ ID NO: 82215 - DNA, 1032 bp, Homo sapiens
ccccacttgctctgaaggcatcaacatgatgggaagcatatgaaacaggtggctacttgctcttctctcagtcctgctgaatctgaatttccgagggggctccaggagcccccacttgattcagttctccgggtggttctcttgcacactgcagtttgagagtagttgacttcaagggtttgacgattttcttgtctccgtctgggttggtgtgtccttggtttaacccttcaaagcattgtctgctatttttctggggttgtgagttacatctaatctgaatgggaaattgcattacccaaacctgaaaaagcattgctgcattgtctccaaaatattgctaatggtcatggaacttggcttgcatttcagttggtaacctttaatttccttttctctcatttctctcaggtatctgtaccacgttttgaccaaaaacaccacagtcacagaacagaaccggaacctgctagtggagaccatccgttccatcactgagatcctgatctggggagatcaaaatgacagctctgtatttgagtaagggtttctaatgattgctgttctttgattattcttctttgaatgtttttctaaatgtatactatgagtcattctggatgatgtcaggatttgacgctaatttgatcttgcctagatatctatctctgtctagctgtaaaaaaaaaaaaaaaatgcccttgaagcactatagaaatgcaagccaaaaatggggaagttatggaaatgagtgtctctagaaaacctgaaaatgtcatgggtaattttccttcaggttgtgtctgattattttcccaaaggaaggagaacatgtctggtggttagatttgacatgaacagaaggcctgtgccctgggggagtccctgagggctcccagttaccatgtttactgatgaccaggcacagggctgagctcctgatgagatggtccacctaagtttcccacccaccccatggtagaggccctgttggtgtccccttttttgctcaaggtcacatagctggtaagc

SEQ ID NO: 82216 - DNA, 1030 bp, Homo sapiens
ccgcctaattttttttttcttctctgtagaggtaggggtcttgttattttgcccaggctgggtcttgaactggcctcaagcgatcatcctgcctcagcctcccaaagtactgggattgcaggcatgagccactgtgcccagatctaaaactcatttaatactcataattatatcttattcctttgctgggaattccagttgtggcgggtgacaatgggtggcatgacctgtgcagataccttgggggagaggggtgaatctaatacttgtgttgtgaatgaaaccagataataatttctgtttccacatgtggaagcaagccactgatgcttttccattctctccccagcttcttcctggagaagaatatgtttgttttcttcttgaacatcttgcggcaaaagtcgggccgttacgtgtgcgttcagctgctgcagaccttgaacatcctctttgagaacatcagtcacgagacctcactttgtaaggacattccttggtatttgcctctgtgctgctgtgcatgtagcagggtgaagttgggcgtggttttctgtgtctgcgcttactattcgtcggctcaggctatcctaacaaaataccatagactgagtgggttaaacaatagagatttgttttctcactgttctggagcattgaagtccaagattggccaggcatggtatctcatccctgtaaccccagcacttaggaggccaaggtgggcagatcacttgagctcaggagtttgagaacagcctggacaacaaggtgaaaccccgtctctacaaaaaaccacaaaaattagctgggtgtggtggtgtgcacatgtagtcccagctactcaggaggctgaggcaggaagattgtttgtcaaggaagtcgaggttgcagtgagccgtgattgtgccactgcactccagcctgggtgacagagcaagaccttgtctccaacaacaacaaaaaaaaaagttcaagatcaagttgccagcagggttggtttctagtgagggctctcttcctggcttgc

SEQ ID NO: 82217 - DNA, 1032 bp, Homo sapiens
gagatcttccatgataatctggatttgcaccttgaagatgtagatttggctagtcaaggcccacagtcctgcagttgggggggtcagctggcacagaagcagctgcccctttggggtcaaggcccgtgctcccaggtcacacgctggacctctggcaactagccaacgtggcaggcttgtaagattgtgaccctggtccaagccacagttggttctgctgcctcctgctctgttttctcctgtctccttctaaccttatctctctgtgcagatgcctcccaccctagtctctctccctctgagcagctctctcaccttcccaggtcctaaccctgttaactgttgtctgttttttgcttttccttcaatgacgattcctgtgttccttattccagtgtcatgtaagttattaacctctggttttctgctttcttaatctacccttatatgtaaataccttgcttgagaatggtgtaattctcagtgtagtctagctcagtctgctactgataagtaggctctcccatgcaccattaatgtttagcccaactaatttatttttaagtataaaatatcataagaactgccttgatgactatagttttatgaataagataaacatttttaagtatttccaggaaagacagacaatttcagattatagcagagggctttttcattgtggtttttgggttttgctttgtttttgttttttttttaatcttccccaagttatttttggtagcttgactttttttttcttctgtgaattttctcagtggataaccaggccatgctgcactacatccgagataaaactgctgttccttacttctccaatttggtctggttcattgggagccatgtgatcgaactcgatgactgcgtgcagactgatgaggagtaagtgacacccccagggccactcagtagatagacagggtggttaggggagaattctgttttcatcaaggaaaaataaacacaagaaccgcacttccctacctctgtgtaggcagagcatggacttcc

SEQ ID NO: 82218 - DNA, 1085 bp, Homo sapiens
ctggccccccatccccagcatgctgttgctaactgctgggagacggagacctccagggcaggggcctgggggaggggtgtcatgtctttgctctatgtctgcatgtcgtcagggccactggggtggccacggctctggaggcctgcttttctctttagaactcctctggagcattttaattacagtggatttattgctccattagtgctgcttatctggggagccaggggatcttgccacagtggctagtagctgtgcttatgcagtggcttgctggaagagtttagcagcattttgctttgtttacctcattctgggagaccccagcagtcccctgaaattgattttagtaaacctgcccattttcccttgtatatctccccagtaggggccaggataagtgtctcttgagactaactcaaatatgtggatgaactcacagtgacctaagtctcaggccattgatgttaggctcaaaggctcctagtgttggcctccaggctgaggtggtcatttctcctggcaggcatcggaatcggggtaaactgagtgatctggtggcagagcacctagaccacctgcactatctcaatgacatcctgatcatcaactgtgagttcctcaacgatgtgctcactgaccacctgctcaacaggctcttcctgcccctctacgtgtactcactggagaaccaggacaaggtgggtccagccccgtggctcccgctggctgaaggccatcagaagtggggaagaacagtccccagtcccctggaatggggctgagcattgcaaatcaggactgaggttttttttttgtttgtttgtttttaaaagacggagttttgctcttttacccaggctggagtgcagtggtgcgatcttggctcactgcaacctccgcctcctgaattcaagtaattctcctgcctcagcctcccgagtagctgggattacaggtgcataccaccacgcctgactaatttttgtactttttggaagagacggcggcatttcaccatgttggtcaggctggtctcaaactcttgacctcaggtgatacacctgcctgggccttccaaagtg

SEQ ID NO: 82219 - DNA, 1283 bp, Homo sapiens
cccgtgatggaatctctgtgtagccaaccctctgccaagtccttgattggaacaaaactctccggccccttcttcttgtatcactaaagtattgggacagtgccttctagtcttctcataaccaaatttgacactaaaatgcccatggaaaggaaggagtgtgctggtttggctgttctttcccgcattgctccacttcagccggatttggcttcacccagccatgagggacagtctcgcattaatgcacttccttccgaggaagagcagccagccaaataggcaacagtctgaaggagagactgaccttacaagagtggaaccgagtcctgcttcctgtggctcattctttgaattttgcatcgtaggaattgctgcttaatacaggacttaggtagcccagcctggtcgcttctgatccaggaagcaagaggttgaaaataccgcacactttcatgcaaatcccgtttcttttttttccgccaggtcttcttaattatacatcatgcaccgctggtgaactcgttagctgaagtcattctgaatggtgatctgtctgagatgtacgctaagactgaacaggatattcagagaagttctgtaagtcattagcttcgggactgaccttaacaggaaaccattgctcattttgctaatctgtgtgtttctctaaaatcagaaactaacattctgaatatatagcagtgatgatgcataagctggtccgggattcagtgaacctaatcagagtcttgattgcatacccaagagaagctgggatcagggaccacctggatttgattgattgtgtgttcttaaacatggaattgtaccactccgggccttaggttgcatatctgtgagacactgttatcgggacacagtgagaaaatgccttatcagaggaactaatgtctacagaagttgggcgatgaacatccatgaatgactcaggccccaggtgagggcagtagagagtggcgaggggtgtggcaaattggagagtgtatgccaccttggcgagcagctcctgttctaccccaggctgctgctgttctgcaggaatatggatgtaggattactaggttttttcatgtttctagagaagcgggaaaaacgcattgttacgtgtaatctctagttttaaatgatcatcaagctttggactaagtagcatgtttgtggtctgcaggaaggagctttggcgttccatttggtacactgctgagggaaaacacctgatggccagtgttgtgacttctcttgaagcttttccatcttgt

SEQ ID NO: 82220 - DNA, 1088 bp, Homo sapiens
tttttgcagaatgaacatatagattagaatttgggatatgcatcattacttgtaggtactttttttaaaggacttttttttcctcttgggtttctgtggaatggtttccttcatttttgcattcattcatttattcatctattcatccattccttcagcagccatctgttgtgtacttgtgctgagagatgagggatgtggtggtgcactggaacgacctgacccctgccctccctgggcttccctcctcccatgaggacagggaccatgtctcggagatgcctgtgccacctgtgccatcatggggcttgccagagatgcccagggaggtgttcggtgcaggagtgaatgactcagtgggtgaagtggtagcagagtcacaagggctctcgtgacattcttgtaatgactctcagagcagaagtcacttcctagcctgccccttgaatgccgccttctctttgcctcagtggctgggtttgcagtgggctgcttttggtgctgttccatgttccacctccagaggcagccttgtggagtgggtgctgtaaccagtttccctgggctcctcaaatcgtggtccctgattttactaggtgttcccgggcctcagtttcttacctctccagtgagaatagcaaacatgggtttatgatgagaattaagtgccgtgtaaagtgcttactccaaagcctttttatgtacacagcaagtgcataaatattagatgttatcattataatgaccttagttcctaaggctgcgcagtgaccttccacctcctacctgggaccttcttccctgggcttacgagctgtctctggactgatgaatgtggaaacagacaccatgcgcccttcagtggggtggcttttgagcagacaccaaggcacagagggagaagtgttagtaataacagtgatgatgaaacaccaatgttagccattgccattgagtgatggtaggtgaagccctctgtgtgtatactgtgtgtatactgtgctctccattcagccagacccagatttaatttctggaaagtgcaaatactgttgtcgttgttttttgttttttgtttttttttgaga

SEQ ID NO: 82221 - DNA, 1031 bp, Homo sapiens
agtagctgggactaaaggcacatgccaccatgcccagataacttttgtttttttttgtttttttgttttgtggagatggggtttcgccgtgttacccaagctggtctcgaactcctgggctcaaacaattcacccaccttggcctcgcaaagtgctgggattacaggcatgagccatcacacccagctggaaagtataaatacttaactgctaatgtgggttcatatggttggctggttgtgaagtcagggtctgaggattctggggcagaataggcttgcttatctccacataaggacattgacagtctgtctgtagataccagtttagcagttaggatggtttccagatgaatctctggacacctgtcacttctagtagcaggactctctgcccagccggatactcccccaggatatggtgtgtggagccagtggctaggaaagtagcagccttgcttctctgggttgtgtgtttgcagattcagagcattaatcgttgacttagctcccctggtcgctgctgcagggctttctttacaactcaaacttgtatccgatgtcagccgagtctcccgtgtgctgaatgcatcaggcaggatagcaccccttccggccaggattagagttcctgagtcttttagtgaccctgactgtactcatgatcccccagctaatcagtgctggttccaaggcgcgcacattcttcttcctgaaaatgctaataggcttctgggagaaggttgattgtgaatatcaaagggtaaagatagacttctataaattaagggccttaattgacccattgcagacattcccacaagggaattagagcttggtgtatattctcccttttggctttgccattgaggtctatcccctaatccctcactgcagttacggctctgaggtgccattcttgcccaccgaagtattgaatgtggcagctctggtctatgtttaagaggatttgatataatcaaaatccagagtgcaacatgaggtccggtactaaggagcgtatcgttgtct

SEQ ID NO: 82222 - DNA, 1039 bp, Homo sapiens
tgtccatcatcccacactctgctgccatgtgcacatgttatttagctcctgcttatgagaatatgcagtaagtgtctgagttatttcacttaagataatcgtccccatgttgctgcaaaatacatgatttccttcttttttagtgctgaatactatgccatcgtgtgtatacatgtcatcttctttatctagtcctctgttggtggacacttaggccgattccatgtctttgctattgtgaatagtcccgcagtaagcatgcgagtgcagctatcttatgatataatggtttcttttggagatgagtttcttaggacagaaacttttgggcaacttgatagcatccagcaggattctagtgttcaaattcacctgttgccttcgttggactttcctaggccaagcccagcattcggtgcttcattaaacccaccgagacactcgagcggtcccttgagatgaacaagcacaagggcaagaggcgggtgcaaaagagacccaactacaaaaacgttggggaagaagaagatgaggagaaagggcccaccgaggatgcccaagaagacgccgagaaggctaaaggtacagagggtggttcaaaaggcatcaagacgagtggggagagtgaaggtgagtgtccccatgaacgccgccctgtgcctgcgccgccagccagcccgccagcgaggctgccacctgtgccctctccacccagacttctgctccccacagtgtccagccagtgattcgattcctacctcacactggcgtacctcattctatacagccctgccactcggaggctgctgtaggtgtatgtcatatgcaggtccagggcaagtcccgccctcatgggatgggtgacctggggccagttttcctcacctattaaaggagggtaacaaatagtacctactttgtagtgttcatacaagaattaaatgagcgaatatgtgcaatgtgctccaaacagtgcctggcccattctaaatgctgcaaaggcttcgatgctgcagaagtgttcgtcattattatgaca

SEQ ID NO: 82223 - DNA, 2382 bp, Homo sapiens
cagcctcctcttatttctgtttaaagtgtgcaataggtgttttggtttaggaattcatttttggcctgggaagcctttgccaataaatatcactgtggtggggaggggaaggccaaacccaaggtaagccatgctaatttgcttattggggtcattctgattattttgttgttaatgctgaagaaaaatgtctgcctaatccctaggtttagttgttctgttgccacactgggggagaaatggacatcttcacctcattttgtgcattgtgttctcatcgattttgttttggaaagatgctacctctttcattccagtccttttaaggatgctctctaaccaggcctcagctgtgactaacagtggtgtggatcagacaggcttagccccaaaatcacaatcaaattagtcagccagccagcccagtcctggcacacaggggcttcaggccagttctgcaggctgctgtttcagcttgaactgcttgaattagagtaggggctcctggaagctgtgcccagctgccctgggcagggtacaagggaacgaatttctgccacgtccaaaagcctgttttccaggtggttacttagccagatcgtgccacacaggacccaggaatctccccagaggctttgcttgaacagttggtgcttcagggctcagtcacacatggctctcaatgacctgtgcaattttgatgccctcctaatttcttgagcacattagtcatttcaaaatatgatggatctgtcattttgtcactcagctcaccataaatacatacaactttcatagaccggtcctgccaggcaacagcacttgtattctggagctttctgaattatatatttgctctcttgattatttgtaaatgtgaaggtgcagttggtgggtgttctctccttagacggtatctgtgtttggatgaaactgcacagctgttaattcctgtgagtcggaagggtgtcaggcacatttcttcattcacattgcataccagagaacagtgtagatgctgggcagtgcctagaagatgcgagatctgactcgcagtcatgtctcagcatctaggtttattgtgtgtcttggatggcctcttgaagctctggacctcattgttcctgtctggaaatttctgaatatagaaaatataattcacatgatgactttttttttttttaagtgaagatacgttgatatttgcgattgcaagatttagaaatccaactcagactggcttaagcaaagagggtgtttattgttcatgttcctgggaagcttggacagggctgggcccaggtgcgctcacatcgtcccagcttggccagcaagtggagagggggcttctccttcccagtggctgccactgaagtcctggggccaatgcttgtgggtactgtgggcctgacttgggtcctcttcccacccccagagatattctggaccgattggcctggcccgcatgacaaatctatgctacagtggctccctcagtaaaaaatgagatgcgtttatcagaagcaaggggcagggatgctgggccagcagaaatagcagatttccccctagaaagtcacactgtatttctgggtactccccttctctctcaaggccatcttctgccatcctattttgagatagacatgcggctcttttctcttccacattatttcttctctagaagctcctttcattgtccctagatccacggacttatcgacagatggacatggtgactcttaaggaaagagatgctgacactctgcctctgcataccctgccaatcccattttagtagtgaaattttgactttaaaagacggggaaaatacaggagtaaaaaaggcatgtggtcacgaggcacagttttgccatgacccaatttggatatggcattagtgtgtattgttttgttgttgttgttgttattttttataaatgcagcacccagaattcacacctcctccagatttaagctcagacaaggaagttgtgtgaaatgaatgtgcacccctaacccatccactcccttccccagtctacagaggaatttgctctgcctcaggtcccaagtaatgggtgactcattctgcaaccaagaaatcacagggcccctaaatttgcagaaattaaatactaaaaaaagaaggatatcatcgtccctgtaggcaaagaagcattcactctgcccaggaaggcagacttcctagggtacgtgcttgttttttagcttgcccttgagtctgaaaggacagttatctcttttggaatttacttagagcagtaacttaataagcatatcctagggactgaatccttcaaactcctcatgtaaaaatagggctggactactgtttttttgcctatggaaaaagtaatt

SEQ ID NO: 82224 - DNA, 1411 bp, Homo sapiens
ggacccgtttctctgttaatttctacagctagtaagtgagcttagtgagtgtgcaggtgagtatgtgtgtgagagtgagtgtgtttgtatgtatgtgtgtgtgtaatggtgggaagagagggagaagaaggatcagcaggcccaggcgctgcagtagagagatgttgtggggctgtcaggttttcagatgggcttaactgggataaggaggagaattagaggtgaattaggacaaagcctctgaagagcaacttcccgaaaacagttctcaactcaatctcctgctgggcagtagaagataataaaaaaacaaaggaagggctgcccccagtacttagagcacttagcgcacacactctcggtcgttgtcaggggctgtttgcttcttgaaattctgctaaaaagccagccaattacatgcaggctgtcccttatatcctaggtaaccagccaggcatctttccccttagccttcctttgaaggtcttattcccctcttgccatcttttttcagtctgtccttgctgtgatcgctggaatatggaacacagagggcaactgagaaaatccttgaatttgtgaagtcaaagactattgggaggccatgcctgccatttccctgaaaagcacttcatttaccaaatactaatcagattcgaatggacatcagcccgggcgagttgttaaattattgctgtaatttgaaaaatgagtgtgtcagagtatcagggaagctcaagaatctggccagagctgtcatttagagaggcagaagtggacgtccttgggtgctgagggccctcaggactctcctggcccacaccagtgcctccccacataggcactagttggacaacaagtggaaagatgtggccttccctgctccctttttttttcctttttttaaacttatggtaaaatacgtataacaaaatttaccatctgaatcatttctaagtgcacatttcagtagtgttaagtacattcggctgggtgcggtggttcacgcctgtaatcccagcactttgggaggccgaggtgggcagatcacaaggtcaggagatcgagaccctcctggccaacacagtgacaccccgtctctactaaaaaaaaaaaaaaaaaaaaaaactagccaggcgtggtggcgggcacctgtagtcccagctactcgggaggctgaggcaggagaatggcgtgaacccgggaggcggagcttgcagtgagccgagatcgcgccactgcactccagcctgggcagcagagcgagactctgtctcaaaaaaaataaaaaagtacattcacgttgtataaccatcaccaccatctgtcttcagaatgcttttcatttttcatcttgtaaaaccaaaactgtgcccatttaataactccccaccccaccctttgatgttct

SEQ ID NO: 82225 - DNA, 1112 bp, Homo sapiens
cctgctaccaactggtcccatgcccacatagcactttgcatagagcttcagggaattggcagacctataagggttgtttcagtacctataagggttgtttggataaaactatcaaaaagaagagcaagaaacctttccttgacatttgaagatctgatccgcattcatctagaaaattaagtggagccactcactctacagctgtgctagctggatgaggactgtgaggtgcagctgtgcgcacaggtgtcacagccagggtgtggaaatcccattttgtgtggagaggcccatgtgggtctggttctgcgtcaagatgtgacacgggggttgggggtgaggaagggggagcggtcctggctttgctgctgcatttccagctgtgttaagaatcactgcacttgtgggtttctgtgcactcatactcaatatccagggttggaccagacggtggttttcaagcagttttgtgtgaagccgtagaattccagaaaggggcctcatggagtgcacgagggagcccacggcagtcagaggcatttgatgcccaccaccctttcctggagcagctctgcgctcatctgctgactgtggtgggatgccctggaaaattgtcctgcaaattagtattcagctgcttaaaaaaaaagttggatgagcttggtgctgaattgtcttcaccctcttctctgctccggaattctgctggtgtccaacgagattaagccagaaaggggacaactacgtcacaaagcttggcctccaggccagggtgctggggcttggccctgtaaccttaggaagtacttggagctgagttcccactgtgtcaaccaagcagggcagagctgagcctggggaaggagaacttgcagctgtaggggaggtgggcctatgccacgtcctctgcctcatggggcagaggccagaggctgggagacgaggaggaggctagcctcacaggcttgcttgggagtcttcagatgtctgatggcaagccttgttagtaaacacaagcaaacctatacatatgacatttaagcatacatctcccaaatatgtgtaaaaatttatgtattataaattatatataatatgatcatgctagtatt

SEQ ID NO: 82226 - DNA, 1562 bp, Homo sapiens
atctttgacatctgacttcagatcagatgggagggaagggggatggtgagagtgaacctcacatagggccggggcccatgtgaatatcggggcgggggggggggtgctcctccatgccaaggggtgcctgcaggtacagtcatgcctaacagtctggggagagtctcttggggcatgagatatctccccacgagaacactttgtgaccacattgatcacagactttgtcggggagtggcccaccccgcctcagatcacagctaccatgaatcattgccactcgggcccgctgccaaaacatctcgtgttgggctagaccagtcgctcatttatcacttcaagagatacttattgtgtgcctactctgtgccagacactggattagacagtggagaacaagacacataagacagctacaaaacccctgttctagtggaggaaggcagacagtaaagaagcagaacaatagagaatgtaagagccaagtcacaatgaatgctattattattaagtaaaatcaagataagggggaggaaggacaaatctcctctacagaagaatgccaaataatttatggagatacgcgaagacgtttcagaacctaatgtcccattctctaagtgtggcctgtgtttactgactttcttccacagagtatggtatggaaggaggaggaaaagtgacttcacagtggcgaaagctgatgaacattagcttggccaagtattggagattaacatcaacagttataagtcatattgatagtatgtgccctgataggatgtgatgagaagggtacttcccctctgtggtcctcctcctcaaaacctgtaaccccagtctaaatagcagaaagacattgcacaaacccagagtgagggactctcaagaatgcctgaccagtactcctcaaaatgtccaggtcatcacaagcaaggacagtctgagaaacgtcacatccagaggaacctaagaatgaggactcaatgtaaaagggatcctggaacagaaaaaagacattgggaaaaactaatgaaatctgcccaaagtgtagagtttagtttagttaataacaatttttaaagaggtattaaaaaaaaaaaaaaaaaggcaggtgaaggccggtgtggtggctcacgcctataatcccagcactttgggaggccaaggtgggaggatcatttgagctcagaagtttgagaccagcctgggcaacatagtgagaccccatctctacaaatactaaaaaattagccgggtgtgctggcatgtacctgtgttcctagctactcgggagcccaggtggtcaaggctacagtgagccatgatcacaccactgcactctaggctgggtgtcagagcaagaccctgtctcaaaaaagaaaaaaaaaaaaaaaacaggtgaagagggcgtccaggaagatgtctccgtggaggcgacatgtgaactgagccttgaatgatgcaccccagtcacacctggctaggagagacctggtgtgagagccttccaggcagaggaaattactgtgtaaagatccttggatagaaacaagcttggg

SEQ ID NO: 82227 - DNA, 1022 bp, Homo sapiens
atgagttgcaggagggaacaccgagagacttgctaagaagctgttgcagtcatccaggcgagataatgtggattggattaggctgctggctggggagtagaggaaactggaaggacttgtgattatttcagcgctagagccaggacgtgctgatggattgaatgtaggggtcgagtgaaagggacgagtcagatgactcctgtgatttggcttgagcaatggtgggggtgcatttactaggatgaggagacaaggagagtcactaggctaggggtgaggggttctggttgatttgaaaggagggggcatgaagggaggagcctgggtaaggctcaggttcctgactcctttccctgtgtgaccaatagtgccatttccagaactaacaagcatgggccttggagtaggtttggagaagaaacggaaaagttcaagtccggtgccctgaggcccaggtgcctggggaagctgcctcgtgggggagctgccacctggtttatgctcagtcctggcctgtgagcacagagtctgcatttggtggggctttgctggtggaggttggttgagtgattggtttttggttatgcagcagctgatcaggctgcacttgaccttcagcctcacttttccagatccttaccccccaaatcaggtcccaagtgacctggtctctttctcatagattttttcctcatagtcaattttaacataaaagccacgttcataaaaaccaaatgtgagctcaggccttccagtaatcataatagattagatgctgcaccgaaatgaatatcccacagtggaaagggttgaccggttggcggaaggcgcttgttgtgattcagttgggccacataatgaattctggtttgtttctgtaatagaaaatgcagccttcgctcttctatcaagtccgctgagtcctgggccagaggtggagggatgggggtgagttttacagcttttgtatcttgaaggttccccagttcagtgaccaaccttctactcctgccactccattt

SEQ ID NO: 82228 - DNA, 1082 bp, Homo sapiens
agttccgccctccacccctgtccacgggtggacaggggacacccgttctgagtcggtgggcagctcaggctctgacccctaaggcagggctgtgggcggggcagggaacatgtggtctgctggaagccagaatgagctagtgctcccgtgaagtgcagcagggtttctttggaatttgtctgtcacaaagcacttaagagttgaagcaaataggataatatattatccacagtgtttatttctgtcagagggaaatgactggcaaagaagctattgggtttgcagcaaaacctgcctttctgtgaccaaaaaccacggggtatgcatgcgtgtgtgaatgagtgtctgtgtgtgtatgagtgtgtgtgtgtgtttgtgtgtatgtccttgcacacaggagccgtcttacctttcacatgcatgcccctgttacagggtgacattgaccttagccactcagaaccatcagccaccaggttgtttcaggcaggaggcttaaacctaaatctaatgttcgccacaaattaaatgccatcctaagtacagtgatggtcatgcaatgattgttatagaaaacaaaaatgagaataagttgctttttcacttgcctttgatagtaccaccttaaaataaccaactgctgacagtgtcgtatttctttctagcatgttttctgtgtgggtgatggttgggcttttttgcacagctgtcatatggtggcttctattttacgtatgtttccccttcattttgagatttgtctaatcttctgcccgaaatttgatcaaaactacttaactttttaaaaaattaattcagcaaaaatgtatggactgttgtgtttgtgccaagaacaccactagatcacatgacatacatagcttgggaaggtggagggaaagagcgttaaccagcggggatcatggtacacggcagagaggagggaggtaagagccacatggctgcattcagggctgggctttccactctccacatgaccccaggcaagctcatgtcttttttgagcctcagcttcctcgtctataaaatggaaatactattagccacttcatggaatgtca

SEQ ID NO: 82229 - DNA, 1050 bp, Homo sapiens
agtagtcattttctagtttgctggcctccggatcaggtctctgcagatcctgcgagtgatggtttcccctcttaacgtggctgatgaagatcctcctacatggggaaggtggcaacactgccatttccttgtcccctgtactttcattattcaagccctctttaagctgctgtttctttgcaggaatcgttttaagcgactgcattattgtcagtgtttgttgagataaaatgaggttatatgatttggagatcgaccttgccaggctcagatgaccccatccagctgcagcagtggacatacccagacaagggtggcaccgtggtgggcccctacacactgaggaggaaatcccactttccccttagaacatcccaaaccgcacttggcctccaagtgaggatacaccctcactagcaaagcccacgagaaagcagaaacctcagggttgcattagtcatctttgaacctctttccagtataactgccctaagtttatgtcctctagaaagcttttggattgcaaaaacagaaagacatataggtaggcattttcccagagggttattctttattattaacaaaaggagagctttatttaaattctggatcccttctcccaacccagatttttcttacttttatcccataacatttattataccctaagtataatttctcagcagcttttagatgttttcaggaattgtctttcctggtggtggtagttatgtcacacaagaatattcaaatttagttgtagttctgacaactgaaaaaacctaaaaaggatctattccctttcccaccccaagtgtggggtgtgtgtgtgtgtgtgtctcattcagaacttgtgagagagatgcagcagttctaagggtcattgtccagtagagattaccatgacagtgagtgctcacactgacccaaccctgaacgagtgacaggttctgtgcctcctcgcatttcatgtgcattaactcatttcatcttcacaataccctagacagacatgccattcatgcagtggaacaaggaggcgagaggtgt

SEQ ID NO: 82230 - DNA, 1093 bp, Homo sapiens
tggggccagttttctgtgaaccatcgggggtgagcacggtacatccagtgcaggtgaggttggtgtgaaatcgtagcccagcggtctcaggacccccagagatagtgcgatgttaaggcatctacctgctcttgggacacagtcaaattaaatgtgaatctcaccagcctgcaggacagatatgtgtgaaaagattagttctcagaaccagctgcagtgtgtgcttccgttatcagccctttttttccgaagcaggtactctaggaagcagtgtcctcaggggtgttcatggtattttatctcccgggtaagatcagagtttctttcttagaaagcaccatcaccttttcctagaaaatcattcactggagacatgagtatttgtgtatagttcagaggaattcattgcacacagctccccttgtcagcctttatcatctgagttaattcgtgtgtgacagaggtgtttcacttttggattttgcaaaacaggaatgacctgtcatttgcacctcagacacgaggagtctgaaccttcctccctgcagctggtggttctacctcggaagcctgggggtgcagaggaagtgggacccatgtgtcttgagtcaatccacatttccaactgtctgaccaaacccacaagcctcaccgcaggacccaccctgtccggcccactgacgccttccttccatgtcctccctgccaggcacacgattctgtttgtgggtggcagtgtttgcactggacgtcctggcatcagctttcactggaggactggttctgacagatgtgtatgtgttgcttcatgatgctgacgtgctcacccccagccagggctacagcatcctgtgccaagaaggccccacctgggagatccccccgcacccctgagccagaaggtccagaggactgaacgctgagcactgctgctctggattccactttgcctttttgttgttgttgttgttgttgttgttttggaggctgcagtgagctgtgatccatcctggagtgcagtgttgcgatcatagctcactgcagcctcaaactcctgggctccagccatcctcccacctcagcgtcggtagct

SEQ ID NO: 82231 - DNA, 1048 bp, Homo sapiens
ctgtagactttaaatcgtctctagattacttatgatactgagtacaatgtaaatgctatgtaaatagtttgttatactgtattgattagggaataataaggaaaaaagtctgtacaagttgagtacagatgcaaccctttttttttttaatatttttgatctacagttggttgaatccacagatatggaacccatggatacagagagctgactgtatgtgtattatattctattttatatttatgatgatgattgttattatccatgtgttgtttgcaaggcaaaagcagatattggcctatattgggagccaaattctgaacttttaaagtatttattgaaaggttacagtttttcagagtggtgggctgcagaaagccacacgtttctgttttcttacccacctgctctggtcctgcatgagttatttgccttcaaaaccccaagaggaacaggcgtttgggcacagaaatgagcgtctccttgacttggacctggctgtgatgggccgtttcctttctttctcatcctcatggtcatgactccttatttgagagctcaagctgccaaatatttcaagtgaccacccacgtcttgggctttctgtacttggactgccatggatgtttaagtttcctggtgcacttggttaagtgacacacatgtcatacattcctgagttcacacccagctcagccacttagcaggtgtgtgagctgaaataactctgcccctctcagctctgtttcttcctccataaaatcttcaagttacaataaggtgcccacagttcctgccaccccgtaagtgcttaaaaaatagaagttcttttgaattttttaatggaactacacttctttttctcccaattgttagagatgtctttatgaagactgtacttttaaaaactgttgacaatcagatacgaatgctaccaccaccatcatcatcattataacttaagagctgatctttctccagtgctttctggtttacagaggactgcactaccttagcatagggccaggagataggattgctcttccag

SEQ ID NO: 82232 - DNA, 1018 bp, Homo sapiens
gactcagggtctagcccttgctggaagcatggcctgggcaggtcacttcaccttcttaggtctcagctgcccggtctgtgaaatggggctgactgctgggcagggattattatgaaggtcacctgatacttggggacaaggtcctggcagatgacgggtgctcagttcaggtaaagtaacccaaacctgaacctgtgaataactgaaaacaggctactccccctttgatttttttttttctgtcttgttataaaagcacgtaccagaatcaaaacacccgaagaggtgggctttattgcgtttctttcttttttaatagagagtcatggtgtcatttctgggtgtggggcatctcactgaaatgactctgcaatctcactcttctctgctctctgaactgttggtccaggccatccgggtgttcttcatgctgcgttccctgtcactgcaattgcgaggggagcctgagacacagttgccgctgactcgggaggaggacctgatcaagactgatgatgtcctggatctgagtgagttggctgctctgagtcacagcagggggctgggggacatgggacatgggacaccactctgctgattcacacgccactgggagggtcagtgtgcaacctacattttgtactattattgagctgtgaccttgagccagcggtgtgcatgtcccatgcaggttttgaagaaaaggcccctgggttctctgagatcagtttgagggttctgctttcacacagctggttctctaaaaagtctctgcagagcacctggaggctcaagcaagggtgaacaaactccagggttcctgtcctccctataaacatagtggcatcggtttggttggttttatatattaagcattttctatatgattctaatgataaaagggttctgctgctaaagaaagaaacttgtaaaaagcaaaacaccagtgtttaggtaaggatgaaggctttggaggctggagaaccacgtgctcagcccataaccttgagctacttgt

SEQ ID NO: 82233 - DNA, 1063 bp, Homo sapiens
tagttaacctctctgagcctttcttcctcatctgtaaagtgggtctaatagtgcctacctcaggactgttctgttgattaaaagagaaaagtccatcagaaatactcagcatcacactaagtgtacacaagtgtttgtgatagaaacagtcattacaattcttcctcttgactgcatattgggcactgaaatatgtctgttctctttggagggttctttgtcggaatcctaacaaagcacagcctcgtgactgcttctgtccaggggacacattgaaaagcagaggaggtaacacaggcttgttaactagataataaggttcttggaaagatgactttcaggaaagtgggtgccgtctgattgaagagctgaaaccacaggatggggtgggaacttgaatcagacccagatggctccttgggggcaatttagttcaagcatccaggcatgggccctggagaagcggtttgcttagtgctgactctgaagtggactaatgttaacatgaaacccaagaggcaagtatgtacatggcattcaaagagttggattgcaaggcgagtgtggttttgtggcactttggcctgttctctgcccccacccccggggtcccgtgtttttgtctttaaaggaagcacagtcctcagtcctcatggggtcgctccacaggtagacatttaatggagcagctgctcatcacccgacctgctgacttggaatcactcccaaccctcctccaacctcacgatcgggggatcatcagctccctggactccacagctctgccccatccctggtctggcctctccacacctctcccctgcccagtatctcccccattctaccccagcccatggccttgcgccacgctgcttcatccatcctgatgcccagtatgtaaaaggcgcctaacccgccatcatgtccctgcttgtaaactctcagatcctcgcagtgcagcggcccaagctacccacgacactcctcttctcccatatgtcttgctgcatctgcccacacagtgcccaggctgctcacaggctcctggacacagcctgcctgc

SEQ ID NO: 82234 - DNA, 1065 bp, Homo sapiens
ggaatcctcctgcacttctgcagcagctaacaactttgtttcatgcttttgaggccagaggctctgagaggtcacatgaccagcccaagcatccacagctaggactccacagaaccagctcatccttgccaggtgggaggcagtctgtcccacaccagggtatctgaaatgtttctgcttcaggtgctgtggctgatgcttccgggccattatctgtgtaccatcttcagctgggtgtgggtgaaagcctcgttggggatgggcccagaaagaccttggtgtatttctcacacccaaagaaggccgccaaggaaggcccatggcgacccctgggtaggaagcttggtgctctcagggagtgggatttgtgccatctggtgcacagcctcgggcaggaagtgcaccaggcccccagccacgcgcggagagcttctccagagagggctgtgatgtgcggctagaggcagtgcttggcacccctgctcctttcacaggacccagaagtttgccagatcaaaaccttagcattggctggaaaattggcttacttattgccatctgtacccatcacttacccatggagtgggcgccgtcctgggctgagtcgggtgggggtcctgccgttgagttagtaatttcgggttttccttttgttgtttaaaggcatacttgttaggctaccaagtaatatagaaacatattcacattgtaaaaggctcaaacagtgcagtttgtagagtaaaaagtgaaagtgccctgccatttccccagccacccacagtaccccctttccccccaggccacctgcttctccagcaggaactcccagcctccgttcaggggagggggagggtgtccttctggaccaagctcttcgcacctgcacacatacgtattcctctgggtggatagcctcgggctgtcttgttcaccacggtcactccagcccagccacaggcctggcacttagtagacacccactaaatttttactaaatgaatgacagtagcagtagtttttacatgaatgggaccatggacatcttgttctgcacttggttttggc

SEQ ID NO: 82235 - DNA, 1109 bp, Homo sapiens
atggcaaaactccatctctacaaaaacgaaaaactagccacgtgtggtggtatgcacctgtagtccaagctgcttgggaagctgaggtgggaggatcgcttgagcccagcaggtcaagactgaagtgagccaagatcacaccactgcactccagtctgggcgatagagtaagacctgtctcaaaaaacaaacaaaaacaaacacacacacacacacacacacacacacacacacacacacatgccaggtgtggtggtgggagcctgtagtcccagctacttgggaggctgaggcgggaggatcacagcctcccgggaggttcccgtgagccaagatcataccactgcactccagcctggctctgtctcaaaaacaaaaacacacacaaacacaaaaaagcccatgcttaaaccaatccctggcttgcaggcatttccagcatttccttgaacgtttttgcaaatacagatttgaacataactgatttcagttcctgtccccaaaacttttggttccttccttccttttgttcgtggcacaatggtgagagtaggtgctctggagtcagaatctatcagggtttgaggactgggtctgtcgtctatgagctgtatgacttcggccgagcttctgaaactctgtgggcctcggtttcctcttctataaaacacggtggtcgtgacaattaaatatactaacaagcgtttgatccataatagaatccccaatgcatggtgactgtcgttatcctcatcatcatgactgtccccagtctagtgggagacaggccaggaggcaggaagctccccctaccccagtgtcgaggcccccatggagcagggaggagctgggatgaggagcatccttacctgggcaatctgtccagacccatctcagggatctcctcctcctgtaccccccaccacctccacttccctgctggctcctacagcctttgcacccccttctcatggtgcttttggggcatcacatggtgtgcaccctcatctcttatgaattcagctagacctgctcagcacagcagagtgagagagagaagggcagtaggcttcactggagtggcccttccctgccatccctcacagtga

SEQ ID NO: 82236 - DNA, 1075 bp, Homo sapiens
ccctacaactttttccaggccacatcaggcaagctcctttcttaagaactgaccttgtgtgtctctttttgcatctgagttctttagaaaaatctctcccttttttcctgtggggccctgcatgcctgccttggccccactgcccgaatatgccttctctcatttccctcctgcctctgccgtgtagtttctaatgtagctcaaatgtgaaaaattaggtttgcatggttgccatgaattttacgtgaatcacatttaaatcaataaagcctgtagaatgaatcaagttatcgttattatgaggtagcagggggctatttaaaggggctgtgggcctttaagcacataatggaaaaagtttcctactactggatgatccccgataaagcacttaaccttttgcagctctgggctccctcagtacctgtgatgcgtttgaagtttctactttcttcttagcaggtgtgatcaagcagaactagaatgaaagtcacattttccatgacttgtttcttatttgaacagttgctaatctttttttttctttttttttttaagtgggtagtcttttaaatgacattctgtttcaaatgtgtgagcttgggatctttgatgtaaatagcaggaaaaagtgggcggtaatgttatggaacgtggaaagcctgccttttctaggtcgtgcttttagagcaagaaccagagagaagaaagaaaggaaagagaagatgaaaaagaaaaaaggctgtgcaggggtcacggctggaaaggccctcatagcagcctggcacatcatgttctgactctgggtgcagggctccccccacctccccattttcaccttgatcagtcctgacattctctccacgggccagctctggtctgtgtgttgggaatgaccactccaggaacagagtccaggcagtcagcatagctgagggtttgccacagtgctctggacagttgagtaagacaggagctacagccgggcacgatggctcacgcctgtaatcccaacactttgggaggccgaggcaggcagatcacctgagatcaggagttcgaaaccagcctggcc

SEQ ID NO: 82237 - DNA, 1032 bp, Homo sapiens
tagtgtgtggctgcatgctgtcaactctgctggggcccaggcgtcctcgtctggaactgaaagcccagatttgtgtggctacctcctcacccaggtgcgaggacggggcaaagtgaggatggtaacagtaacagaggtgtggactgggcacttgctctctgctttcattcttccctgcctgggacccacgtgctgttttcacccctgtttacagatgggaaagtagaggcccagagcctgtgctgtgtttaagtgtccagcatgtggcaggaagcagagacagtggggattgtgattcttacctatctagccagagttgcacctggggtttggaggcacggctgactgggtacacaggctctacacccctgccaactgtctgaccacggtggctctgcctatgacacacttatttactattggacagcctgactagctcttttcttaacttttgcctaaaaaaaattcaatccatggcttcctagctctgaacttgcctctgtgcatcaagctgaagaaggtgcaggagtttcagagccagtcattccttaacagggaggtaagactgcgggggactcagcaatttggagcctgggctttctcaccacctatcatgccctcctacggtcctgccaaaatctcctgtctctctttcacctttccctttctccgcctgctggtggatttcctctgccaagaaattagcaagagcagctgaaggcggtgatgcacacggcccggccaaagtgaagtcacccctgctcctgctgtgaaagctgctgatctctttcttagcacaggcagccaaatgtggtttacccttctggtccagatttcactaacttagtgtggcccagagaatctttttacaagattggggtttggtttcaagcacatggagggacttggacctgactcacttgggcatttcctgcttggggtcctgggaattgacctcccggaagataacattagcagcacaacctcaagtcagttactgaccctctcagggtctcagctttctcatgtgta

SEQ ID NO: 82238 - DNA, 1044 bp, Homo sapiens
ggaaatctcaagtattccatttggctgcctcacagagttaggcaattttatttactcatgctaaacagggccattttcagagaggaaattatgcaatgtactatgcaaatgtggcattccgagagcagagataagtgtggtcaccgatgcattgtaagatgagatcgtgtctctggcagctgggtgtcacttgataaggggatatgccagactgtacttggaactgctgctcccttggactcggtttctggtaattgtgttttcaccaagttgtcaagctgtgaactgcacgtattgaagaagaggaacaaggagtgaagcttttgcaagttgctcatccttaagtagacttcagcagtcagagaggctgcccccatacatgttctggacacatgggaacaaggagggtaaaattctcatcctccattctcccaagaagagtcttaaaatttgacacgggggaaagatgaagacacacaactggttttcctggccactgtgaaaaccagtcacctcattttactagacatggcatgtgcctttcatactgagagaaaggaagtagctgtggaaaaccccacctttggaagcagacagagctgagcccaaagctagcacttcccccagcctgtgggtacctgagattgaggcacccagcctccccaagccttcagctccctgcctgaaaatggcactttcagttagttattgctcctgggccgtgtaccagtcacaaagacagccaacccttcacacagccactgctcagatagttgctgagtgagccagtgacagatttatccacctctatctgtaaagtgagcattgatacagtgtcctcagtggccctgagtgtgctgggagacatgaagattctgcagagttaagagattctggaaagagtcctacagagggctccatccaaactctttccattcaaatccttgctattcaacttgggaacaaaatggatcttcacaatgataggatcctgtagtcatcacacaaaagtgatataaaggaggccagaaaactaataatttg

SEQ ID NO: 82239 - DNA, 1075 bp, Homo sapiens
atctggggatggtggatggatgaccaggcagtctcatgtcacctgtcagctgcactggcctctccttgccatggccactcctgagtgtcaggcagggaggctgccacataccacgacagagccgtctgccaccaagtccttcccatggtaccttagcactcagcatactcctgctggctcccaaatgcatgcatgaagcctgcaggcagaggctttagagggtgggccgagttggattccattcagcatttctctcctggatttctcctcaacccaagaccccatggcagtcccaaggtgactagcctgtgtcccccagggctccacagccagggtgtggagcagccgaggactggggcagggtacaggagttccctaaaatgatactggcgggacccacaaaggagtcacccaaaacccgcaattccttgatctcccttgcggatagcatttgcttgtaatctgtagaagccgcttcatttctccttaactgccccacagcctctgaaaagcgagagctccctccctgggatccttcctgtctcactggtgtggccgcattttagttttcttatgaaatctctcactgtgttctcacagggctttgatgtctcaattacatttctgaaagctgttccgttctggggttttatccttccttttttgttctttgtggtggaggtggcaggtctttcttccgctgaagcccctcaggcagccaggctctatgagggagtcgcactgcctgggacaaaccccattgacactgacgtgtatgactgtgtccgttttcccagatcaaactctcagatgaacttcttttgtgaatgtgaaaacagaaggtagtcaagttgtcctgtgtagagtgaggaaagggaaaggagaggagggggaaggaggatagaaagagaaagaaaggaaagaacatgtttattgtttttgttctatttttaaagagtattttttaaaagattcccactgagaaaatgctttaagttttgtttgtttgttttgagacagggctcatcactctgtcacccagaccggagttcagtggtgtgatcacggctctcta

SEQ ID NO: 82240 - DNA, 1064 bp, Homo sapiens
gagcgttggatgtttctccatttgtttgtgtcatcttcagtttctttcttggattgctgattgttttgttgttttgttttgtgttgtgttgttttgttttgttttgtttgagacggagttttgctcttattgcccaggttggagtgcagagcgcgatcttggctcactgcaacctccacctcccagatacaagcaattctcctgcctcagcctcccaagtagctgggattacaggtgcccaccaccacacccagctaatcttttgtagttttagtagagacaggatttcaccatgttggccagtctggtctcgaactcttcaccccaggtgatccacctgccttggcctcccaaagtgctgggattgcaggcgtgagccacggcacccagccatgctggttgtttttaagctacggcttgagcacctaacatgcagtaaacattggacagatgctttatgtactttatatgctttatatcagtcctaactagtagcagtttgagggagtgtgcattctctttattatccagatgagggatctgaggtccagagaggaaaagaaactttcccggcataactgtcagagaagggactcagacctaggtctgtgtgactctaggcctgggctctaaccactgagctctgctcctgatagaatgagagtcagctttggtgtctccatcaccctgggcagccagactgtgcctcattctcttctcaccttcctcctcccagataacagcgacttgattgcatgtacagtgatcaccaaggatggcggcatggtccagcgattcctggctgtggatatttaccagatgagtttggtggagcctgatgtgtccaggcttggctggggagtggtcaagtttgcaggcctattgcaggtaagatggccaggagctctgggatctgttctcagttggctacaaacacacacacacacacacacacacacaccacacacaattgtcatctttatcattaatttgtagtgatattatacaaggtatatgtgaacaaattgtcacccaaaaaaaagctaaaataccacataaatgca

SEQ ID NO: 82241 - DNA, 1080 bp, Homo sapiens
agataggctgagatctgtacctccccttcctgcctctaaatcccatttgcttcaaggctggcattggtgcaggttgaatattccttatccaagatgcttgggaccatgagtgttttgaattttggatttgggggaattttggaatatttgcattatacttacttactggtttagcttcactaatctaaaaatccgaaatctgaaatgctccgatgtgtgtttcctttgagtgtcatgtcgacactcaaaaagttttggattttggattttcagatttggattgctcaacctgcaatgactgagctacttcgcatggcagctctgcctgtctcagaatgtcagagatcagtaggataggccctccttagagaggggcctcaagggatgcccctggtctagacagaatgttccctactcccctcttccgtcatccaccctggcataggcccacatcctcgtgccccaagacccacttccagtgtttcaaggacaaacctgcaaagcagcaatccagaaagatgctccgtcctgagaccaccacttccaaaccaggctagcggtgcagggctcgttcctgcacaggtttgtccctggtgtgcatgaacaaaaagcagaaggatgacttcaaaatcctgcctgaacaaaagcagcaggatttgagcccctttcaaagctttctggcaattgcctctaagagatcagccttcaagtggtggggcaggggtgtggggaacagatcctactcaaaaatcagccctgagctgagtccaaggggtctcctgtttgccaagcctcttttcagggctccagagcagctgtggagagagagagcctcagggaatctggagctgggctcacacagccagagaaggaaccgcgttcccggatccgggcctgcaaggtttccccactcacaacatgccccccaaagacactttcccaatagacacagtagcacttgtcatggggagccctctctcgctaaatatggacacagtaggcagggccagccatcttgcccagatgcttttctgggaggtggagggaggggaagaagagagttccaaagaactgagtgtt

SEQ ID NO: 82242 - DNA, 1010 bp, Homo sapiens
atagcaaagcgctttgtgagcttgccccatggttcgaattttatcctagaagcagcaggaagccattgaaggttctaagacagatcaggggacatgggtggcaaaatggacttgggttttaactgactggagttgggaagggcagaggagaagggtggagtgggaaggccacaagacacattctggccccttcactgcatgctcacagctgtgcgtcaggtgatgcccgtgggcggatgagaaaagtcccacaggctggggtgcggccttccttacctttctctggccatttgccacttacttgtactataggattatattgcttgtttcaaaaaacctaaatgaccactgttttcactcaacagcgtatcctggagtgtttttcattttagttcgcaggcgcaccctcattcgattttgactgctgcgatcatctggtcaaaccactgttcattgagccagtcccctactgatggatgtttaggtggtggccaattttttgtcctttaacaaataggcatctccaagtgcccttgcgcaagggtttcctcagggtaaataaccatgaagtgaaaacagaaatagctacgctgagaaactaacaggatttggtgaccaatttgactgagggagtgggaagccacagagctagcttaaggcaaaatcttaagaaggcttggtttccctccccgaatgttctctgtgcatttagctagcaagggcatctcgatgatcccaacttctgacccaacagtccttgtgtgtcttgtgggtcttgttctgtccagaaggccttcgggagttgtggtgactagaagggtccccaggaactggtgggggtctccggggtggcccactcatagcttggcttgtcatctcagacagaacctccaagcttggcatgatggagacaccagtgggttctgttcccacctcctggcacctctgctgaggttacagctttctacacttcttttctctctataaccagaatcccatgactaaaatac

SEQ ID NO: 82243 - DNA, 1044 bp, Homo sapiens
gggcgtccctgcagcctgcagctggacagcggcctcagtctcctgttgccaggggtgacgaggcctgctcagctcagcatagcccttgggtcagctctttgctcctccaggcagacagctgtgttcattctccgtcctgtacctccacaacttctgtgggacagccaactagatgatcaggaagccactcaactggaacctcacaatggcaaagaaaagccaccctcccctcagctgagagggacctacaggcagccctaacagtgcctaggtgcccagaggcatggttcttttggaagtacggagccctcatgcctgtaggatcttccccagcttgaggcccacgcctgagccaggccagccctgtggtcctcggccctagctgtgcatttttaaaatcaccttgaaagcttttagaaaagcccaacatccaggcctaacccagttaagtcacagtgaagagagggccgttggtgacattctcttctgtaggagcagtggctctagcgtgcttggggtaggagggattctgggtataggagtgggatgttttgtgcgctggggccagtttcaggagaggccaattccacaaagcttgtcatgccttgggggacggctgtgctaagaactgggaaatgggttctggatggccctgccctcatggagttcatggtgtcctggggctaactcacttttgtaccagacctagagcagggaaggctctggaaggaagtcttaaaggatgagctaggtttcacgtggtgcatcccggcagggggaatgagcgggctgtgaaaaccaccatgtgcacatgggtcctgcaggcagcctgaggataggggtcagcaggagataaagccacgtgggaatggcccctgctcccgattacctgtcctggacttggttggagggcccagggaatagctgatgggcttcaagcagagggcgaaggtcccactctactccgaccacacacagcccttggagcgggaaaacagtcactgatggggccggccttagggcgggctacccgtggggcccgat

SEQ ID NO: 82244 - DNA, 1049 bp, Homo sapiens
aggctcaaggctacaatttccattacacagccagtcagcatcagggctgtggcttgaacccatgtctgtctgccaccaaagcccaccatcttagcttatattatgcgcctccgtttccctgtccatactccagcctttagactcccaggccagtgctccatcccctgtatggccaggaaagcacagccatcttgtaggaccaggagcagttcaaataatgagccaacggctggcaccctttctccgagcacagcgatgcaccagaatgctctccctcctgtgacaggtgatgtgcgcttcagctcaggcccagaagagccacaaaagagaagctccagcagttctgtgtaggaggcaggatgtacttctatccatagaagggctctcatgattatttattaattgtgaaagggaagaaaaaactaatagagtttcccggaaagggatacaagttcaatatgataaactcccaaaaagcaatcaaaggccaaagagggcagaaaaataaaggacagggagaaagagagatggtgaatcaaagtggccagtatgttagcagaggccaggggaggggccaggcttcacagccagggaggtgtggggctgtcggagcacaagtcaccagtggtggtgagtcaggcaggcagcgggacttgaccccatggggtcactgaggccctggggatgagctgataacaggaatggatggaaccggtcagctgttttgctattactgcagacccgttgtattaatttttgtgcattaatacatgaacgtagaatattataaatgaaaactgagaagctacaggaagaagaaatcacaatcctatcaacccagaagaaagcattgttaatatttctgtttattttccacttctgtcttccctgttttgtctctttctctcatttaaaaaaaaaaatacatgagttgattgttgatttttgaaaaaatcaggctgggcacagtggctcatgcctgtaatctcaacactttgggaggctgaggcaggcagattgcctgagctcaagagttcaagaccagcctg

SEQ ID NO: 82245 - DNA, 1046 bp, Homo sapiens
ggggacacagtgaaacacaaaacagtctgaatttgccagattttacttaatccgcttatactggccacttacgttgtttctactaccttatgaagcaccctatgacaaacatccttattcagaaatcttggtctacatttccaattattcctccagaaaccattccttagagtcagggggactgtccatttgtcaggctctgggtggcaccttgccaaattgccttccagaaagcagagtagggggatgcccacctggtcacacctgggcccttgtcttcattcacctgggctctcagatgactcctgcccagtgctccaggctgaagtcctctgcacatatgtgtgcgcctctgccagcatgtgcacaggcattgtttctatcaagtcacttttttatttctcattcctgccaaaaagagagagagtctatgggttaatagcaaagtagaaaccgtagctcaaaatgtctgtttggggcatgtactcttgcatctgtatagatgaatagagatttcagaaatactgggccctctgggcctcaggcattaaatcaatcagtgcaatttcactcacagggcagcttgccaagggagcccaggagagagtagcgacttctctgatttagttcagtccgttaagctcatggcagcctgcaccagctcactgttgcaaaaggcaatcaagtaatgagtactcagccactttcggggggcgggggccggctggggaaggggctctctggagcctttcaaatggagccaacttttgatagctttttagggtagttctgagagctggagacgggtgaggaacccgggaagtgagagcttaattaacggaactacagagaatgaggcagcaaaggaatctctcagagaaccagggggttttgtgtgtgtgatgagcaaaaggatagaactaggtgcttgagtactgccggctaggaaccagcattgaacagcagatgcctaactcagcacagcaagggccagcttagcacagagaccagagagcaagatgcgcggaaggataaatttagcctgc

SEQ ID NO: 82246 - DNA, 1001 bp, Homo sapiens
gaagtgggggatgtgtctcaccatgggcatagtttccccccactgttggagtggcctgcctggccctgctcttggtgagtccaggggagagagcttcagagggcagaacagatctcaggaggatgttaggatcgggagcttgagtctatccagttcccaggcagtttgtgttccctccatcatcctcccttttttttctctttttggtttaaaataaggtttacaataggagtcttggaaaattcagacaagcacaaaaaataacaaaactcactgcagtacaactacctgcttctctcactgtgtcagcttcaaatctccagctgccttctctgctctggacaagggggaaagagagcacaaattttttgcaagagcggaaacatatgggacatgctttttctaaccttttttcattgactccatcttgagcatttcccccaacacttagtcttctcttaccagcgtgttggttggcagcagggaatttcatcatctagagggattagaattcacttagcctttccccagttcttggacttatcagctgtcttctgttctctgttctgcacaccaatatgctgaatatccttgtagttcggtatgtgcatccacccacagtgtcgtctgcagcatgggatgctgcaggtgtggaattggtcagatggtgtgaaagtccatgcagcctctgatacacattttgcaggctgtccttgaagcatacccagggagagccaagactgttatcactggagaggatctcagggaggccggtttgccttcactcctgtcgcacgatctctggcttgtctgtgtgtttgcacctacttcgcagcccaagtgtgtttgattcatacaccaaaagcctctggcacctctgccaaagctagttcatcagggactgcctgactgggatgaagcaggaaccagaggacagggcgctctggccatagacattcaccctgaattctccccagcaccctcctgattctctgatgtgt

SEQ ID NO: 82247 - DNA, 1110 bp, Homo sapiens
tcccaaaccttggctttgaatattgttgtggaggtgtgctcgtccctttctggacgtgcaaggtacctgtcccagcaggtcagatggggccagctgaggcgctcccccaggcaggaagggccagccttcaccatcgcgtgggattgggaggaggggcctccgtgagcagcccctcctctgccgctgtcccagcccagtccctctcccggagccttggcagcctcccacaacccagacacttgcgttcacaagcaacctaaggggcaggtgaagaagcgcagccctgccagacgcgctagattcctctaaggtctctgagatgcaccgttttttaaaaaggcgtggggtgaactgattttgatcttcttgtctagatgcaataaataaatctgaagcatttaatgtagtcatcttgacattgggcctacactgtacgagttccttatgtttccttgagctaaaaatatgtaaataatttttgtcccagtgagaaccgagggttagaaaacctcgatgcctctgagcctcgggaccgctctagggaagtacctgctttcgccagcatgactcatgcttcgtgggtactgaacacgagggtggaaatgaaaactggaacttccttgtaaatttaaacttggcaataaaagagaaaaaaagttaccaagaatgtagcgtgctgctcctgggggctgtggcaggaggccgtggcctggcacaggggaaggttcccagccaatgacccctcatcccggcgcagctgcttggcaggggtgtggtggctggagcccctccctctccctcctccccgcaccaggttccctcccatccccaggttcctaagaggttgtcggggctcatacaacccgggaataactgctaaggggcagttggcaccatcaggaaatgtccccgccctacccctgccgggtacagggagcgtggtccacattctgcatcttttccctgttgggcaggtggctgcccatccaagcctcaggctctgcatctgtggatttggacagccaagccctacctcgcaggacaagcgtagcgagcagcgtcattgttgccaggctgggccgagggaagcaggaaggctccccaccgagg

SEQ ID NO: 82248 - DNA, 1011 bp, Homo sapiens
ggtttcgaagaggaggaagctggcaggagatgggctggagccattggaatggtcatggcaaccgcggggtggggatgcaggaaggagagggagagacagcggagagctgctttggagtgggagagggtgtgggtagaacctacaaggtcaatttgtcccatcgcgtgccttcgagttcatccggctggctgtgtgtgccttctcagtagagctcctgttcccctctcccggttggaatgcccttgggcttgtttttctcttcgtgggccttcagtcattctacttctgtgtgttccaaccctaccagcactttaggccccttcagaggggatggcaagtgcattttcagaactagcctctgtcacggagggacccaggtggaatgtggggttggagttctgagatacttgagcacatcctgcctggggttgaacagcaggatcaggggtcagcttgcctggggcttcagtcaaagccccaggccccacgtgcagtgcaatgaaagcctcacggggcaggcagcagggctggcaccgggcctgtccttcctgcagcatttggagttttcttttacacaatcgggttttatgtggttgagactggccaagttttgctttcaaggagagtcacttccccaagggaatgggaagagagtcacagttaatacgtcattagatcatgccggtggcagccggcccttgtgtggatttgcttgtatgtgctggaggaggtggcagggataggtcccagcagttggaacaatggggcggggggctgcctgcccagccttttcggcaatgtggagggaaaattggattgcttagtaactgtcagagggtgtctgcagaaagaggatgtgtcctgtgcacagaaaccagtcacatactctgtagcattgagcaaggaacaggattagaggaaagctgaggttttctgcccctacctcagagccgcctaattataactcgctctgatgggagcgtctcctccattccttgggcgtggttacat

SEQ ID NO: 82249 - DNA, 1049 bp, Homo sapiens
cgttgcacgtgttgatgtgtcttcagaaacctggggtagggaagtttggtaggtggaagttactgtccatctcctttctcattgcatggcgcatggaagatgagattttggctttagcgtttcgctgtgagtgtcctgtttatttcatggtcatgggcctttagtatcaaatttacttgaaaaccttatgaaattatacagaaagaaagaatgaggaatcttgggtaatgggaaagcaaccagccagttttgcaaaaattccaacatgggtgatttttaactaattggaaaaacatgtctcttctcagttgacttaatcctttttgcagtgctgggggccataagcgttcccaggaggtttaaggagcataatcagcccccaaggtggtctgcacagtgacaaaaaaggacaaagggctctgcctgcgtctgagggtcctgtagtcatggccagctgtgtctaggggagcaaagaccctgtctgtcatcagccttcctggctaaggcaaggggatgagtttgagatagtagagtgtgggcacttgttctggctggaaacttagccttcaaaacaagatcccagaggcagaatttgagacccaaacaggaaaaggaaatgcccaatgttgaagcactcagagcggaggggtccagagccgtttgattataagcagagtgttgggtccttacacacttttacaaagttgttttcagagacacggaagtcgatggtccgcactttctcttcctcattggagttccctggaaaagcgtgttgccagggacagatgatctgacggggccacagccccaccagtgtccttaggagggaaacctgtcagcagagggacctcagccctggctgatcacatgggctatgctaggccagtatctgcagaaaccaacagcctgcccttaaagctcctaagttggagagacctgctcggtcacgatcctggctttgctagccacactcagtccccgggttcatctctcggggccaatgcgatgttgtttgtgagatggagagaatggcattgcccctaccc

SEQ ID NO: 82250 - DNA, 1036 bp, Homo sapiens
tggcttcccaaatggctgttgaataagtgaataaatctcttgggcatgaacaggggccaggtggagttttctctgcagagctggtacttgctggccgcactgtctcctggtttgcagtggaagtgtggaggaagggggagaattactcagaccagtgggagagtttcatgtcccccggaagtattttgagcccagtggcaatgagccctgcttccgtgcgtttgcagcacgtgcggttctgagtttcccggcattccatgctggttattctgtcccagccatgaatcttgtcattgtcagggagctggaattgcagtagaaggtgaaggagtttgaagtctggcagcctagtgctggcatagacaaaatctcaaactgtaaaggagagagaaaagtaagaccaggctatgggcccctgaggagaggggcccctgctgtttcctgaaataaattatgctagggcccctggccttcattattaaaaggacaactccccatccactcccactcatctccctcccgcctttttgtaagagcagcgggcatgggtcaatgagtcccctacagctgcagggcctttgcaggcagcggtgctaggcccagcctgctgagttccttggaaattgaacaagcatctgtggagtgctcactctgtgtcaggttctgctgccagcaccctcgacacagagaagaccaagacatagttcctagccaaggggagggcggaaccttagcacacgatgctttgagagctcaggatgcatccaacccaaagtgtgggctaaagggagctcactgtgtgggtgagatcttcagtacagcatgcagtggaggccatgatgtggggctcctggccctagagggactgctctgctgtttcaccatcaagtggggtggacaagggcacagatggacactcagagctaccaggcaaaggaagtgcccttctatccctcatctgctacgagaactgtttaaaagatgggttttaacttttctgagatggagtctcgcgctatcacccaggctggagtac

SEQ ID NO: 82251 - DNA, 1072 bp, Homo sapiens
gaggtggagacacggcccagtaggccaacccgctgagccttggagccacgaagctgggagggggaaggcagaggcctgagtggagcctggcccacctgtccctggtctctcccctgcccgccccaggctcaggaagaggctggctggggaggctgctgttggacctgtagggaaccaagggaaggcacaatgcccacgcccgatctccagggcaccaggttccccacgccatatccctgtctaaggctgccagtgccccattacagaaagcacttttgaaaatactccgggccaggatcaagggctcactcctataatcccagcacttcaggaggccaagacgggtggatcgcttgagcccaggagtttcagactagcctggaccacatggcaaaaaccctgtctctaccaaaaatacaaaacttagccagtctcatgacaaatactttttttaatttttaaaaatacccatctaggagcccaacccagcagcagccgcccacagggtggcttagagatggctgctgcccaggccccacccagacactctgatttaattggtgttgggggccccgggccctggcatttctaacatccccagtgccctggtgtttctgctacagcccaggctttccgagtttgcatgggaaccactgcaaaggtctaagcaaggagacacgggcacacctggcataacaccccaggcactgggcagcttacctaagtccctgcaggtgcccagccttgggggcacggcagggaccaggacaggcgagtctagaatggggtgggaaagaggctcagaggcccccaagagaacacaagcccggaggaggccctgcaggggagggagcctcagctaccctgtattctagtccagacactgcagctaacaagctgtgcacccttcagtaagggtgtcaccctctctgggcctcagctccaagatctgtaaaatgatacagaacaatggttcacaaaacttaacaggacttaagagtgtgtgtgcgcgtgcacgtatgtctgttaagggttgaattttgttcctcagataggttgaagccctaacctt

SEQ ID NO: 82252 - DNA, 1003 bp, Homo sapiens
cgcaggaagtcctttccacctctcatccagcttcacgcctggtggaggttctgccctggtggtctcacctctccagggggcccaccttcatgtcttcttttggggggaatacgtcgcaaaactaacaaatctccaaaccccagaaattgctgcttggagtcgtgcataggacttgcaaagacattccccttgagtgtcagttccacggtttcctgcctccctgagaccctgagtcctgccatctaactgtgatcattgccctatccgaatatcttcctgtgatctgccatcagtggctcttttttcctgcttccatgggcctttctggtggcagtctcaaactgagaagccacagttgccttatttttgaggctgttctgcccagagctcggctgaaccagcctttagtgcctaccattatcttatccgtctcttcccgtccctgatgacaaagatcttgccttacagactttacaggcttggctttgagattctgtaactgcagacttcattagcacacagattcactttaatttcttaattttttttttaaatacaaggagggggctattaacacccagtacagacatatccacaaggtcgtaaatgcatgctagaaaaatagggctggatcttatcactgccctgtctccccttgtttctctgtgccagatcttcagtgcccctttccatacagggatttttttctcatagagtaattatatgaacagtttttatgacctccttttggtctgaaatacttttgaacagaatttcttttttttaaaaaaaaacagagatggggtcttactatgttgcccaggctggtgtcgaactcctgggctcaagcgatccttctgccttggcctcccgaagtgctgggattgcaggcataagctaccatgctgggcctgaacataatttcaagaggaggatttataaaaccattttctgtaatcaaatgattggtgtcattttcccatttgccaatgtagtctcactt

SEQ ID NO: 82253 - DNA, 1055 bp, Homo sapiens
agtgcaacatgaaaaaaaaagaactttaggccgggtgcagtggctcacgcctgtaatgccagcactttgggaggccgaggtgggcggatcacttgaggtcaggagttcgagaccagcctggccaacatggtgaaaccctgtctctactaaaaataaaaaaatgagctgagcgtggtggcatgcacctgtaatcccagctatttgggaggctgaggcaggagaatcgcttgaacctgggaggcagaggttgcagtgagccaaggtcacgccactgcattccagcctgggccacagaatgagactctgtctcaaaaaagagaaaaaaaaaactttatattgacaaataggatgttgttagtgcaaattttggggttgatatagtgggagtggtaaagggaacgtcttcttaccaaatagaaataattagaagctttaatcactctgcaaacagggaaggtcccagggccaggtgctgggcaggaacacaaagggctgtgatgacatcacctttacccagaggcgggaaggacccaggatggaggcctggggagggcagagacaggtttgcagaggagactttcttttttaattaaaaaagtatgtattttgtaaatatgtaatattactatggcttaacatacaaaagaccagcaagggtgtaaaagtgaccagtgtttgtcacaccccatcccctagtccacctggttcccttcccgacaaacaccgaccgttaagtttcttatgtatgcctttggagacattttttgcatattatataaagaaatactaggccaggcatgatggctcatgcctgtaatgccagcgctttgagaggccaaggtgggaggattgctttagcccaggagtttgagacaagcttggtcaacatactgagaccccgtctctacaaaaaataaaaaaattagctaggtgtggtggtgcacacctgtagttctagctgctctggaagctgaggcaggaggatcgcttgagcctgggagctccaggctgcaatgagctatgatcatgccactgcactccagcctgggcaaccc

SEQ ID NO: 82254 - DNA, 1035 bp, Homo sapiens
acaggcatgcaccaccttgcccagctaatttttggatttttagtagagatggggtttcaccatgttggccaggctggtctcgaactcctgacctcaagtgattcacccgcctcggcctcccaaagcactgggattacaggcatgagccaccgtgcccagctgggatcgattttagaaaaagattaaggctgagtgcagtggcttatgcctgtaatcccaacgctttgggaggatcacttgaggccagcctgggcaacatagtgagaccccgtctctacaaaaaattaaaaattaaaaaaactagctaatcatggtggcatgtgcctggagtcccagctggtcgagaggctgaagtgggaggatcactcgaacccaggagttcaaggctgtagtaagctatgattgcgccactgcactgcagccttggcaacacagcgagaccccgattgtaaaacaaagttcagtttaagaaagaaaaaagaaaagaaaaaggttaagatacttttttcgggggaatgtttacagaggctgtgggtcagaatgaagcaacaccagaagctatggagactggggtttctgctgtgtttcaacttggttttttgtgttctcgggagaagacacccttggccgtgggccgtgagacctttgatgtgtgtttacgctgaccgcgagttgttgggatggcttctgcggtgggtggttctcttggtattctcggttttgaagcttatttttagactctgaactctccttcttggcaggagttgaatccccctgggggttttcaagttgttcttggactgctggtttttgaaatagaagcccctttggtggggtcccccataaacccaggcgctggtgcccaccttgtgatgtgaaggctcctgtaacacgacctcactttcctggccccgcactactcacctgccccacgggacacaggtacatggcttctgggtgtctgtccccgctgtacccagatctgcccccttgcccttgtccccagatcctccactcgctcctaggaaccgtacc

SEQ ID NO: 82255 - DNA, 1021 bp, Homo sapiens
agcccaagttaattttcaagaaaataaacagtgcatattttgctgacattacccatcctcactgctcagaggtgtataatagcactttgagaatgggctggtgccgttttgtgacttaaacttctcccactgaataggaatttccccagagctacagtgagggtggaaaaaagaggatctgcaagaggaagtcctgtattcttggcactgtgacttgtcctctatttgttttcgcttttacagcagtgaaaatagccccgtgggtgaggcggtctatcaggtaaatagacttccttagttctgtgtttctttagcacacatatttttgacgtctcccgggtctgtttggccacccatggtctgttctgaatttgattgatgtttacttgcctaagaattgttatttgaggtcaagtggcattttccagggtcctcataatttcatcttgttgtttgagcctgtattgattgacactctggacacaggtgacaacagctttgtagctaatgaagttgtcccttggctgcaggttatttcagtagaagaattgtgtaatttcatagagcttaaggcatggacacaagaaaggaaccattctggagggtgtctatgtgatggtaattctctgctcacctcgcagtaggtaggagtttatataccaggatccaaagctggaggcttcagagaaaataatgttggagaatttaagctatttagctcatggagccttagatttaattgacagtgtgcctcaggtaagtttaagagcttaatgatgtcttgccttaaacttgaatccatgaggttattcctagatgatgcactgatagtttgaaattttttattaaaaaatattaaagtgtggaagataaagaagaaaggcataatcttatagaacgaaacaactaccactggctgtccttatcgggcggcttctgtcttttgtctttgtgcctgttttctatgaaattgtcatcagcgttcatacaattttgtatcctaatgcagtctcagtcttat

SEQ ID NO: 82256 - DNA, 1033 bp, Homo sapiens
tttgacttctaggggcgcgggtacccgcgtttctctccctgcccccgcgacttcgcgcaagatccgggaaggacacccgaggcccctgggagaccctggggaggtgaaaatcagagagcgaagcgggccgtggcccctaggcctgacccctccccgcggggtaaggcgggcaccccgcgagcgcaggggtcctcttactgctgatggcacccagctctgggcccagacgccgctcaccgtccaccgccggtgctgggtaggtgctggtgggaccagctggtgactggtggcagaagtggatctcgcccctccctgccaagctaggcaaataccctccccgctctggtttgcaggtcactgtggataggtggtcagttggtggtgtgcccgaagctcttcggggtcagggagaggaggtgataggggaaaggtgtatgttctggaagggccagtcatgcttcagggaccaggctagttggaccttcactggttttctacttcccgacagtggagctgatgtcactggctgttggactgagcagtggtcactgggaaatctacagtttgtggaagccacggggtcttccaagctcctaccagtcttcccaaagaggatgcctccctccccttggcctggtgcactggtgctggttcaaagactgtctgaagcccagcttggggtcctctttaggaaagccatgatttgccttaatgtgtgcttggctgcttcatctgccctctcaccccctgccttctcagagtgactctttttaggacttcctatttaggactaacccagatgcctacagagagaagtgcaggctggtatctggaattccaccagtgttttggttttatcagttggagcaggatctagatggcgtgtgacttgctttacctggcatagagtaacacccatattgcacttggctttcttctccaccagcccttgctctgggaactaaatgtgcaccaaactctctaagaaacatttaattgtaatctaccatgagggaggcccatctccctcttt

SEQ ID NO: 82257 - DNA, 1113 bp, Homo sapiens
ttgccacaccatcagtagccagaggtgttgcctctcctgcttcctaaggtctcccaagagcccagctgaggtgtttcattaccaccttctgctcaggtggcccagccggctgtccctcttccaccccaagctcctacttaatgtttaaacccccaatttaggtgtatgctgcttaaacgaacagctccctacttctcccgcctcggggttccagaacgtggattcattcaacatggtttttagaagaggcttgggtgaggccagaggaggtgcctttagtctgagcaggaggccagagctctgagctcagccatgaagggccagtgctctgtggttaagccggggctgaccttccatctattacagggatgggcaggcacgagtcacatttgaatcataaataaaattagtatgtgcttgtggtgggattaaaaatcaaagtgagctcactgaaatgtacataggggaggccttggagacaggctgtggagacactagctcaccagagagccaccagctcaccacctgtgggagagtcaagtcctgaacttcaagttcacctctgccctgccccggctccctgccgcaagcacaggctggcaggaagcagtctggtggctcttaggggaatgtgcacgtgagaaatgttccctgggtcctaagtgcctttagagctgggtcaggggactggagacccgctgaggaaagtgaagtcagaaccccataggcggacggtcatcagagaggaaaggaagccaagtgatgtgaagagggaagaggaaaagaagaaaaaagacagaacctcaacagtcccctcccctccagtgcagaaaataggaaacaccaacacaaaacatacaaccttttctctttcctgggccaagtgggtttcagaccaaaagtagccaccacaggctctatgaggaccaaagcaatttcagcgaagccttcactcggggtggagggttggtggggggcttggcgtgctgaagacccaagcggcaagaaactgctctgctacaaggacgctggcagcctccaggacgcgtgccctgactcgcccttcactggctcccaggcaggtccggtagcttccctgcagtaactccactc

SEQ ID NO: 82258 - DNA, 1049 bp, Homo sapiens
agggggtaaaagtttgctttggtgagtgagaaaaggctggggcgtgtgatccatcccctcacgtttcagaacttccaggctttctacctcgactctcaccacagccagcacatacacctaggctgtttttccttcctccacacctgagggacgcagcaacagctaggatctgcattttcaggttccgagcctgacccctggaactgaccagcgctcgattgtcagccttggcctggggttttgaccttgccagtgaagtttcggttttgaagtgattaaatgtcacttcctcatcagtttcacttctggaggttttcttatcctactccctggtgccagggacgtacctgggagtttgaatcaggcccatttgagcgtggcagccgtgttgggtgaaggtccggggctcggtgaggcactgggggggttttcgggaggaaaatgaaaatgcttctagaatgagtgaaccacatcatagctctcactgttttttcaatagctactttttttagcagacaccagagccacactcaaatggctaagtaggttatgacctctctggattatttttgaatgcccaactgttgcattcaagttttctgactaataagaaattaagcattcatccttcgtatcactgcagaagcaacagtgggggcacagggagggaactcttgacactgagccactaaaatatggactaattttttggacaaatcttcaaacggactgtgctactgtatttgtctcaaagctaccaagtttgtgcaataagtggaagggatgtcatccttcttcaataaatgctgaatgacattcaagctgattttctagaccactgagaaaatctttatttacaataaatttcaataaaatttgcataaatatattcccaatgtacaattttcacctctgatttcttcatatcatttaaaaagttagtctgtcctgttctccttattcctttcagacaccagtgtggcgctgacattggcaggtggaggggagctgccagggagctggggggtggctgagggctcaggctgctt

SEQ ID NO: 82259 - DNA, 1060 bp, Homo sapiens
cggccgggtccagtggccctgggcagccaggctctggagtccctgctgttgacttccattctgttaacacctgagggagacaaactcggctgccggcccacctcatacctaagtgcataaagctggtagttttgatcaattgcagccaggctgtacaggcacaggtaaatagatatgtgagagaaacatcatcagacgattaaatgacaagttctgaagaggaattttctagatctctagatcaggacctggaacaaagctgtagggaaaacccctttctatgtcaccttccttccttattctgtgctctcagggctgggcagcctgaattcatagtcctttggttgggctgtttgccagttatcaggttgccaggtgtgagccagatgtacctggggaatgggggtacagtcacccccagttgagaacccctgccttagagaatgtgtaataaatgcttgctgaagaaacagactgggtatctttcaagttcttcctttttctccgggcactgtcagtgggcacaagagggacataggtgggacactcctgcctcccctggacgctcttcctgacacagccgctgggcatctccgagcacacagaggccccatgcctacacactcctggggccctgcatcactggctttaggcctgggcctaggagctcttgtctttcttggagggtgtgggtgaagctgagctctggcttcaggaacagataagccatcttaattacagaacgagcatatgggacagcctcagctttgtagagaatttcttgcccaggcaacattttccttactttcagtaagtaaaatccacggaacgtcttttcttggtgagaagtagatggcctggcctcaggtacagcctgcttttggactcattgtgttggtgtgactcctgtctttgcttcctttccctctctctccagaaaggacctaagtgtgaaataccccgaagacgtccccatcacccttccaaacctgttgaggttcattttgcatcactcagaccctgcttccagcccccagaatgtggctaactctcctaccaa

SEQ ID NO: 82260 - DNA, 1033 bp, Homo sapiens
ttccattccaaagccataaagctttggtttaccaacatccttacattaaaagagaagtggacagtcttcttatgttcgatatttagaaacgacaagggtaagggcctgcagcaagtgcccagcatggggccggagaaatgcgcacatcttcacgtttcccacaccaggcagcctaagaacgaaggtcactcagcccagacgcaggcctccagatgacgccccaccctgccacctgttccgcctgtgtctctctacacagatgcatttctgccagctgctgagaacttcttcattaaaaggcatgtgctgggtgctaagattttcatattttttcaaactatgcttggaattcaaaaattatacgtcattaaactacatgcccaactcctggcccacacagatgaaagtgttagtgttactgtccgtgattcctggactatgtggtaatttaaacacttcttagaaagaaaaagcctcatcacaactcagtcagcagtagaaaagggtgagtcacattctgtttttagtgcatgatgtgacaagaccctactaccacagaagtactcccgcaaaaattctttgagatacaaagcaaaaaccaagggaatgattcaatagatatgaaggaaacactctcctagagaaacatgacaagctgaatcgcaaaagggaggcaggaaattaaaacagcaaacgtcatacatgcgagccagggaactccctaaatgatgctgcagacactttcccctggagagaagatactgtcaaagtcatgtgagtgggtccccaaaaggactcaactttctaaaaaccaaagggaatctataaaaagggagcaaacatccagtgtattaggctctaaaggaccaagagttaatttctttttccactaaaacatctgcatctacgtttactaactggaagtccgctcccccttgttaatgtcctgcttgcaggggcttccggggtagttgccgttaagaactgcacctggaatactgattaggcaagtgtgaaaaaatcaagcgaccat

SEQ ID NO: 82261 - DNA, 1073 bp, Homo sapiens
acataaagagggtataattttccatcttcagaggggcttgatgtattttgctcaatgatttcctttcttttcccagagctattcagggattaaaatacttggctagatcctgtcaggtgaggagtgaatgactcctcaggtgtcagtgcggcattttctgcaagttcatttttactttcaggacatcacattgccactcagtggaaagcgtccacgtagtagaatgttgtatgtcttggaagtatcagcgcccagctcacacctggtagtacattcatcgagaagggactagcccaatgtggggtgtaaaaaatgcaccaggttcttgaagttatctgagaaggttctttcaagttggtgtttcttgggctgatcatctgccatttctgttctttccctttaccaggattgacgtgtctcagaatgaccttccttgggaatttatggtcgatcgtcttcctactgtcttgttttttccctgcaacaggtaatgccaaatttttgtcactggtgggcagttgggattcttttgtggaggtctgaaaatgaaatgggtttaagatgtaaatcattcattatgttcaaaaaatgttcccttaggaaccaggcgtggtggctcatgcctgtaatcccagcactttgggaggctgaggcaggcagattgcttgagctcaagaggttgagaccagcctggccgacatggtgaaaccccatcagtacaaaaaatacaaaaattagccaggcatggtgacatatgcttgtaatcccagctactctgaggctgaggcacgagaatctcttgaacctgggatgcggaggttgcagtgagccaagatcacaccactgcactccaacctgggtgacagagcgaggctctgcctcaaaaaaaaaaaaaaaaaaaaagtgtccttagggacataaaagggttgtagtgtcaggatgttatgtgtggtatggatcttttaaaggttgtttttcccagtctatctcttacccgagcttgaatgtggccgtgagaattcttagctttcatggcctgtatgaacatatggaggacgcagagactgacagga

SEQ ID NO: 82262 - DNA, 1066 bp, Homo sapiens
gttttgggggaggtggggggttaaatgtgaacagttttcctcacccaaaactgcttactaccccatctaaagactctgtatttgagccttcttttcccaaaaaatatttttaaaaattttgtttactcaaaagcgcacatacagtacccatggaatcacaataccagaatgtggatatctattggtctttccttttaatttcacaaatgagataaaccagggctggtggagagatctgcttgggatcccaggacccactggcattgcctggggcaactgtcccatggtattccacggggccatcctggcaaccaggtcagtgctctccccacagaactgcactcagccacctacgaatctagtcagggctaaacatcaacatcatggaaggaacactcagaattcatgaggaaaagttcagtttcaaagaggctttgctcatggcttcaacctgacaattaaattcagccaagtcctaccaaaggttaatggaaaatgggcagaccctcacacaccatatggctaagctgcaaataagagtgaaaatgggcatacagcccaaagcgctgcagaagaggcctgcttaccttgccacagtgaatgtgtccatgggcaggttccgagctagctggatgaagatgtgattgagggatggacagaagccgcaccacggagcgtaatagagcaggagaacgtcctgtgggaaagggaagacagatgttacttgcaccgggaaatgggctcttcttcatttctttcctcattgcttagaatccagcaagcacccgaaaaatgctacctatgcaaatattacagtgaaaattttcatctttaggtctttccaatactgtgctttctggagcacttttctgaaatttaaaaaccacatgtaattcattcacggtccataattgggccatcacgtggttactcttctatacatcaaaaacagctgctcaccccaacaactgtagtttggaaattattttaagagggacagatggcttaacttttgcctctcatgactccatacctgtttttgaaggactacttcccaaaaggtatc

SEQ ID NO: 82263 - DNA, 1032 bp, Homo sapiens
ttgcagcactgtactccagcctgggcaacagagtgagaccctgtctctttaaaaaaaaaaaaaaaagtgaaattcaaattagtattgtttcagatgaagcaaaggactctgaagatggcagaatttgtggtaaaactgttggttcaaatcaggtttttgattattatgggttttatgtatttttccactacatataattttttcttaacctttaaaaaaagaaacttaaagaaccttaataaaggaaacaaaaaactgtagctccttgtcctcaaattaatgagcatttaaacacattccacactactgtagcttgtgcagttgtcacatttgtggttaagcttaaaggtcttagtattatagggtgaaatttcttgaaaagatggtggcttgttgatgatttatacagtctcacttggtgtctatttgtggaccagtccttttaaaaaaagaatagtctatgaatattagagcatctaacattgcatagtgttttgttatccacattactgtctgctgagttaatactaccagagctaaacctgatgccacccgggcagctttgtttggggttttgctgataggtgaaatgttaaaaatgtgagcctatgaagtcatttgagtttttaaaatgtggagtttaaaagtaggccagctattctctttgtatctagaggagagttgatctcattttctctttatttttagagtcttttattcaaaacttcagcgttctctatagtcccttgaaaaggcatctcattggaagtggctctgcccagttcccgtctcagcatttaatcactgaagtgacaactgataccttttgggaagtagtccttcaaaaacaggtatggagtcatgagaggcaaaagttaagccatctgtccctcttaaaataatttccaaactacagttgttggggtgagcagctgtttttgatgtatagaagagtaaccacgtgatggcccaattatggaccgtgaatgaattacatgtggtttttaaatttcagaaaagtgctccagaaag

SEQ ID NO: 82264 - DNA, 1032 bp, Homo sapiens
gtgagaattcaaaagccacgttagttcagcctcattggaaacgggagggagggtcagtgtatgccgaatggagaaaggaggaatttggtagggaaggaaacctttcatttcaagttttaaagtatgaactcaacagtagactcagagcttctacatatgagtctttttagccatcctctttcaaatctaggtgaagcttgtttcttacattagacacatttgtgaaaaggctttatgtaaatattgatttttctatatcaagttacatattataaatccaagagttcctcactgtgtaaaagaaccctgtgaccagtcactttttgaagggcataaatctgtcgatattatagattactcccaattcatgttatctaaagtcattttgatgtgttgagctttcttaaaatgaaacaagcattttttttttaaatgggaaagagactccagagaaatggggtcagtgttcctacaagcatgtatttttgaggtagtctgtattagattttcctgaattccattcagtaatgctcaagtgtttaatgacctcataatgtgttcactttgaatttaagggtaattgaaagaagccttctttagatttctttccatcttctgtatcttctctgaaatgtttagcctagctgttctttgtcctgcagttagtgacagaattcttagggagcttgtaaaaaacacctactgtgtgtcattgttggtttagagacttaactcataaatcagctgtctctaggctagtttcagaatttaggctttattcagattaggaaataattcttggtttcatgtttcaaaaacatagccaactaagtgtttctcagatgctgatcatgaattctctttagtattcacatgacattcttcacttcctcttccattctgcacgctgcattgcccattgcacctcaaaatggagggagttagaagaaagaaaaagaactgaaactttagctgagtgcaatggtggacgcctgtagtcccagctactctggaggctgaggtaggaggatc

SEQ ID NO: 82265 - DNA, 1045 bp, Homo sapiens
acagctaggctaaacatttcagagaagatacagaagatggaaagaaatctaaagaaggcttctttcaattacccttaaattcaaagtgaacacattatgaggtcattaaacacttgagcattactgaatggaattcaggaaaatctaatacagactacctcaaaaatacatgcttgtaggaacactgaccccatttctctggagtctctttcccatttaaaaaaaaaatgcttgtttcattttaagaaagctcaacacatcaaaatgactttagataacatgaattgggagtaatctataatatcgacagatttatgcccttcaaaaagtgactggtcacagggttcttttacacagtgaggaactcttggatttataatatgtaacttgatatagaaaaatcaatatttacataaagccttttcacaaatgtgtctaatgtaagaaacaagcttcacctagatttgaaagaggatggctaaaaagactcatatgtagaagctctgagtctactgttgagttcatactttaaaacttgaaatgaaaggtttccttccctaccaaattcctcctttctccattcggcatacactgaccctccctcccgtttccaatgaggctgaactaacgtggcttttgaattctcacttcattgtgtgtagtcaagggcatcagcaaattcctgggaacaggccagggtgggtcagcccaatgttgctgccaagtcccaggggcaagctctgggtgctttctcatcatggagccttactcctcaaaaagtgggttttgctggtttgcgactgacacttatttatttgcactttacacttgttacagtgtaggtaccccaggtcccagcaatattactcagtacattatgaaacagcagcagaacaaattaggtctggtggccttgatccttagacatttaagcctatgagacaaaaagggaggcaaggcggctctacttccttcttcactgctctctttttttggagacggagtcttgctctgtcgcccaggctggagtgcaggggcgcgatct

SEQ ID NO: 82266 - DNA, 1429 bp, Homo sapiens
atttaaatcttcgttttgaggagttttaaatatctcatttttcagaaccctctgaagcacccctttggtagttctgtttgaagccagtgatttaaattgttagaatttcaaaaataattttatgttcacatacattggttgtttatagcaaaacaaagcaaaaaatctaggtgtctctttcatttattcgtacacgtaaaatatgatccgtggccttgtgcaagtttaggtcatttttgattgctgaagacatgtgttgagttcctgctgtgtgcctggtgttcgtctaggcccggaggatacaggtgagcagaacagacagcctgtgccgcacggaggctccatgctgcccttgggggcagcatttgaaggaccaaggtcaaaatctaaatgatccttgactctgtagtttctgttcccttagatatgtcttggtccttttatgaatacccagtgacgtttaatacctgtccttggacagggtgatagaggttgttatcgccaccagctggcagggagaattatttgttgataggtgggtctgtctcaaggcagaaagatgaatcacacgatatggaagtcacctcctgcaaccacttttgttttttcaaccacttgtgaggaaatgctgtctctggagaagcgggtgttagctgcacagtggggccaggccccgctccacgcctgggttttctcacccttagtggtggggttggaacagcactgatgtgccttgagcttgccccacctcacgagctctcctttatcctctgtgcctttgtccttcacaggtcttccccagggaggtcctgaactacacagctgagaacatctgtaagtgggccttagaaaaccaggagacgctctttcggtggctgcggccacacggaggcaagagtctcctgctgaataacgagctgaagaaaggaccagcgctgtttctgttcataccttttaatcccctggccgaaagtcatcctttaatagacgaggtaagagctgtgatgtgaaaagcacctcatgaggagtaggaaagcctcatctacctggctcctctcatcccacactcagtcatttactctggcagctaatggctgccacgaggggcagctgtggctctgagcattgctctttgcccctccatatgggcaggagagagcccgtgtctaggacagggactgccgcagcctctctggccatatttattgacagctgttggtgtctggagtgagtgggaagaggcagggaagccacaccgtgcccttctagagaaggaccaaatgccctcttctgatgtggctgctgttgagcttcctgtttagggggtgaaacagggagtggcaggaacacaggccgagtttagtgtggcctaggagatgccattgtcttgggggtttggccagactgccagccctggccatcctcagga

SEQ ID NO: 82267 - DNA, 1059 bp, Homo sapiens
taaaatctatggacactctctagaaaagcgcatatgattttatatatggatggagagttcttacagccccaccctagagcccaggctccaggttaagaacccatgcattagagggctcttgaaattaatgtatagaaattctttatttgtattcttagattttggtacagactttaaagtttttcttcttggataaaattgcagagttactctcttgaagaattgttactctgagcccgtgttttcagaagctaggcttccactgagtgatgttctgtgtttatctgtttcttttatgatgagtagtaatgtgacatgcttttctccttagctgatgtaatggatttttgaagttcttgtcaagtcacagtgagaagttgatggcttctcatcccagagagcgtcagttttccattgtcgcctttgttccccgatttcatttgctttctgtggagcagcctgaactcagctgcttctgagcattgacctgtgtcctgctcagtcctatgcgtctactctgttgctgcttcctaagtcacatcactgagttgactttcctgaagtattctgtctctctcgcatcactgtcagtaacttacaggtcatatacagatcaatttccctgcacccagtgtacccagcctttaaaacctgcgccccccttggcacaatgtctaagtcttgtgccttcggaggggctgttgggcccactccaggggtgcccccttgcttgccagtcgccctggcttctgcatatctctcgtagcccagatgctgtgctttacttcttgcagtttatattccaaaagtcaaatgtatttttgtgttttccgaatggaaatgtttgagtgtagtttgagtatggtttttcaaactcccatcgtcccaccttgacaatcactgctgtggttgtttctctgctgcccacctacgctccttgtgcctctgcctaagctgctttgacatcatctgcttttgctatctgtcattttcctacatccttcatttttagcatgttacacagcctacatatatttatttatagtaaagggtactgag

SEQ ID NO: 82268 - DNA, 1028 bp, Homo sapiens
caggtgaagattaaccctgatttccagcaaagtgtgaaggtatgtttggagtcaatgagagagagagattcaagaagaaacttaagaaaggttaaaagaaaattattgccattgcttgtctggagttgttaaaagcgattgaggacataacttactgataaagttttgagcctgggagaattgtactgtcaacaaacagggtgtggaaagacctactcatggggacagaaggaaatttcagctttgaatgtccctgaatgaccactgtacaatcctgtcaaagctactgcaactccatcccttaccctgtttgttgtttaaatggaggggatgttcaaccccaacctgaaatttttatcatgtgcttaggctttttgaaaaaatgaaaggcaacaagatgcattaattgtcaaattgtaatatgtcttgctttaaaatatcctccattacactgtggctgacagtgcctcagttacctaattctgctctttttcctgcagcctggagtactcgggtactttgagttcagtggctcaccccagcctcctggttatttgaccttcttcacctcagcattacattcattaaagaaaggtaaaaaatgattcatattaagacattgttacttcagtagaattgttacttacatcttttccatgtgttattatgaatatatattctaatttgcttgattccttttctcaacgtatttttatttattttatttttttttagatggagtctcgccctgccgcccaggctggagtgcagtggcgtgatcttggctcactggaatctgcctcccgggttcaagcgattctcctgcctcagcctcctgagtagctggagttacataggtgcctgccgccatgcctggctaatttttgtatttttagtagatatggggttttgccacgttggccaggctggtctcgaactcctgacgtcaggtgatccacctgcctcagttcccaaagtgctgggattacaggcatgagccactgcgcccagccgtcagtgtattttta

SEQ ID NO: 82269 - DNA, 1034 bp, Homo sapiens
gcccgcctgcgttgaattgtatagttaaatcctggaatcccttagcatgtggtcaatttccagggttgtctctctgttttgtttttaaaagaactactgtgggaattaatttttttttcagagataagagtaaatgttccttgtttggcaattcagtttgcagttgaattcaagatcatagaagggtaggggctgcttgtgcctctcctcacccaaaatgcttgttcttaattctctggtcacctcctgagcaaagcaggctactgatctgtgacttggttggatcccaaagcaagacactttcattttgtggtggtgatgattttagttatacattacaggcttaatgcatggtgtattatttttattatttttatttttatttttattttttggtactagttttggaccaatcgaatacaaaggccccatgagtgctgtttacattgagaagtttgtccgccgggtgatgaaaccacttctctacatcccatctcaatcagaattactagattttctctcaaactacgaggtacttgtctttcatatctcctcctccatactcaaggcctttcacggggttgtattggattgtttgttttaaaggggtttaaaaaaatacctcctgaattgcagcaagtaaaaggtcatgtgatagatcagccccagttaaatgctttttgagatactgattataaggatggtttgtccaagagagttttaagagaatagagtactagcaaagtctttgtttttcgttagggaattttcaacagattttcatcttgccttacagttaacttagagtagatgagaattaacttacaatttatgtgcaactgcaaatttctaagaatattacttgacacttctcatagcattgtactatgagatacctggtttctcttgtcagttgtagtttggtttttttgaaaactggaaatatgttcccttccatattatgaagtatataactatttgaaggtcttaattgcagaaagttttctaactttcctgatgtagcttctttcctg

SEQ ID NO: 82270 - DNA, 1097 bp, Homo sapiens
ggccccatgccaattctcaaccactttgcaaggcgatgctgtcagccctgtttttctgaagcaggactgcaggcataaggggtgaagcagtttgtttaccatcacgtagtggtgggggttgtagtgcaatccagggactgctgctttttttaaaaaaaaaatttcagctccttccaaattgagagcttactattccatgtactcagtagggaaaaaagtgggtttatttttggaaacacacagaaatcttttgaactgtattgcatggtaagattggtaaacacggtccaagtcctgcctggacatcatagataagagtatgtctttcttttttgttttagtgataaattatgacctttgaaaactcaaaacagtttttttcatagtttctgtttcagtgagagaggaatcattctatttttaaatttcatcttttaaatcttggtaacttttcagttgttattcatagtcatttgaaaaccttttttggctctgcaggtgttgtttgtggcaattaactgttggtggaaccaggggaaatgcagaaaacagaaacacttcttttattttcctgtaatatatctgtatcatcggaggtaagaactttttaaatagcgtctctcattccagtttagtttgccagtttataaatgaattttgcattttttctatattaaagtattagatattcactatagaaaattcagataatacagataagcaaaaattaaaaaagaaagatctggataatccacccccctttttaaagctaaacatgggatcaggcagtaatactatttcctaaactgcttttctcacttttttgagcatcttttcatgtcattacacattttacagcattgtttttaaaagtacgaattactccaatgcatttcagatatcgtaagagtgttttgtaaaaatacacaaaatttcttatcgtttcatctggaggcatagcagagtccagagtgtatcttaccatctattctattgggaagaaaattactacaagtacacagtcccatgtccacaattcttttttttttttgagacggagtctcactctgttgcccaggctggagtgcagtggcgcg

SEQ ID NO: 82271 - DNA, 1057 bp, Homo sapiens
cagtagagacagggtttcaccatgttggccaggctggtcttgaactcctgacctcaggagatttgcctgcctcggcctcccaaagtgctggaattacaggctgagtcaccacgcctggtctcctttactttctttggggttaatctcatcgcgttttaggtttccatgtttatgttctctatttatctcgtttagatagtgcataattgggtctcatttgtttcttagcaaagctgccctaatggtttgtggtatgtgagtgtagatgcatggacagctcagggtgtttactagggcccttctacttggtgggatgcagcctgggcctagatctttaggtcttgatggggaaagttacttctgaccacttgtttgttcagcgttcttttctttttcctcctgatctgtttcttgtgggaagctcaagtgttcaaaaagcccattttccagttaaataggctgttgctttgttacttatcttcattagtcttaggattatgatatatatctggaggaatgtatattattgtttaattgttactgttacctgaatgccctggataagtacaagccaactccagctaataagcttaatgttttctcaaagttgagttgattgtaagcatctcccgtggaaatcttgttaatggtagtttacatgctccctcaccgtaattctgagcttgcatgctggtggctctaaagccctggagataagtggcttttgtggagagccaggctgcagaaaaaggaggatgaagtctttgggatgtggggagcaggaatatggattattcagagacatccttctctgctctccactgcccttccagcctacacctaggggacagaatctcagagaattgtttccaacgtattattcatgtcttgcatttgctcagccagatgttgcctttctagggcagtgattttgggactccattttcttattcaaaagaggattttccttttaagcttcattctacttccacagagctatttttagaagaagataaactaagcaatcttttctgtgtttgctcttttttagtcgagc

SEQ ID NO: 82272 - DNA, 1092 bp, Homo sapiens
atatggaaaaggttgatttgaggttgagccacagtgaataatcgtgcgtttctgggcatctaatctttacttacctgtgtctcttcatcctgctcacctttcttttaccttgatttagagggaaaaaaaattgtctgtgtgtagatacatatgtatgtatacatgtatttattttgctttattccattttgtaatttcaaagctgcctcgaatggtctttgcaaggaagtgatgtagggtgtgaatttcataggaaaattggggtttcaacaggccttttttctatgttgccccggctggagtgcagtggctattcacaggtgcaattatggcatgctgcagcctcaaactgctgggctcaagtaattctcctgccttagcctcctgagtatagtagctgggactataggcacatgctactggctcagcaacaacaggccttcttatttgcaaccaactcgagttttttgtacccgagacatacccctcatagctgcaggaaatctttgctctatgtatagtttctctaaagcgtgaagcagattgatgagttaaatagaaactcaccagtgtttctgatggagtagaggcgagcgtttcttctccctggccaatatttgatttttgattggccttgtactttatctggctcatttaggaatgcttctgaatatgcagagcaaaattactgagttgctctttatcctttcgttgactgtcagacctacatttttcctcagattgcattatttgatgcttacattgcattttttttttcttttgagatggagttttgctcttttttcccaggctggagtgcaatggcgtgatcttggctcactgcaaactccgcctcccgtgttcaagcgattctcctgcctcagcctcccaagtggctgggattacaggtgtgcaccaccatgcccagctaattttgtatttttagtagaaatggggtttcccggtgttggtcaggctggtcttaaactcctgacctcatgtgatccacccgcctctgtctcccaaagtgctgggattacaggcgtgagccacgactcttggccatgtgcagtttgaatggtagaaaagtaa

SEQ ID NO: 82273 - DNA, 1179 bp, Homo sapiens
catggaaatgccgaacttcatgaatgggaagaaagaagagatgccctaaagatgaagctcaacaaagcacgaaaagatcacttaattggcccaaatgataatgactttggaaaatatagttttttgtttaaagatttaaactaatatgctggcttttatgtatgatacctaatcagagcattgaccagaaaaattgaaagtgttctgaggcacatagcagaggagctgcagatttcctgcttgtattggcgtatatcgttcctcctgagcagcaacccacagtaggtaggaaaatgggctgtttcacaggcctggccacgctctcacggaaccactggcatcagatggtgaagtgactgctacccggttgccatctgttgaacagacttttggatgaagtgtgttggggaagaggataaggttatatctaggacaactctttgagttggtccttcatataagaatcgtgacggtaagagaataaacacttgtactgggatcagaatacatgatggatgaaattctttacatgttttagcagaatgaatttgtttaatataataaagtttgctacttatctgtatgtaggttgctaaaaaggattttcttaactcagattttaagccaaataaccatttaacactagtatttgttaaatggggtatttttctgtatttgtatgtttcactataataagggaattaaggataatgtgcattgagaatattttgaaaaataattgactcaaattttatttcttggtcttttgctgtttaaatgatgattttgaaagattaaacctgtactgttggtattgtgttagtgtatggaccaatactgcctgtaataaagattttatatatagatgcctttcattttttcctgtggtcctttcccacaaagaattgttgaaactgggtacaaaaatcaagatggttttttcaaaaacattttcatttaggcagtgactgacagaatgcaaattgggacatgaaagcagcttttgacttcgtcctcctctcctccgaatttgggctccgggactcttactgatcggctcttctaggtagctcttcctggggctcctgtgtttcattcaaatgagctacatgagcagggagaaaaaatggtcagctggtaagacttgggctggaataccaccaagacggctgtttggca

SEQ ID NO: 82274 - DNA, 1017 bp, Homo sapiens
agttaaatttctgaaatgttttgggcactgttcagtaccctttggagtagcctgcagtttctttactgctttcaagtgctgatgtggaggaatcattagtgttgggcagggaaacaggagctgtcagactgagagggccagggatgttcattgtggagattaaatgttctgagtaagtgagtttgtagacattttcttgtaagaaaatgttccatgctttactctgttttggacattttcttttgaaaaattttgagatagaaaccttaatatcatttcatatatttagagcatatagttaatttgagtagagtcaaattaatcttactttagaatttgattactaagtattagcatggataataatgcttcttttgcttaaatgtaaaaattaggccgttttactaggtgtactttgtcttaatcatattcctatttttttatacagctgtgcaaccatattgcttctgggaaaaaatgtcaatatgttggaaactgttcctttgctcatagtcctgaggaaagagaagtttggacttacatgaaggagaatgggagtaagttaatcttttagctgtgtccttgagctagcttgcctgaaagttcttttcctctctataaatatgccagcttcctgtgaacacagaaagcagtttgcattctaaacggttgccccgtttcatcagtagctctgttggcgatgatgcctggaaaatgtgggcacagcctcagtggggtagaatgtggcgtctgatctgtgtttggttaggtcagatttggatataaatatataggtctgcatgcatccttacatgtaatagatgtattcctaaaaaatggcctggggaagttcagtactcccttgactgtttaaatcagatcatctgctcgtattggaaatagtttgccctctgaattaaccaggttagaattggcagtttcttcagggaggcattactaatcaaacaggctcagaatcagaggtccaaggaaagaatgtttattttggtcaaattc

SEQ ID NO: 82275 - DNA, 1058 bp, Homo sapiens
tagtcatcaatttcaaagatgagtttcataaattaaagtttggcatctatcatctacttttatgatattctcttacatttggggggagaattggagatttagttatcagatataatggtcaaatcaagtcagataaaaatgggaaattgtatactattgtgaaaaaaatgcatcttgatttagtattttgtcatcagaaaactggttttctgttaaaaaaattaaaacgaatcttttaattgtttaaggtacttggtaatcaaataatgcctggatttcttaatatgaagataaagtttgtgtgcgcccagtgtctgagaaacggtcaagtcattgaaccagacaaaaacagaaaatattgtagtgcaaaagcaaggcattcgtaagtattgtgtgtggaaacaattcctattttgtaattttctgtttcgtaggtataaaattatacacataagcaaaaagtttaaggctttgaagagaggagagaaaaatagataatttaggataattacagacacaagggaagagatttttaggacctagtagataagaattcacaagtagtgtttttttcctgtattttatcaatttgtttagagtttgtagggagtgtttgtaaatgacaataggaagtgaaaatacagaatcataaggtatttcttttagaagcattgagaaaaaaattctctggttcctcaggtacaaactttgtgcctctccctttgtgttatgtcttttgctcgtgtgtctttgtttttttctgaactccatttttcttaggtggaccaaagaccggcgtgcgatgagagtgatgtctattgaacgtaagaagtggatgaacatccgtcctctccccacaaagaaacaaatgcctttacagtttgatgtacatacgtaatttttaagccactttttttaaattaggcatttcaaatcattagaaaatagtagtaattcagattgaaactcaagccctttaaataatattcgtcagtaataatgctatttaaatggttcctctttggttttccttccctttagtatatgtatggttccat

SEQ ID NO: 82276 - DNA, 1099 bp, Homo sapiens
gaattttcttggtgtttttagtagttgcagttggtgggccctgccttagcttatttttctggaagtaggtttttatttaaatttgtttgactatgcccttggtttctagaggaaagcagagactctagagccctctttgggtgtcaaccttgagcaagaaaatttctagaaactgggacgggagaatagcgtgggaggccatagccagtaagctactaagccctgatgttcttattacgtgatcagaatgaaaaggtctgttgaagtttttttattattttagatctgtccacctcaacttctagagagggaacaccgcttaacaacagtaattcttcccttttacttgtaagtgccacttcctcttttgtaaatacatcgcttgaattgaaaatagttacttaagtaaccgagttatttgaatgaacatgacagtctcccttaaattttgtgtgtgctgcaggaaattgtgttaaagtaagacttctggaacatctagtaataacggctctgtgtttaagacttgatctgtcatagcaaattaatcggtattgcagacaatgtaagaggctttagcacagcataaacaaatcaaggaaatataagatcggggcatgtaaagcgtgtgtacttttgcagtagaacttattacttataatatggaggatcaaaaaagtcggggggtgactagaaaccaaaagagagaaaaatgtagaaagagacagtttttaagatagaagagcattaaggatggagtagtactgacctcagtttatgaagattatcttatttttcagatgaattcagttcctttcttcagtgataatgcaatatttgttggctgttttttttttttttcttcttatttttcttgcagatgaatggaccaggtagtttgtttgcttcagagaatttcctgggaatttcaagtcagcctagaaatgactttggaaacttttttggaagtgcagttaccaaaccatcttcatcagtgactccaagacatcccctcgaaggaacccatgaattgagacaagcttgccagatctgttttgtaaaatcaggtcaggaccaaacaaacacgcagagagtattaaac

SEQ ID NO: 82277 - DNA, 1147 bp, Homo sapiens
attgggagttgaatttctgtggaaacctgcattgttctcttagggtgagttttttctttttttcttttttttttttttccaagacagagtctcgctctgtcacctaggctggagtgcagtggcgctatctcagctcactgcagcctccacctcccgggttcaagcagttctcttgcctcagcctcctgagtagctgggattacagatgcctgccaccatgcctggctaatttttgtatttttagtagagacagggtttcaccatgttggccaggctggtctcaaactcctgacctcgtgatctgcctgtctcggcctccccaggtgctgggattacaggcgtgagccactgtgcccggcctagggtgagttttactgattgttttatggcttagagtcctgaaaatattataacccattgtttggtttaatttctaggctttgaaccattctgtggaagatattgagccaggtatgttttcacatatcatcttaacaatttgaatagtgccagctttgtacctgatgtctttgtatgtgatgtattgtcaaataatatcgctgtgtggttatattcatattaatgtattaatatgaaagtgaaaatgatttccaatgctccctttgtgcctttggatgtgccagtgagtgactgaaaagtgttggatgttagtaagcaatcactgacacccactgtggccttgccactgtctgatagctgtgcccaaagagagatacaggcattttgtgaaagaaggataagttttcacacgtgactgtatctgtttggaattgctttactatactgtcaattttattatttttataattgccttcatattttcatctttgtatctctattattggggattaatggtattattatgtaagtacgatgaaagtgactgagtacatttccatctgtgttacagatttattaactccaaggcaagaagcagttcctgttgtctctttaccggcacccagtttttctcatgaagttggaagtgagctggcctcagttcctgttatgcccttaacttctattttgccactacaagtggaagagagcgctctgccatctgcagtgctggcaaatggaggaaagatgcccttcactatgccagaagcttttctagatgatggag

SEQ ID NO: 82278 - DNA, 1050 bp, Homo sapiens
acgtgtacacacacacacactacctagtgtgtatgggtgctataaagtaaaccactagaaacatttttcatcatggcctttttggaaggcaatttggaaatactgctcaaaagccttaaactattcattctctttgacttggggcttccacttggtttctctagcgggcacagaattggagatgtgaacaaatatttataaggtactttgctgcatttttcttaatagtgagaaattgaatttccccttgaaaaagcaagcaagattcaatccctagctgagatagcagtgacttgggctgcatctcacaatttcttagagcaatgctgctgttctgtcacattgtttcctgtgaagttttaggtataaaaattaaaatttacttataccatatcttgtttgataaaaggcttcaagtggtaactttcttttttttaggtatatttgcgtgctctcgtgagaaatctttttaatgaaggaaatgacgtttatcgggaacatgattggaacaactcgataagccagtacacggaagccttgaatatagctgattatgcaaaatctgaagaaattttaatccccaaagaaataattgaaaaactatatataaatcgtattgcctgctattctaatatggtgagttgtaatttttaaaatgatgtttctagagtgaaaagaattttttcaatgacttagtacattaataaaaagtcaatttcttaagtttttaagaaagtcatattacctgcttttggagtggcttgaggcttttaaaaattagctttggattggccgggcacggtggctcacgcctgtaatcccagcactttgggaggccaaggtgggtggatcatgaggttaggagtttgagaccagcctggccaatatggtgaaaccccgtctctactaaaaataaaaaaattaactgggcatggtggcgtgtgcatgtagtcccagctgcccgggaggctgaggcaggagaatcgcttgaacccaggaggcgaagcttgcagtgagccgagattgtgccactgcactccagcctgggcg

SEQ ID NO: 82279 - DNA, 1047 bp, Homo sapiens
gaggcttcggtgagctgagattgtgcctttgtgctccagcctgggacactgtctcaaaacaaacaaataaaaaaacaaaagttaatctcactgcttttctttttctctttttttagtgtggctatttggaaatttaaaatgacatatacgggccgggcggggtggctcaacgtctgtaatcccagcactttgggaggccgaggtgtgtggatcacctgaggtcaggaattccgagaccagcctggccaacatggagaaaccccgtctctagtaaaaatacaaaaatcagccaggcgtggtggcaggcgcctgtaatcccagctactggggaggctgaggcaggagaatcgtttgaaccgggaggcagaggttgcagtgagccgagattgtgccactgcactcctccctgggcaacagagcgagactccctctccacatacatgcgtacatacatacatacatacaatgacacgtatggcttattttgtgtaatatattttgtacaatatttcgactggacagcgcgcagctggggcatctgaatgggtggtggccctgagaagacatgtctatctgcttatctttcctgcttctctgatggcatgtggcctccttcccttaagctctcaaagaatccactgcctcttccttctcatactgagccaaactgttgaactgaattgcacaatgggtcttgtcctaatttgcagaataattcaagttaatggacagtattttccctgttgaaaaattttccctatctgctgtatgctggaggctacaaatagttgtatgaggtttgtctcaggatgagatcatgagttgttgaggctcaatattatcaatatttgtgcgtgtgtgtttgtgtgtgtgtgtttattctacaaagagcccgttgattttctgccatccaaacgaagtggagaattcctgcctttcttcatgttactgtgacttttcgttgggggttttacacagacctacaccctctttccttcccattccccagattctgtcagtttttgcaaataagaatggtggcttgtc

SEQ ID NO: 82280 - DNA, 1425 bp, Homo sapiens
gttttgccatgttggccaggctactcttgaactcctggcctcaagtaatccacctgcctcagccttccatagtgctgggattacaggcatgagccacctcacctatacctcattcttaatagtggaatacagcttatttctgtcatcatactgaggtgtaccttttgggggttaactaataaaaacagtaacttggccatgcgctgaaaaacagtaacttggccgggcacagtggctcacgcctgtaatcctagcactttgggaggccgaggcaggtggatcacctgaggtcaggagttcgagaccagcctggctaacatggtgaaaccctgtttctactaaaaatacaaaaaatgagccgggcgtggtggcacacacctataataccagctactcgggaggcagaggttgcagtgaactgagattgtgccattgcactctagcatgggcagcaagagcgaaactcagtctgaaaaataaataaatacaaataaaaacagtaactcctggagttagagtgtcaggttttgtggctttttctatattaaacttacttttttttttcttagattcaaaaacatgccacaggaaagaagtctccagcaaagagtcctaatcccagcacacctcgtgggaagaaaagaaaggctttgccagcatctgagaccccaaaagctgcagagtctgagaccccagggaaaagcccagagaagaagccaaaaatcaaagaagaggcagtgaaggaaaaaagtccttcgctggggaaaaaagatgcgagacagactccaaaaaagccagaggccaagtttttcaccactcctagtaaatctgtgagaaaagcttcccacacccccaaaaaatggcccaaaaaacccaaagtaccccagtcgacctaaagtcagtgattcaactggaaggaaacctcaatgctgcctccagagctttttggaaatactcagatcctggccgcctttgtaaccttctctaaacgtcaggcctggacttaaaagattttttaaaacctccataagtagtccaggggcggtggctcacgcctgtaatcccagcactttgggaggccgaggcaggcggatcacaaggtcaacgagatcgagaccatcctggccaacatggtgaaaccctgtctgtaccaaaaatacaaaaattaattgggcatggtggtggacacctgtaatcccagctactagggaggctgaggcaggagaattgcttgaacctgggaggcggaggttgcagtgagccactgcactccagcctgatgacagagcaagactcagtctcaaaaataaataaaaataataaaacctccataagtaatcctgacatatgttcctgggtataatctgtttctaaattgtccttctgtgtatttgctaatgtaatagagggaaaaatagagtgctt

SEQ ID NO: 82281 - DNA, 1007 bp, Homo sapiens
ctgagttaagttcctaccacatatttccggtcatagaaacatcaccatacttctaaataaagaccaaaacatttaaaatattaaacattgaaataaatgtgagctatatatacatttgaaacagtaataaaaggaattgacataattatttacccagttattcccatccacggttgtaggtggctggagtttaatcctgatagctcagggaaaagggtaacaggcaagagccaaccctagaaaaggcgctgtttcatcacaggacaaactcatacacctacattcgttgggactgggactgggataacttcaacacaccagttcacctaatgtgcacgtatttggatgtcggaggttatgctcacagatacctcctgagcttggtttgtaggttttcagtattactcgtactctagcaaaagaagctttcggaaggagagaaaatttaattttttgctatttgttagactgatctcctagtgtttctctctttagccatgttaattgtgtccaatgaatttttaattttgtttttgagacagagtttcactctgtcgcccaggctgaagtgcagtggcatgatctcagctcactacaaccccccgccttccaggttcaaatgattctctgtgcctcaccctcctgagtagttggaactacaggcacgtatcaccatgcccagctaatttttgtggttttaatagagatggggtttcaccatgtttaccaggctgatctcgaagtcctgacctcaagtgatcctcctgcctcagcctccctgagtgctgtgattacaggcgtgagccaccgcgcccagctgagtattattctttacactctaaaccatactgtgtttcacaaaagtctcttaactgtatactttagatagtcagattctgaaatgccggtatataatttactgcataaaatgcatgtttggctgtgagtcaaaaactgcggttgaggttccagtgctggttagggagtttgttctctgtatagatcga

SEQ ID NO: 82282 - DNA, 2066 bp, Homo sapiens
tttgtgatttacttgccattgaaagtgagttttgttttttgtttttgtgttttgagacggagtttgcctcttgttacccaggctggagtccagtggtgcgatcttggctcactgcaacctccaccttccgggttgaagcgattatcctgcctcagactctcaagtagctgggattacaggcacctaccaccgtgcctggctaattttttataattttagtagaaacagggtttcaccatgttggccaggctggtcttgaactcctgacctcaggtgatccatctgccttggcctccctaaagtgtgggattacaggcttgagccactactaccggccatgaaatgtatttttaagtgttgttcttggtgcattatttgcttaactagcatgactaaaagttatttaaataacactaagtttatcgcgtattctgtgtgatacaaacatgcataatgtgtgtaataatgctttcctcggtttcttttcacgtattttgtaggaccttgcctcatagtattcgatcagattcagaagatatctgtttatttacgaaggatgaacccaattcaactcctgaaaagacagaacagttttatagaaagcttttaaacaagcatggaattaaaaccgtttctcaggtaggaagcctggttaatattttcaagttatttagaggatttaattcaggcgaaatggtatcacaaatacattgctatatttcctagtatttttcttctacttttctctttttaatttaatttgtggtggcgtgtacatcagtagcttttatatcttgcaaattataaaagaggtggctcgtgtcattcctctgtacttccacagcatcttgtttttctctgatttgctgttttgtagttggtgtacttgtctttattaccctctggatctaaggtatctaagtttttttgtttgtttggagtctcgctctgtcgcccaggctggaattcaatggcaggacctcggctcactgcaacctccacctcccaggttcaagctattctcccacctcagcctaccgaatagctgggattacaggcacctgccatcatgcccggctaatttttatatttttatagagacgaggtttcaccatgttggccaggctggtcttgaattcctgagctcaggtgatccacccacctcggcctcccaaagggctagtattacaggcgtaagcacatacagcaacatatgtataataatatatatatgttgcccacctagatctaagttgctttagctggggtcttttctcatttgtctcagtgttcccagcatgtagcgtagtgcctggcacattttaggccctcaagtgttcattaaagtatagaggcatggctctaggacatttttaaatccaaatccaaattgttgcctaagtatttcttctccttgtttagattcctaacttcttgtttttattcttctctatacttcctagattatctccctccaaactctaaagaaggaatataaatcctatgaagccaagctccgccttctgagcagttttgatttcttccttactgatgccagaattaggcggctcttaccctcactcattgggagacatttctatcaaagaaagaagtaagtttcttagtaatgactggactttagcagcatgaagcttctaggtgtgtatgcattgtgttctgaatgcctgtgtgtttattttgtagagttccagtatctgtaaaccttctgtccaagaatttatcaagagagatcaatgactgtataggtggaacagtcttaaacatttctaaaagtggttcttgcaggtaggtaaaaggcattcatgtgtgcctcttttaatcttgtatttgacaatgattttatatatacttattcgttttgttttgttttttgtttttgttttttttttttgagatggagtcttactctgtctgccaggctggagtgcagtggcaccatctcgactcactgcaagctccgcctcctgggttcacgccattctcctgcctcagcctcccgagtagctgggactacaggcgcctgccaccacgcccggctaatttct

SEQ ID NO: 82283 - DNA, 1001 bp, Homo sapiens
agtaaatgctaaatgcattttgctttgcgtttttcctgggattactgctttcatcattgagggcaggaggggcacgtttccctctagcccaatctctttaagtagaagaggtgcccttctgcacacagtactggaagtgggtacttaggcatgtttgatggattcttagatttctgtgaatataaactgcaggatcctaatagatacggttatggaggttaccccttgaaatagaagttggaagggaaaaaatagaaggtgtgggagggggcaaatgctaaattagattgagaacatttcatttatttgtgtaagttattgtgaaaacatttcacttatttgtctaatttccactttgcaggttagaaaggcagtggacgctctcttgacgcattgcaagtccaggaaaaacaattatgggttgcttttgaatgagaatgaaagtttatttttaatggtggtattatggaaaattccaagtaaagaactgagggtcagattgtaagttgtgattttctacctttgctgtttttatctgtgtgtttattctttgtaactcgaacaattgcatcatggttactaatggaaactttgcaaacttataataaaaatctgacgtgaagtaaaacaactatgtccaaaagaaccatagaggcttgatgtggtggctcacacctgtaatcccagcactttgggaggccgaggtggacggatcacctgaggtcgggagttcaaaaccagcctggccaacatggtaaaaccctgtctctccaaaaatacaaaaattagccaggcatgatggcgggtgcctgtaatctcagctactcgggaggctgaggcaggagagtggcagtgagcggagatgtctccattgcactccagcctaggcgacagagcaagactctgtctcaaaaaaataaaaaataataaaaaataaaagaaccgtagaaattcagatgtgctaaaattttctagaaatttcaccagttttcttagagctt

SEQ ID NO: 82284 - DNA, 1050 bp, Homo sapiens
gtggcaggtcgggtggctccgggtggctcccgtgccttatatttcagggactcctcaccagcctggggttggcgtcgcctaaagtcaacgggcaggtgggcagtggagccaggattccgcgctctgcccatgccacgcgcggccttcccggaggcggggaccgtggagtgtggaggaccccactgggcctcctgacgggactcttctctcgcctcaaggcgctttcttgatttctatctagtaagagtgagaggacacccaagctactccccacagctcatggaaagctggagaaaagcggaagagcaggtgcctcctcaaagaagggattctgacagcagccactgccccggagagcgaaaccccacgctctcccggaaatgacgcacagaggctcggttcccgccccctcgcttccggggccgggcttgctcgcgcgtgcgcaccagaagccagcagtggggttgcacacgcgcctcttcacgaggtggaaacaagatggaggattcggcctcggcctcgctgtcttctgcagccgctactggaacctccacctcgactccagcggccccgacagcacggaagcagctggataaagaacaggtgagtggttcctggggagggtggcttggaagcagtgtggcggttacctcgtgaggcgcagggtgccggaacccgagtgcgtgctcggcggacttccccggggctgtgggacggtcgctggcgggccgtgtgcctcagctgtctctcccctttacacacgtgggtgggcgcctgctttccctggtcctgcggcctggcgctagtgaattgggttgcaagtgtgctgtggagctagatgagatagacctggcgacctggcttagcttccctatcattagcgcttgaccgaatcgcttagttttgcaggtctgttacccgttatttaaagtgggcccttcggctccccgttatccaggatcgggagaggtaatgagtgtaaagcgctttggcctggtacatggtaagaaggtgctcagtaggccgggcgcggtggctcacgcctgtaat

SEQ ID NO: 82285 - DNA, 1331 bp, Homo sapiens
ggagattaattaaaacctttatgttctccaatataagggaaaagcaggttggtactacttctgattaggcagaaaacaccaggattccttaagtgatccttgaaatggttattgttttctgccttgtcacatttgccactgtgccctttaaaacgatgtggaaacctcaggtttgtggacagcacaggtggaatgacatcttgtgcttcctgaggctcccctctaccaggcacattagcttagtgcttcagatgtcagcccaagtccttgttacctccttttcctgctgcccagggaagagtgtgtgtgctggagctggagcgcttgcactcttcaggtgactattctcacctccatttcctccacatgcattaggtgaaactgaggtctaagcctcctgcaaggtctacattttaaggactcacacatcaggctctcagaaatgtacacaggtattagttctgtttgttctaaaggaaatgtgggtatctctcaggccaggacttagtgactagttttcgctagacagcaggttaatacctagatctcatttaaaaaaaaaaaaaaaaaacaggattaaagggaactgatcaggtttgttgagttttttagcctaattccaaagcatggaagagtgctctaggtaggaaagaaagctttttcttacgatttgtagctacctactgtgcctgacttggtgcctgtgtgaggattaagcccttagtctgctcttgcaattattcaaatgacaaattaaatttgcttttgtaataacaataaaagttgtcatcttcccttttgaaggatttgtcgtttgtaattacctgtgttgtaacaagcaaaaaccatgcccttttttgtacaatccttttatttttgtatcaggtactggaaccatctaccaaaaggtttgttggatggatctaataagctctgtcacataagggattcacaaacgtcatctgcttgcatatggcatgcaagtcttttgtataatgtatacgacaaccttaggaaacaaaaataagaaccctataggaagttagggatgctgaataataaataactagatcacagttatgtggttttatgtgaacagtagagttgggggaaacgtcaattattattagaactatgaacctctacattcaggatttttaataaagatcaagagaccaaatagtgcttgcccttttcattcaatgtgcaagggcaagaagaagttaatgataaaggtaacatacacagtggctacttgaatgacagcagttcattcctgtgtactaagttcctgtttgaactgtctttaggtgaatcgctttgaggttttg

SEQ ID NO: 82286 - DNA, 4488 bp, Homo sapiens
ctgaagtcgcaccactgcactccagcctgggtgacagagtaagactctgtctttatgcagtggctcatgcctgtaatcccagcactttgggaggctgaggcgggtggatcacctgaggtcaggagttcaagaccagcctggccaacatggtgaaatcccgtctcaactaaaaatacaaaaattagctgggcgtggtggcaggcatctgtatctcagctactggggaggatgaggcaggagaattgtttggggggtacggggggagataggtttttgatacagggaaccatctctttaccagcccccccaaataagaccctcttattaagactacctaaatagaagtatcatgggtttggcagtaaagctagttaattagtaacttacattgtaaaaaatatttttgtgatttaaaataataagttttaatatcttatatagacttgctgttaactactgaaagatttttttaaaatttcatttctaggtaagaccattgcaattggaaaagttctgaaactggttccagagaaagactaagcattttcttgatgaccctgcacaatactgtgaggaaaattgactgcagaagcctacttcacaccgccttctcttattttctgcccattgataaacctctccccatattttgcaaagaggaaattcacagcaaaagtccacattatgtcagctttctcatattgagagctctgctatgccactgttgaatttttcccaagattcctgtccctagccctcacttcaaactctgcttccttggacagatttggcaatagctttgtaagtgatgtggacataattgcctacaataatgaaaacctacaggaatttttttatttttcattttccccttaggcatatttagtatttttcccccaggcagatcattctgagtgtgcgagtgtgtgtgcacatgttacaaaggcaactaccatgttaataaaatattcaatttgaaatccttttcggtatttgaattgcttttgaataatgttttttatctggatgtaacattgttgcattagctttttaactttcccaagtaattgaatacattttattacttggacttttataaactctttccctacccactataaatgagacattcacagcgttcaagtttgtattaaaggaaaggattagtttgaccccttcttttgatggttaatgcatacatgcagttaaatccctttatgcaaatgtgacactgctttactaggtcttttagttatttatttattttttttttttttgccaatttatattgtaacatgatttcttgaacacagtaagttgttttaaaataaaagaacagcatactgtagtttttataagtaaagcgtaatgaaattgtacccctagagaaaattccattaacttgttaaattagtggaattaacaacaaataaagcatgtttgagacctggcaaaaattcctctggtagtatttataaatagagctgcatgcctctagtatgaaaaccgtatcagttgcaagtgccacttctacaagttactcagtttactctttgtatcagtaactttaaaggttggatgatccttgctggttaaagctaaatctcaacctagcaactaaatgaaaatatttagaatcatcagaatctgaacagactaaaattatcagcgataagcagaatcaagcagggtataagttttatctcaattatttgaaattgactgagttttcttaagtgtaaagctgaaatttgctaaccatgtttttgatgaaccacagtgcagcattgtgtgggttttagattgaatgactctctgctataattatcatgactttgaaatttttcatgagaataaatgaggaatggaggcaatttgtgggtttatccaaagcccccttgatgttgagtgttgccattgatcaaagatagcctcttttagattgtgatttctctctaaataagatactttgtatatttaatgacaagtctcttccctataattttgctcctcagaaaagaaaagcctagacagactgtatttccagtcacagaacataaaacttaatctaatgggtgttttgttttgttttgagacagaggctcactctgtcacctaggctggagtgcagtggctcgatctcagctcactgcagcctccacctcccggattcaagcaatttcctgcctcagcctcttgagtagctgggattacaggagccctccacgaggcccagttaatttttgtatctttagtggagacgaggtttccccctattggtcaggctggtctcaaacttctgacctcaagtgatccactcgcctcagcctctcaaaagtgctgggattacaggcatgaggcgccgcacttggcctagtgttttcttaactgtgaaattcccattcatttcttgaatgaggctacatcttatggacagagcaaagttattgtcctacagattcttaaaactataattatggctattgcatgaaatttaaatagattttattatgtctgcaaatctctgggcttttatttttctggaaaatataggagctttaatcaaaacataatagttctttttgtaattccatgttaataaaaacaaatactagcaattgcttgaattttaatgaatatttaaaagttcaagagccacggaaatcacttccagagataagagttccctttctaaatagaacacatttttaaaaaataagttatgtttgctactaaaacatttacactgttagactattatgtgcatgttgccaagactcttaagtaacttggatatcaactgtgaagggcctacctctaaaaagtaacaggtcatacaaatacaaatgtaactgtaaaaattccactggattcttgcatatttgcaagattagattattcaaaagaaatttcagtgctaaaattaaccagcaacataagttctatgggctttgaaaattgttctcatctttttaaagttgatgcattttcaatcctgcttacacaggctgttcatttggataagtaaataaaatgtctaaggtgaacttggcattatgtggagatgttggaccgttatagagcaatacaaattcctatgctgtcattctgttttctgcaaatgcaaacgtgcttatatggtcaacagtgcaaaaatagggtagttggctgcatatttagggtattacctaagcatttgttctctaacgttgctctactagaatgatttttttcttgcatcttttcacattaatgatgttctttatataactttcatgcgattatttagttttttaaattaataaagtgaatttaagaaatattgaaataaacatctaagtaattgccattttaaacccttgtttcttactgtgggagagggggaaatacagcactcatttcttgtttttaatttgcagaagtaagtgaaaatctatgtaaaatcaaaccaaaagagttggactgagtgtgtattgtcttgagattaagtgacaaatagtaaagtgttactgagtaattaagcccatgtattttttttttgtgagttgaaaatctttgaaatatgtgataaccgaatgtcaaaagttcctaaactctaacagtgcaggttgttcactgtaacgaggtaactcatatttgctggttacataaactacaagtactgctctcacaatatgggactttgaactgtgatgtagttcaacagttgccggcatcctctcagctgatacgctgcgaatattttgggttagacttgcagccagatgcagttttgcaacccaagaaaaaagttgaacctatgatcaaaaactgctcccaagatgaacctggaaaaaaatcagctaagctcccttggcgatctgcaggaacactagtaatgactggaattactccgtgatctttgatgactattacacataacagcactctagcaccttttcttactggcatggacttcctcatggactgctacttcatggatgatagcttcattgctttgggtagggatttaaggtagtcaaggggaaaatacgcagttttattacaggtcttaacatcaggcaactttcaactttaaaaccctttgtgaaaaatgtggttatagcactatagctctgattttaggatggttaaatgttatattcattgttggcttaccttatcaaactgtgccattaatcctttcacagacataggtaaggaagagaacaaccagtggattcaggggacaattatctatctccaaataataggcttttatttcttgcagctaactttttcagtgattctagcagatgccatctagtacatccttgatcttgtttctttcgtgagagatctcgccatggcagcatcttgttaagtaagtgtaattgcacatgcacaaaagacttaactagctttacatttagcagtcagttggttagattaggtttcatagtaaatgaataggaatagaaagaataggaagtgtttttattttccagt

SEQ ID NO: 82287 - DNA, 1381 bp, Homo sapiens
gaaaacactaggccaagtgcggcgcctcatgcctgtaatcccagcacttttgagaggctgaggcgagtggatcacttgaggtcagaagtttgagaccagcctgaccaatagggggaaacctcgtctccactaaagatacaaaaattaactgggcctcgtggagggctcctgtaatcccagctactcaagaggctgaggcaggaaattgcttgaatccgggaggtggaggctgcagtgagctgagatcgagccactgcactccagcctaggtgacagagtgagcctctgtctcaaaacaaaacaaaacacccattagattaagttttatgttctgtgactggaaatacagtctgtctaggcttttcttttctgaggagcaaaattatagggaagagacttgtcattaaatatacaaagtatcttatttagagagaaatcacaatctaaaagaggctatctttgatcaatggcaacactcaacatcaagggggctttggataaacccacaaattgcctccattcctcatttattctcatgaaaaatttcaaagtcatgataattatagcagagagtcattcaatctaaaacccacacaatgctgcactgtggttcatcaaaaacatggttagcaaatttcagctttacacttaagaaaactcagtcaatttcaaataattgagataaaacttataccctgcttgattctgcttatcgctgataattttagtctgttcagattctgatgattctaaatattttcatttagttgctaggttgagatttagctttaaccagcaaggatcatccaacctttaaagttactgatacaaagagtaaactgagtaacttgtagaagtggcacttgcaactgatacggttttcatactagaggcatgcagctctatttataaatactaccagaggaatttttgccaggtctcaaacatgctttatttgttgttaattccactaatttaacaagttaatggaattttctctaggggtacaatttcattacgctttacttataaaaactacagtatgctgttcttttattttaaaacaacttactgtgttcaagaaatcatgttacaatataaattggcaaaaaaaaaaaaaataaataaataactaaaagacctagtaaagcagtgtcacatttgcataaagggatttaactgcatgtatgcattaaccatcaaaagaaggggtcaaactaatcctttcctttaatacaaacttgaacgctgtgaatgtctcatttatagtgggtagggaaagagtttataaaagtccaagtaataaaatgtattcaattacttgggaaagttaaaaagctaatgcaacaatgttacatccagataaaaaacattattcaaa

SEQ ID NO: 82288 - DNA, 1556 bp, Homo sapiens
tactttactggaccttggatattgagaaatggataaagctggataagtttacatctaggtagcttctgagcggtaaaaattagcttagttccttggggaatataaggaaagtcttcccagataagaaagttggcctgctgtcttttgttttgtttggagatggggtcttgctctgtcacccaggctggagtgcagtggcgcgatcttggctcactgcaacctccacctccgggattcaagcgattgtcctgcctcagcctcctgagtagctgggatttaggcgcccaccaccacgcctggctgattgttttgtatttttagtagagacagggtttcaccatgttgtccaggctggtcctgaactcctggcctcaggtgatccccccggcccccctgccgcctcggcctcccaaagtgctgagattacaggcgtgaaccactgcgcccagccagcctgccgtattttgaaagttgaccagggacttgccaagaagataaatacaggataagatactgaaattcatgctttgagttcaagcagcctgacccatcctgtgaacaaaattagtaagacaaacctatcacctctaacacaaaaatcacttaagttgatgtcctagtgagatggtaacactaattcttgggatttatatggcgcttgagaacattgaattcttatttaccctaaggctaaagataagaatgtgtgtgtttgtttgacagatagtgattatagagcacaaatccatcatctgcccaggctataatgcggtgctgcatattcatacctgtattgaggaggtggaaataacagtgagtttaagataattggtttatttctgttttaatactgttttatcttcataatttctaatcagcaacagtgatgcacttttatttctacacctgttcttaaagattattttatttggcattattctgattttctcatactcttttcttggttaggccttaatctgcttggtagacaaaaaatcaggagaaaaaagtaagacccgaccccgttttgtcaaacaagatcaagtatgcattgctcgcttaaggacagcaggaaccatctgccttgagacctttaaagacttccctcagatgggtcgtttcaccttaagagatgagggtaagagcttttaaactgacgtctagtagtatatccaggatacctagctttggtcatcttcatcatctcagtacagtacacattgcaacaggttcacagaaaacttcgattcacattcttattcgtatgagtgttttatgagttgaatgtattgaacagaattgaccacgtgctttagtagtaatgccaaatctagtaatgctctacgtgaagaatcttaattttgatgttttgtgagtagtggatttggagggctattttgtttactaagatatttctatgatgtaatcctttgtaatatgtctagcgattaaaaggaacatagagattgatttttttttttacacctaatttttcagaggtctaatctttgtgaccttttgtgtgcatccatttctgcctacctctgggtgacgca

SEQ ID NO: 82289 - DNA, 1145 bp, Homo sapiens
ccatttcattacaccaaaaggaaatgatgtattcattaaatagttgatagacttttaaagcttagttcaataatttttaagtagtgcataattccgatatttggagattgataggtaatagaagacaggtttattaaatccttcatagaattccataataataaaaattatatccataaaactgaaatccaaatattaaattgtgttttcgattttgaaaaggtaaaaaaaggcaaatgctagtgtatacagtgttctagttggaaatgattagaatgtgatatttaaaaggtgacacgttaatactttaattggcagttatacttctaggatatgatttttgctgatcatatctaggctaagattttatgtcatacaaacataagtgtttacagtcaaatcttgcaactctttattgagcagacagacattcagatcattttatgttgcgtaatgcagtgaatgtgtcagaaaacctccagtcttgttttcttttaaagcacaacgtggaagttcttggaatactttccgatgatgtagagactgataccgtagccccaggtgaaaacctcaaaatcagactgaaaggaattgaagaagaggagattcttccagggtttatactttgtgatcctaataatctttgtcattctggacgcacatttgatgcccaggtaaacaaattattgttgttgtcatagtgggttttaatgtctaaatgaaattagaatatcagtgccttttgtcctgattatttgtgacatgccagttaacccatcttagtgtagagaaggggaatggaaatattataagccacttatatatcataaccacaataggcacctcatacaaggtcttcaagctggtacaagtgcttactggataaggagtattctttgtaagttcctttttatgtttgatctcctgatgatacattctacagtatctaatattcactttgaccagagcacagttactgtggaagtcatggtttatgtgctcattgacagcacatagctttccagacaagaaatcacacaggtttccctgttattaacaatctaacctccctgggagaatgacagagtaagtgactggtgtgaataacagaattttttaaagttcttttctaaggtatgacaact

SEQ ID NO: 82290 - DNA, 1081 bp, Homo sapiens
caagctggagtcgagtggttcagtctcggctcactgtaacctctgcctcctgagttcaagcgattcttctgcttcagcctctggagtagctgggattacaggcattccaccgtgcctggcaattttttttttttttgtatttttagtagagatggggtttcgccatattggccaggctggtctccaactcctgacctcaggtggtccacccacctccacctcccaaagtgttgggattataggcttgagccaccacatccagcttgtgccattttctttttaaattataggcatactgaattattaatatgatcatacatatgcttatgacacaaattattatagagtatttgttactgagtttaagatgaacctaagccttctacttaagcaaatgattttcctttatgaataagcagtgtagaatttcactttgggctattgagctgttatacagcaccaagaagtctgaaactggattttattttacatttgatcaggatatgggcactgtggtcctgggaaagctggaatcaggatctatttgtaaaggccagcagcttgtgatgatgccaaacaaggtaagaatcggttatgctgtttcctatctatttattgattttttttctttttctttaagagatagggtcttcttctgtcaccgaggcaggagtacagtggcgcattcatagcttattgcagcctcaaactttcaagcaatcctgccacctgagcctcccaagtagctgggactataggcttgtgccactctgcctggctaattttttttttttttaaataaaaattgagatggggtctcactatgttgaccagactagtctctaactcctggcctcaaacaatcctcccatcttggcctcccaaagtgctaggattacgggcgtgagccatcatgcctggcctcctttgtgtcatttttgactgttcagttgctgagatttgcagataacctgaggcagggcttctctaacagctccaaagatgttgcttatgcaggaccacagacttgagtcatcagtaccttcagatggagattttgctagatttcagtgagaattta

SEQ ID NO: 82291 - DNA, 1027 bp, Homo sapiens
tgcccaggctggtgtcgaactcctgggctcaagagatgcacctgcctttcggcctcccaaagtgctgggattataggcatgagccactgcacgcagccaatactgtatgtttaaaggggaaattattttatagaatcttggtttcatagctggaaaagtccataaaaagtaatatagtcaatttattacatgtaggctatttgctataaaatatttctctaaattttaataagtttatgaggaagccttatactgagcagttttataatagttttctgtggaataagtgagatgaaatggataataaagtggttgaatgggaagaatacatgagtagaatgaaaatattattagaagctgtttatagtcatgtaacttaacattttgatatttatgttgacttcctttaatggctttgttgttatgttctcagtggattaccgtttattccatatctggataatttgccgaacttcaatagatcagttgatggaccaatcaggctgccaattgtggataagtacaaggtacccaaaatgttaaagaaattgggtttcctgggaggggaaatcattgttgtgcattttgtttctagttttgaaaactttttttcttttcttttctttcttgttttttttttgacagaatcttgcactctgtcccccaggctggagtgcagtggcgcgatctcagctcactgcaagctctgcctccttggttcaagtgattctcctgcctcagcctcctgagtagctaggactacaggctcccgccaccacgcccagctaattttttatatttttagtagagacggggtttcactgtgtcagccaggatggtctcgatctcctgaccttgtgatccacctgcctcggcctcccccaaggtgctgggattacaggcgtgagccaccgtacctggccttcttttttttttttttttttgagacggagtctcactctgtcacccaggctagagtgcagtggtgtgatgtcagctcactgcaacctctgcctcccaggttcaa

SEQ ID NO: 82292 - DNA, 2379 bp, Homo sapiens
cccaaagtgctgggattacaggcgtgagccactgcgcccagccctattctttcaatttctttgttttcttttgagacggagccttgctctgtcgcccaggctggagtgcaatggcacggtcttggctcgctgcaacctcctcctcccaggttcaagcgattctcctgcctcagtctcctaagtactacaggtgggctcctccacacccagctaatttttgtattttcggtagagacagggcttcaccatgttggtcaggctggtgtcgaacccctgaccttgtgatccgccgccttggcctcccaaagtgctcagattacagatgtgagccaccgcacccggctcaattttcatttcaccaatcttgttcgtgatttaggtgttgtgtgtcatccattatatctttaatggtgaagaatatcctaaaaactctgatgttcttaggaatattgttctttttttaaaaattatttcaggtacttgtcttgggccttagacacaaatcaggaagaacgagacaagggtaaaacagtagaagtgggtcgtgcctattttgaaaccgaaaagaagcatttcacaattctagatgcccctggccacaagagttttgtcccaaatatgattggtggtgcctctcaagctgatttggctgtgctggtaagaaagacatttccagtccatctgtatatttgttagtagccccgcttatatctttaaatttgaatttatcttctaaaagctcaaattcaggttgcagtgaaatataatgatgtacacggtcacagttttcatcatactaatctctcttcaagaaatcttcaaaatttgatttacttctgaaaatacgtttcaccttttctctcctgttgctattatctattaccatgtcagaacttagtctccattaaatgccaagcccaccgttaggcaccatgggtaaaaaatgaataggaaaccatctgtttcatacggtcttcagtcattttgcgcttttcacaatgtactggtagtagatcacaattttttttcctttgtagttacaatagctagaaagtaaatgttggaattttaaaatatgcaggtatactagattttgggaatgtgggggattggaagcatctagacattgtttgatttgtgacattcaaaagcaggtacgtcataactcgtttgcttctattttcttgcaaaaaaaaaaaaaaaaactcgtgatataactgaaaggaaagatgttttactgccataagggtatgcctgaaggcgaaggagtaaactgtttcctttcttggaattaggtaatctcagccaggaaaggagagtttgaaactggatttgaaaaaggaggacagacaagagaacatgcaatgttggcaaagacagcaggtgtaaaacacctaattgtgctaattaataagatggatgatccaacagtaaattggagcaatgagaggtgagcgtagatgtctggtattttatgttagtgggattaaggatggttttgttattgtacgactttttctctagggtttttctaaaccttaatctgtttacttaggaaactagagttcttggtttacattataattgagttattttggttacattataattgcagatatgaagaatgtaaggagaaactagtgccatttttgaaaaaagttggcttcaatcccaaaaaggacattcactttatgccctgctcaggacttactggagcaaatctcaaagagcagtcggatttctgtccttggtacatgtaagtaactgttttttcctttttttaaaaaggaaaaggatgttattacttaaattacttataaagacatatgctgagtaacatgttaacatatgcttttgagcatatatctttataagtaatttaagaaaatattaaatgtaaccttggctttaaaaatactaagatctttgcccatttttaaactgggttgtcattttgttactgagtcctaagagttctttttaatactggctaccagtcccttatcagctacaatatgattatagcaagtattttctcccactttatggattgccttttttcacttctcgatggtgtcctttgaagcacaaaaggttttatttttgaagttttttacatttagatatgtatttgattttgagttaacttttgtgtaagatgtaaggtctatgtgtaggtttgttttgtttttgtatattaattgtttacacacaatttgttgaaaagactattcttttttcattgaattgatttggctccctctttgaaaatcaaatgaccataaatacgagtttattcttgaactccgtgtttcttttttttggtttgtttttttgaaacaggttttcactctgttaaccaggctggagtgcagtggc

SEQ ID NO: 82293 - DNA, 1034 bp, Homo sapiens
ggagaatagctggaacctgggaagcagaggttgcagtgagccgagatggtgccactgcactccaacctggccagagcaagactcccatctccaaaaaaaaaaaaaaaaaaaaaaaaaaagaagaagaggggtgggggtgccgggcacgacctaggctctgttgcccaggctggagtgtagtggctccatctccactcactgcaagctccacctcctgggttcacaccattctcctgcttcagcctcccaagtagctgggactacaggcacccgccaccacgcctggctaattttttgtatttttagtagagacagggtttcaccgtgttagctacgatggtctcaatctcctgaccttgtgatctgcctgcctcagcctcctagaatgctgaaattacaggcgtgagccacagcatccatccaaaaaagttttattattaccctttaactctcaagacagccattatttgtgttgtattttgtgccatgtgagtataaaaatgaagtaataagggagctcattatcacttaacacacagtgatattggcatttgtagttagtctttctgtgtagtcaacttgccataaagttctagatggtataattgactgcgtttatataaaagctctaagggtttgaatcaaaataatacattctttcagttttattttatttatttatttttttgagacggagtctcactgtgtcaccaggctggagtgcagtggcgcgatctcagctcactgcaacctccgcctcctgggttcaagcgattctcctgcctcagcctcccgagtagctgggactacaggcgcccgccaccatgcccagctaatttttgtatttttagtagagatggggtctcaccatgttggccaggatggtctcaatctcttgacctcaggtgatccgcctgccttggcctcccaaagtgcttggattacaagcatgagccactgcacctagccctttttttttttttttgagagacagagtctccctctgttgcccagcctggagtgcgatggcacga

SEQ ID NO: 82294 - DNA, 1032 bp, Homo sapiens
gcaaacttccatttgttgttttaaagctagtgtattttaaagtatagattgtaagtctttttcagaatactaagttaaaatgtctttcttcagtagaaaatggagagacagaaatgtctccagaagaatcatgggagcacaaagaagaaataagtgaagcagagccagggggtggttccttgggagatggaaggccgccagaggaaagtgcccatgaaatgatggaggaggaagaggaaatcccaaaacctaagtctgtggttgcaccgccaggtgctcctaagaaagagcatgtaaatgtagtattcattgggcacgtaggtaagctgctctcatagcaattaaagttactggatacataaaacatagaacatcctttttagctacctggagatgtttagtgaaactgaaggaaattaattgaaaatgtcttgatttttaacttgctgattttttttagctggcaaaaaattgcaagtacttttttcctgaagtttaggcaaatgaataattctgtaacggcatagatgctggaagaaaaacttcagtatattgtacgtaacatataattagtctattgaccattgatggtagttcagcatagtattatatatcagtatcttagaaaatgtgcccttttttatgtgaacctcagttaacttgttaattttaatgggattgaccttaccagataattttgtgtgaagcaggaaatcaataatttggagtaacttctggatgcttgccaggttgctggtttagcaaaaaacaaaagaacaaatttatttaatttactcagatattctctaattatctggcctatccccagaattgtgagaaaaaaaatacagaattatgtgtctttcatttcagctatctctgccttccccccagatatgaaacactgtaccccttcttttagtagcaagaactcttttgaaagtgtaaaggagcggctgggcactgtggctggcgcctgtaatcccagcactttgggaggccaaggcgggcacatcacgaggtcaggagttc

SEQ ID NO: 82295 - DNA, 1209 bp, Homo sapiens
gtatctgtgaagaaaaggtttataaagcaaatcaaaagaataagcatgtttttatgaatacattgaaactactgaaaatgtttcaaaattggctgtaattagtagaattttgaaaagtaggttaagcagagacttctaacttgaaggcctgagttagctgccattgatctggggttattgattgaggcttgtgtcgtgttattgaacttctgtttttactgcatattaaaagataagtgaaatggatggataagtatcaatttttaatagaacttctttctgttaaacagcacctgtggaatcctctcaagaggaacagtcattgtgtgaaggtaatgatgtactctttgaaagtctacttgagaaaacattaggttgtctatatggtgtgtaaagctagatactgtttggtaaatatatattatatttcaatctcttgtctaggttcaaattcagctgttagcatggaactttcagaacctattggtaagaaaatttctgaccatattaatacagtaatatgaaactctttcactctcaagatttaaggtgcattatgtaagttacgattattgtaatgcctacatttaagacacattgagtctttgctattagtatttagaaagtagaacaaactaggcactaacactgccttgataaacttaatgattgcaaataaaattgagtggaggaatggtcaagtcaatttaaatacctgtacctgttctgttttctttttttgagacggagtcttgctctgtcgcccaggctggagtgtagtggtgcaatcttgggtcactgcaacctccgcctcccaggttcaagcgcttctcctgcctcagcttcttgagtagctgggattacaggcgcacaccaccacaactggcaaatttttgtatttttagtagaggcggggtttcaccatgttgatcaggatggtctcgaactcctgacctcgtgatccacccacctcggcctccgaaagtgctgggattacaggtgtgagccaccatgctcggccacacgttctgttttcttggtgaaaaatgttcttcctttttataactttattcttaagggtttcacgttctcagcgtgattaaagttgatgccaaagttttattagtttaagaggaaaaagaaaatatttcctaaatcctttcatatttctcgtgtgtcacgattttaaactttcctttttttcttact

SEQ ID NO: 82296 - DNA, 1003 bp, Homo sapiens
taatgacaccattgagtctagaatgcagatttgctacctgctagtttagtgcttgatctgccacatcatgctgtttaataacagggggcgggaagggcatgcctggagctaattactacaactagcgtgtagttttctgagagtggccctggcatttgcctaatgtttcattcttaaaggtttttgaaattattttggggctttgaagtgcttgctgtaataaatttattgagcatttaccaccccttatcagttatttagtcttcacaacattctcttgaggttaggtactgttgacccattttacagatgagaaaataaaggctcagtaaagctaaataacttaggtcagtcatatccatgagaggagtgaggcttggaatcgaggtcatttcaaagtttattctagtagtgactgctagtgctttccttgtgattttgtattaaagtagactgagactctccagaaactggacctgtgagcttggaccatggcatttctctgtgttctgtctcagtagtagcagaatgacatttgtcataagtaggcagtgctctgatttaaagcaatattttgaaattacttctttttacattttagcaagtgttgatgtaaaatactttaaaacagctctgttcaccactgtctgtaccgagcctttttatttttagagtgttaggtaattaaggcaaaaccatccacattgttttatgtgttctgtagacttctttctggtgtttgcttttactgtttttcagtattgtctacaggagaaaaaaagaaaaacctcagcttgcaaatttttgttcagagatgggatcgttctttgttgttggagggatttacattaaaaaaattcaagaaatattgtctcatgtgatcttaccagataagtgcctattattaagacttgttggctgctggatttattatcttagcctaattttctttctgagttaaatgaatcttgcttttttatcgttaccaccctggcataatcca

SEQ ID NO: 82297 - DNA, 1669 bp, Homo sapiens
atttcatcattctacccttggttttaaaatatcttcgggagacaagaatttggctactagttgaaggatctgaggtcctcagaacaatcaagaaaactgacagtttttagctgttgattgttgattcatttcaaggcttagaagtttctgccttgttttcagtagagtttaacaaagtgagccgagactgtagatttatatggctccttcgtaaatggctttgttctaaggaaacctagttgttacagtactctaagttgaaccagtttcccatcataattctactttcaaagagagaagaacacttaataaggctttcccgagcacctgacctaacagtggtgacactcacttccaaaccacattcccactaggtaattgtatgtcgcttcacttgaaaaaaaaaaagcgcattctgcagaatgtcactgggtaatttcctggttgaatatttctgtagaactccagtatgttaccatactacttgtccattgcctttaggtggttaattttggtagcagaaaaatgtttcggttatttttttatttttgacatggagtctccctttgttgccccggctgcagtgcaatggcgtgatctcggctcactgcaacctccacctcccgggttcaagcgattctcctgcctcagtctcctgagtagctgggatgacaggtgcgcaccgccatgcctggctaatttttgtatttttttttttttttttttttttttttttttttgagacggagtctcgctctgtcgcccaggctggagtgcagtggcgggatctcggctcactgcaagctccgcctcccgggttcacgccattctcccgcctcagtctcccaagtagctgggactacaggcgcccgccactacgcccggctaattttttgtatttttagtagagacggggtttcaccgttttagccgggatggtctcgatctcctgacctcgtgatccgcccgcctcggcctcccaaagtgctgggattacaggcgtgagccaccgcgcccggcctaatttttgtatttttagtagagacagggtttcaccatgttggccaggatggtcttggtggctactgacctcaagtgagccacccacctcggcctcccaaagtgctgggattacaggtgtgagccaccgcacccggctgtttctgttatttttgtacttttttgagggtatctgaaatggttttggtttgtgtattttaaatgttatttaaatggttttttgtttcttttttgtttttgagatgaatctctctatgtcgcccaggctggagtgcactggcacgatcttggctcactgcaacctctgccttcctggttcaagcgattctcctgcctcagcctcccaggtagctgggattacacgtgtgcaccaccatccccagctaatttttgtatttttagtagagacggggctttgccatgctggccaggctggtctcgcactcctgacctcaagtgatctgcccacttcagcctcccaaagtgctgggattacatgtgtgagccaccgcgcctggcctcaaattgtttttgaagtagttaggttgtagctcataagactgtctttcagggttgtttgaaaaacataatggaattttagttactctatgcaaagtctgatcaggttgataatgtggcattgcttttg

SEQ ID NO: 82298 - DNA, 1002 bp, Homo sapiens
tccctaccttactttgcagattccgtttatccagccattttctttcttggctcttcctcctttctgtggagccaccagcaccactctgactagactcaggactccatttacagcctgtccagcgagtcatccggggataaccaaccttggtctagaatggtcactgttggtgactaggtattacctcttatgcgggctttctctcttcctgatagttgctaatttgtagttacacctaatctttttctctttgacagtgctagaaattggagatgcgaaaacctgtagggaagtagctgtcagtaagagaatccgtacagcatggtcaactttcttgtttttaatcaaaaaactattttggtgttaccgactttaccaattgcttgtaccaaaatgccagttcatgtttttaaaaaattatcctatgtaggatgtctatttggaaaagaactgattttctaagttgaggtccagggttatattgagactgttggattgcatgttccagactattaagtccataaaaagccagcatcggagaacaatcagtgcttataaaaagcagggggataaataggaaataacacctggattggaacttacaaagggggaaccaaaaagtttgcaaggtttttttgatagcgaggaagtggacaatagggctagcatgttctgttctttagttaagccatagccgaaatttgtgctgggtgtgtttttaaactgcatgccgggaaagctgttgaaggagcctggagagtcagaccttgggattcagtattgaccttggatctctttgaaaactaaagaatataggttccttaagaaataattaagtggaacccatttaagtgtaattaagtgtaattcatttaagcacagttctctagagccaagtaaattggccaagagattctccttaaaaagtgaggtccccaagtgaataaaaatatagaagacaaggcttaatgtatattagaacaagcattttatctgatagga

SEQ ID NO: 82299 - DNA, 1099 bp, Homo sapiens
ctccctggcggcggcggccgaggcccagcgggagaacctcagcgcggccttcagccggcaactcaacgtcaacgccaagcccttcgtgcccaacgtccacgccgccgagttcgtgccgtccttcctgcggggcccggcagcgccgccacccccagttggcggcgccgccaataaccacggagccggcagcggcgcgggaggccgtgcgggtaaaggcccgggacgcgggaggaagtccggccgggcgccggagcccacatggcgtaggggtgcggtccgggggcgcgcggccctggggcccggtcggcacgtggggcgctgacagtggcgccgtctgcctgggtggggcgccccgagcccgggagccggccttcgcggggcggcccgcggcggtggccgggcggggagcggacagcgggcagcgcgcccaaagacccggacccgagtgccgcccctccgcgcccctgccctgctctggagtccgcagttacccacttgagatgggaaccgtatggaacggagtgggggccgcggcggatccctgccacgaggcgcagaatgaggacagatggagccaggagtcatttgggtgggcgtttagagatcccaggagttggggaggacgaatggccgagttttcctttcaccttaggcccagccgagagagcgtcttctgctgcgttttctactattgaaactgtaattacggtttaaactgtccgtggcccccaaccgtcctgaaggaatcccaagatgcattgcagccttgtgatcgggcagaaacttggctatcaataccaagatctgttttacccttagcattgtgtacgcttctaaagtttacaaagtgccacaaagttaggattcctcacttaatgtgtgataggagactatattgatttgtgtctttttaaagtgaagcttacacttttatcctttgtcagcgacacgtttagagaattttcattgctgtaaaatcgttgaccttattcagattgcttggaataactcactgtgttcgtgcatcagtagttcagtctatttcttcagacacttgagcatttgttataatttaatagttctcacgtgtctttctgac

SEQ ID NO: 82300 - DNA, 1042 bp, Homo sapiens
tgtcacccaggctggagtgcagtggcaggatcttagcttactgcaaccttcgcctcctgggttcaagcaattcttctgcctcaggctcccaagtagctgggactatagacatgtaccaccatgcccggctgagttttgtatttttagtagagatggagtttcgctgtgttggccaggctggtctcgaactcctggcttcatgtgatccacttgtgaactcctggcttcatgtgatccacttgtgaactcctggcttcatatgatccacctgcctcagccccacaaagtgctgggattacaggcatgagccactgtgctccggccataacattttattttatagtgtattttaaaaactcagaatctaagtaaggtttaaacagtgcacattggtttgtgttttaaatcttttaggtctctccctcacctcctgtttattttatttttattttttggtattttcagagccgtgtaaacatcaccatagttaatttcacaacattttaattaccttagaaagaaactttgtacccattagcagtcattcatctttccccctcccctcagaccctgggaaccactcatctactttctgtctctggatgtgcctgttgtgggtatttcatataaatgaaatcatacagtatgtgacctctcttatctggcttttttcactcggtataattttcctgaggttaaaccacattacagcatatatctgtacttcattcctttttgtggccacattatattcctttatgtggatatcatattttgtttattcatgcatcaaaaatgggcatttgagttgtttctactttttagctgttctgaataataatgctgctatgaacgttcacgcacatgtttttgtgggggcaagtctcttcatttctcttgggcatgtttgtaagagtggaattgcagggtcatatggtaactgtttaaccatttgaggagctgtgtcagactgttttctaaagtggctgcaccattttcagttctcaccagcagcatatgagggttctgtttctccacacct

SEQ ID NO: 82301 - DNA, 1010 bp, Homo sapiens
gggtgagaccccgtctgtataaaaaataaaaataaataaattatctgtgagtggtgccctgtgcctgtagtcccagctactcggagggctgaggcaggagagtcgattgaacccaggaggttgagactgtagaaagctatgattgtgccacttactctagcccatgtgatagagatcctgtctcagaaaaaaacgccaaaaaataaattgctgctttttaacaagatctccaggagatctgtgtggacattaaagtttgagaagcactgcattaaaaaattatcactagggagatgaaagagatttttattttctttgtacattttttcctgatttgttattattctatttttttcctgcatgaattgcttttatgatgagaaaaaaatagcaaaggcatttccagtgcggggaaccctgtcaagtttccagttggcattgctcaagggcaggtagagctgtcgggctcactcatacttggaaaaaggaagaaagcaagcctaactttttttctattctggtgttagggagggaagatcagaatccaaaccctggattctgaaacaaagagcgtttgattgatagacacaggtgtcaagaggtgttggaggaccttggccagatgggtctatagccatcctgagcgatgccttgagatgcctcatggctggtgggaatggtgcctaggctattcttgatcgaaacctcttccagaaaaaaatactaacggtactttttgaagagtcagttgttttattgtgtgtctcaaagaatctgctgactggtttcattaccaggcctgggggtaaggcaggatccttggtattgtggtcctaacacaggctttagaggtcttgagtcaggatcactgttccaccaattagtattcaaatttcaacagtctaacccctttatcatggcccacacgatcctatgtgactgacatctgcccgcctgtttgatctttccttccacttttttgctttttgctcaagccacagcaaacttcc

SEQ ID NO: 82302 - DNA, 1083 bp, Homo sapiens
acagagcaagattccatctcaaaaaaaaaaaaaaattcctaaaaatggccattgacattcacgacccaggaaaggctgacatcattgcataagctgataacattggctggaaggagacacatagggcttggtaaaggtaggagacacataggcatccagtccttgctgcaaatgcgttgtgagctcagtcagagctgatccttgctctgtagcccctggggtggcaggagggacattcctgtgtgggaaggaaagggaagggaacttgcttgctcaatgttcatctcatcctggaaactgttcatgtcccccaccctctcaccctagcccaccctcctgtgtccatcgttcctctttctgtcctttcctacccttgttcttttgtagaattttaacagccatgagaaagcatgtagaccttcctggaatagagccacgtggatgatttgaaactggcacagatttaaaatgatgcaccctattatccattccttctttgcttaggttttctccattgcacgtattaccatccaacaaactatatatacattcggctttttaattttgcctattacctgtcactataatgtcggctctgtgcaggcagggatgatttgctgtcttgtttacagatgtttctctagtgcctagaagcatctagaaggtgctcagtaaaaatttgttatccggatgagcgtgtgtatcacattgtactgtagtcaagcatttaaatatgtgtgccaccacgaagcctgtaagatttgaaggcagaaagggtgtttctccatttatttttaaaattttacttctcagtgttgtacacaagcactttgtgcctgtcgtacattagattctcagtatatgtttgtggcattagatcattcgactgattgatcaatttagtccttcttgagggcctactatggggcctggccttggtccacacagggatccaaggtctgcttgcatcagaatcacctgggaggcttattgattaatgatcctgtgtctaagtcctgtcctagttgtactggagcaggatgtgtatatgtgcatgagtgtgtgtgtgtatgcctgaagccg

SEQ ID NO: 82303 - DNA, 1072 bp, Homo sapiens
gttgttgagaaatactgcctaggccataataaacattatgttagcaccgtcatcttcgtcatgaacctgacagtggagagaggtggtgagcatggggtgtgagctttggtgtcagatatacttaccttcatgcctccttcagccacaaatcaccagttaccagctgtgtaattttggactgacttagctcctttaaacctcgcatgcaccatctggaaaatcagataataataatgatactcacttgctagggttatagtcaggattagctgtaataatatttgcttggtacacccagttaaaacgtaataaactcaaaacttttttttgtatgactagacatacctgtgttttttgacaattactagtaactgaaggttggagggattgcctcattaattccttcattcaacaggtatttatttatagagtactatgttggcattggcgatgcaaattggatgagatggttgctgtcttcaagaaattcaaaactgaatctgggagttggacatgtaaattgtgggcaattatggtgacctgtaataaatattagttgtcatagggcgacagcagggttgttagcggtcaaataggtgggataggaattttaggcagagggaatagcagatgtgaaagtgcagggatgtggggcaaagtggtggggtgcatgaatgagtgttgtttggtttgggagatcagttggaaagtcagcaggttcttctctgctatcacagggaagtattggaatgccatcagttagggcagtatttcttttgtttattttttatttttgagacagagttttgcttttgttgtccaggctggagtacagtggtgcagtcttggctcactgcaacctccgcctcccacgttcaagtgattctcctgcctcagcctcccgagtagctgggactacaggcgcctgcccccatgcctggctaatgtttgtatttctcgtggagatgaggtttcaccatgttggccaggctggtcttaaactcctgacctcgtgatctgcccgcctcggcctcccaaagtgctgggattacaggcgtgagccaccgtgcct

SEQ ID NO: 82304 - DNA, 2062 bp, Homo sapiens
gggagacattcagaatttcttaacttttgttgtatgaatgaatggaaagggctcagaagtccacagacccagttgggcagaggctcaggagccctgagaagattgctaagatcaagtgcagttgctgtgacctcatctctttgttcctgaatctcctatttctttggttattgagaaacaaattcaattaaatgcacagtaattgtaacttaattgaaaattccatcaactcacaatctgagttcacaatgtattctcttacaacagaataaagaacaagaatcagaattcatattattattatttttagagcatgtaatctcatataatctctttagagcatgtaatctcttatataaagaatgagaatcagaattcatatattctttttagagcatgtaacaggccatgaaattacacaatgtttccaatttggcagcctggtgaattcagtctccaaaaacataatcttgttccttaaactacatgtaatatgaattagagttaaaacttgtgaattggatgcaattaacatccaaccgctccccacactgaactgattggtttttaacttttcccccctctgcacccccgccagctggcacccgtccctgttcccatgttccttgtgaattgttactgtgccagtctgatgcatatgggtagactgtgctgggcatcctgagctctgtgaaatgaacatcaacacgggaggtgtgtggagtggcgcaggtcagttaccaagcctgcacatccaggtgtctcctgtctgccttcacgctgaggtttacacctggcggcttactcacttcctggagatgctggggccgccctagttgctactcccttttctggggggactgatgagtcattggttttctcacagggtcacctgtctgtgtgcccagtttgaagccgtcctgcagcatggcttgaagaggagtcgaggattggcactcacagcggcagcgatcaagcaggcagcgggctttgccagcaaaaccgaaacaggtactgctctgcctggctgtagcttggaggagcttgtcttccttctgctctttttctttttatttattttttaatagtgggcagggcagtgatcgcgtgggacttggtggggtggtgtatgggcacagaaatccatgtcttaatagtagtcaaaacgtaatggtgttgtctggcatcttaatttaaatgaagtcatcttttgtgcagaattctcagagccacatggtacagtctcctctgggttcggggacctgtagcacactggtttatttcaccactgtggcgtgccagttgctgggaaattaataatctgttttaatttgatgcctgaggatagcatggcatttcataattaatgtcttccataccagcaacagaaaccccagaggttctgttatcatccaatttaatgttggaaaaacatttccatgtgagtgacaagcataatgctaaataataactattaatgcttagtacttagtgcaagacttgcactttgatgtaaattaactcattcagttcgatagccctgtgagtagtagggactgttattactgccactgtacagatgaggaaactgttcatagtgatctgctttggagctgaaccttgaagtggatcatgtcatgtaacaaatgtcctgtggtctcctcctcccctgagctttcagttccagccctgaccacggctgctgctgggaatcccggaatctttcttatcactatgtcagtgtcgttgctgagtaaaatgtgctgtctttggctggttcccctttcacagccaaaagttggaccttgttgcatttggtggcggtgtgtggaaattctctgctaacataatccttagtctttccctctccttcatgttgctgtatcatcctttcttttttctcaacccttcaatagatctttttatttatttacttatttattttttagagttggggtcttgctctgttgcccaggctgaagtgcagtggtgtgatcatggctcaccaaagcctggaactactaggctcaagtgatccccttgcctgagcctctgaaatagc

SEQ ID NO: 82305 - DNA, 1069 bp, Homo sapiens
ctatagtcctgagttcttcttccatcaaacctatgtatggaactacccgttttcttttttctttttttttttttttgagatggagtctgatctgttgcccatgctggagtgcagtggtgcaatcttggcccactgcagcctatgcctcctgggttcaagtgtttctcctgcttcagcctcctgagtagctgcgattacaggtgcacatcaccatgcctggttaagttttatatttttagtagagacggggtttcatcatattgggcaggctggtctcgaactactgacttcaggtgatccgcctgccttggcctcccaaagtgttaggattacaggctcatccttgtagctctagtgtcttgcaagatacctggccacctacacagtagatgccaccaaaggactgcattcaaaataaccacttgaagaccctgacttcagaacatgctgctcattttcccaggaagccaaacccctactctcagtggtctgtacgcatcttcagtcagtgggaagcggtggtaatatacccataactgtaaaatgagagagaccgacttccttgatcttcagtggggatttttgaaaatggttgattgcactcaaagcagaatttgtattttgcttcattgggtcaccttgggcaacaatttcatttctgtagaaaattaattttggaggaagctgcatgtgccaggggagccctgggtccatccttttgatggtgaggggaagtccagttcctcactcgcccatccctgctttcggttccctgttggtgattttcttttgtattcatgcacgtgccaatcagctgcttttggtaagggaagccttggaaggatgtctgctaaaggtgcagagaaaatgcagagctccattcaaggtgaaaaaagtggttgacaactggcagaaagaagctggctttagggaggaagtcagaagccagggtgctgtacccgttgggctgtgtgttatcctgggtcactggatcatgggcatgtccacagggtccctcaggggtgggttcttgacacccagggtggcatggacttgggccagtggctat

SEQ ID NO: 82306 - DNA, 1030 bp, Homo sapiens
gatgtgctctgtggtgtgtttatttaaatcagaggcagaggcctgcgtccattctgctcaatcttctgtacacagattttcactgaggattttaaaaagtctgaattcatgttacagtgtatttctcactcgaatagtattttccataacctggaggtgagttggttccatcatccttttgtcttgcctcctttttcttatactgtatctttttttttttttttgccagatgccaaatgcaaaaaggagcggaagaagaaaaagaaagtgaccaacataatctcatttgatgatgaggaagatgagcagaactctggggacgtgtttaaaaagacacctggggcaggggagagctcagaggacaactccgaccgctcctctgtcaatatcatgtccgcctttgaaagccccttcgggcctaactccaatggaagtcagagcagcaactcatggaaaattgattccctgtctttgaacggggagtttgggtaccagaagcttgatgtgaaaagcatcgatgatgaagatgtggatgaaaacgaagatgacgtgtatggaaactcatcaggaaggaagcacaggggccactcggagtcgcccgagaagtaagtttgtgtgtaaggtggagtctcaccgtcccccaggctggagtgccgtggcgtgatctcagctcactgcaacctccacctcccgggttcaagctattctcctgcctcagcctcccgagtagctgggattacaggcacctgtcaccacacccagctaatttttgtatttttagtagagatggggtttcaccatattggccaggctggtctcaaactcctgacctcaagtgatctgcctgccttggcctcccaaattgctaggtttacaggcatgagccaccacgcccagccttcccttgcacttttaatgagggggttaagttcactgttttctctttctatggtattgggtaaaataggtctgcaagctttatatttgcccagggtatcattcattcttcaggtgttgatttaggagtgtt

SEQ ID NO: 82307 - DNA, 1048 bp, Homo sapiens
ttttagtagagatggggtttcaccatgttggccaggccggtctcgaactcctgacctcaggtgatccacctcccaaagtgctgggattacaggagtgagccgccatgcccggccaagtatagggctttctgcttctacagtgactgatgccaagtctgagattatctctgaacaacaggaaacagctgattaaaatccagcttgcaggagagatggagaaaaatttcttagtcaagtgatgtagcagatgagccaatgtctgcattgtgtctttgtcttatggagaacatgtagtgagaaaagtgacctctttctgtgattgctctctctgcacagatgcccccctcggaagcctggagaacgggacaggaccagaggaccacgttctcccagatcctggacttcggtacaggttaatattgagaaacccagttgcctgtggcattaaaacatcctattcacagctgtgcattttattcttttttaaagataggagtgcacctgctaggattaaagggcaagggtttacttcacatttatgttcagatttagtctttttttttgagatggagcccggttctgttgcccaggctagagtgcagtggcgcagtctcggctcactgcaaactccgcctcccgagatcaagcgattctcttgcctgagcctcccaagtagttggaattacaggcacacaccaccatgcctagctgatttttttgtatttttagtggagatagggtttcaccacgttggccaggctggtctccaactcctgacctcaggtgatctgcccacctcggcctcccaaagtgctgggattactgatgtgagcagatttagtctttacatcacagaagatgcagttgccaagggtcttagatcattactgcctcagagagactgtataagagatggtagatgacgaatgtcaacaccttttggggcatatctgggtgcctcctctattgttattttctttttttctttttgagacagtctcgctgtgttgcccaggctggagtgcggtggcgcaatctcggctcaccg

SEQ ID NO: 82308 - DNA, 1026 bp, Homo sapiens
gtttgcctttcagcggtaggagaggggaccccgcagcatggccaggctctgcagaggccacagtgcaggagcgctgctctgtttcactcgaaatgtgagctgtggcaggtcataaagaggaaggaaatcacaatgatagagactaaacaaatcatgggctgcgcggctcaggggagaggagagaaaattacatgttcgggagctcctctgctcgtgtgtgtcactcgtacttggcgaagtataatatttacctgatctgtggaaatcaccccgatgttacctaccagctttactgcccaaaaagagtcacaaaacagccaatgaggcagcgaaagtgaatgtgtgttcaggttcaagcccgttgaaagaacattttggggggcatgccagctctcggtccctttctttcttctccaccgttaacctgaacatgatgtcatagctgtgtggggaaggcggaaggtctgacagctcgtctttctatgatggatttttaaaagattcccactaccagagtactgctttggctgcacttgtgatatcagtcattttgatgttgataaaaacacaggtgcctcgtccaagaggctggagatgcacggtgtatgggacctgggagggtagggaagggtgaggctagggtgatacagtggatcgggtcggcatccatcgtcctctgtttctcacaggtggttgctatgcagtgatttgggctcctgcaaggggggcttgtggctgagatctctcttttttttttttttttttttttttttttttttttttgagatgaggtctcactatgtcgaccaggctggtcctgaactcctgggctcaaatgaactcctaccttggtctcccacagtgttgggactgcaagcatgagccaccgtgcccggcctacatctcttaaggctacttgaggcagtacttgccaggcaagcattgctgtctctcaaacttcctgggaaacagttttttcctcctagaatttcctcctggaatataacattttcagctatgaggtct

SEQ ID NO: 82309 - DNA, 1002 bp, Homo sapiens
ccttatctccatcttcctatcttctgctgttgcatttctgcaaagacttgtagtgatactgatcagtagtacttgctaaatgctattctgtgctgggcaccattcctaagcatctcacttacatattgtcttactgaattcttacaacacttctaggagatagtaactgttaagatctcattttatagataagggaggtggtgctcagagggggttgctaacttgcccgagctgcagaggcaggatttgaacctgggacctgacttcagagactgtgctctaaaatccaggaccctgatcagccgagtctcttagactgttataggagttatttttgaaagggaaaagggaacttatctagacaagtcatccttaatagcatataatccagagaggtgagggcatgctgtaacaggcaagacctgccaattaatcttgactttgttttcttcccttaggtgaactgcgccaggccactgtggccatgatgaacaggaaggatgagctggaggaggagaacaggtaccgtgattttcaggcttgaggaatagcctctttctttgacattctgcctctggggaagacagaatataacagatgagggacattttgctttcttggcaaaaattgtgactggctatttcttatcgtcagggatatgccactgtggtatctctctttactgtggtatctctcttttgcctgatatgtaagaaagaagtgagaaccttatgataatggcaccttcatagaacaagctaagaatttggtagagtgatcattaattcttttttaaaaaacagcctttattgatatttaattcacatacactataattcactcatttaaagtgtatggccaaggcaggtggatcacaaggtcaggagttcaagaccagccttggtgaaaccccgtctctactaaaaatacaaaaattagctgggcgtggtgctgcgtgcctgtaatcccagctactcaggaggctgaggcaggagaattgct

SEQ ID NO: 82310 - DNA, 1364 bp, Homo sapiens
cagcctgggagacagagagataccctgtctcaaaaaaaaaaaaaaaaaaaaaaaaggaaaaggaatcttaccacttagagtcagtagtaggtgacagaaacccaccctaaactgcctaagaaaaagagcagttgattcgctcatgaaacttaaacctacaggagaagagctagctttttgctgggctggatcaaagctctcagggggtatcacgcatatcatgcagtccccatgactttccatgtctcctctctctttccctcggtcttggcttcattcttaggtaactcttctcttgtggtgacaagagggcccccaggggccccagcctaaatcccatcagtttaacaatgccagtgggaggagaagacttttttccagtagctctggagaagtcttgggattcactctctcatttcccgggccagctgtgttacttttcctgcccaagcctgggtcccattccccctggagctgggggtggctggctttccctcacctgaactccgtggagcaggaacaaggatggaggagagtttgcttaaaaggaaaaccaggatgttcctcccatcagattgggggtgcatgcggtgaggtgcagcctgcagatgtccctgacagtgggttgcttccacagagggcttgtgacgcttggattctgtccattttccagagtgacactaccgtgctgtcactcttgtgccagctgtcttgcgcaccctgtcttggtgggtgaaatctgggctcagccattctaagcggtagcccgaaggtctctgtgctgtgttctccattgtgcttttccttggctagatatttcggtctgatataatctgacattattagcaaaccgctggtccagctactttggcatatttggacttgatcttagaagactcaatatctgttttaaataaaaatatttggtaatgcccccttctgaaatgaaatttatagcgaatataacctacttatacaagtaatttaaaaaatcagtataacactctaatatgaaagagaaatgaaaggaatttataatacaaaatagatttcagtacatattggtctggcgcaactgtgctagaaaacatgctgacgctaagtgcttgcacctccttctcatggatgagttttgattttaagaagttaagaagatcagaagtcattctttagaaggagtccagaaaaagagcagagagtgggtgaaccgtaaagtaaacctggcatagtcagtatatatgaaaggcattcctttctaggctcagattatgagtaaggtttccgcctacatgaatggccacaggacgattgaagtgttgcaggaagtaggctgatcttggttgtgtggtactgccttggccttt

SEQ ID NO: 82311 - DNA, 1110 bp, Homo sapiens
ttttagaccatgtaggataacttacggacattgccgtggcatttgtaaactgtcatggtgctggtgggaatgtccttagcatgcttatgcattctaattagcacataatgagcagtgaggacgaccagaggtcacttttatcaccatcttggttttgctgggttttggctggcttccttacagcatcctgttttatcgtcatggtctttgtgacctgtatctaatgacaccagtcctcctgacctcccatctcatcctgtgactaggaatgcttcacttcctgggaatgcagctcagtgggtctcagcctcattttaaccagctcctattccagatggagctgttatggttcaaacacctccaacaatagcactcatcatcctcgtgatgacccagactgtccccacggcccccagtgagaatctctgctttagctctttcccaagtgttctctttttcaagaccatttacaaatgtattggaattttgtgtgcaaggtccctttcagttgccccgatctttttgagtccttgtctagagactggatccagtccacactgaacccactgttgagcacctgctgcatatgtgacccactctggctctcccacctctcgcctctccttgggcatgaagcttgcttccccaaggtcgctggctttttcccttggctgagtctcctgagctgagtgagttgtgcccttcgccattgttaagcacatgcttgtcagcagctggctggtctcatgatgtaccccagagcagccaaggagcgttgagtgcatggggtgggtggggctggtgttgggggctgggggtgagtacaagatacacatgtcagtcaagagggaatatggcttaggaggagctgttttcctgcagtttgatgctactgatgaaattcagtcaagatgaacgattgatattgtttgtttgtttgtttgtttttgagacggagttttgttcttgttgcccaggctggagtgcagtggggcgatctcagatcactgcaacctctgcctcccgggttcaagcgattctcctgctcagcctcccaagtagctgggattacaggcgcctgccaccacgcctggctaatttttttgtatt

SEQ ID NO: 82312 - DNA, 1012 bp, Homo sapiens
aagggcttccaccgctcctagatgtgggatctgagatggccattttacctctcaggctccctatctagaaaaccacggtggtaacagaccctcccttagagagaggatgaagagagattgcatgtcaagggttaagcacattgaataccctgcgtaagtactgagtaacagacagccatggtgattactgttggtttcatggaagtaaattatgcctccatttcaagcctgcaaaaagtcattctctgcagttaatctagcctgctgttgctcagatgtaactagcttcctaataaagaattctctgggttgaagagcgaaatatgttgcttaaactttgctgaacatcatagtcacctggggagcttttaaaatggttatgtccaggctgccctccagaccaattaaatcagaatctctggagctgaggcccagactctcaggtaattccagtgtgcagtcaaggttgacaactggtggcttagagcagagtttctcaaaccttaatgtacccacgaaacacccggggctcaggttagagattaaattctcattgagcaggtctggagtggggcctgctatcctggagttctaataagctcccaggtgacactgatgctgctggttcctagaccacacattttaagtagcaaggacttaagagaggatgccaggaatgatctgaacggataagctcattgaaaaccttagaaaggctgatttttagctcagaaccaagttgggagctaattttttgttgcttggctggtttgaaaaatataaagaatagtatgacccactgcaacaattagcactactaacatttgtcatttttgttttagattttatttttaagtaaaccataaacaacatgtaggtttgtgctatggttagaaggttgtccctctaaaactcatgttgaaacttaattaccaagcaacagtataaaaaggtggtaccacctgagaggtgattagaccatgagcgctccaccccccatggaggggaggtg

SEQ ID NO: 82313 - DNA, 1055 bp, Homo sapiens
tcattctgaatctataaattgagggtctactttgaaaagttttttattacaataatacagtaaacaacagacattgtctcatgttattcagttccatggatgtcacttgatggctttgtggagttctgtgtttggatatgtccttgtttctcacatcatttttcttaaccatttttttcccttgtaggattagtatttctatgaacttgtatttttataaacctattccgccttttaaaaatcatttccttcagctagattccaaaaagtgaaattcccatgttagaaggtaagcatgtttgtaaaggctcttgatcttgtgttactaaaatcctttccaagaaagcggcctctcttttacccctacagcggtgagtgagagagcctgaccagctgtgatttgtaacggctgtgtagcattccttagggtacttggtggtttccacctcgatttgcattgcagctgcttccagtgtgagcttatagataaaggctgcagtgactatctcagtatctgtgtgtatttctctgtccgtttctttccttaatgtgtatttccccaagtgggatctcagggcaaagtatatgattttttttttttttctttttgaaggcagagtgtttccctcttgcccaggctagagtgcagtggcacaatctcagctcactgcaacccccaccttccaggttcaagtgattctcctgcctcagcctcccgagtagctgggattataggcacgcaccatcatgcccagctaatttttgtatttttaatagagatggggttttgccatgttggccaggctggtctcgaactcttgacctcaagtgatccacccgccttggcctcccaaagtgctgagattacaggtgtgagccactgcacccagccaagagatatgaatgttttcatggcccaagttcttggcggcaggctgaggtgggagggcctgctcatcagaaatggagctagttctactaccattcatcactgcttggctcctgcatctgtggctgtggaaggtgaaggtatccttggcatgaatgatttctca

SEQ ID NO: 82314 - DNA, 1264 bp, Homo sapiens
gtaagcacttgctagcattgtgaccttgggcaagttactgtacctctgtgagcctccgtgtttaaaaatcatgaaaatgggaaaaataatagaacctacctcatgggtattggtgaggattgaattacataatgcaggtaaagaagtgtggggctgctgtctgagacacaggaagctaataaatgaaggcagttctatatcatcctatgatctttaccagcctcagtcaagtatggtttctaggtgctcaggactcaaggatcacagagacatccttctggaagttcccagagtgcactccagttagaacagtttgtgccaagggggagaggcatgaaggaagatgctgtgtcaaggaagcttcaggttgctccctgtggctgtatcctggaattctggagtccagagtacgtttggggaacgattgagggtggggtttctgcaagggtggcctgggaacagattcccaaggtcccaatgaggagtttggcctcggttctgtggatagtgggcaactattgaaggcctttaaggagggggagtaattgatcagatctgttcgagggacagagccataatcccctcctgggcattgtggagaagtggataggaggaggccagggtcggaggggctggaagttctttgagctattcaggcgagagatgatgatggtcagatccaaagcagggtgaatgcttctagagagagagactgggtagatcaaccatgataagtatgattccagttgtttggttcttggattagagtctgtcttcccggtagactttgctaccaggggttaaggatggataaacaagatgtgaatgaattatttgcctagctcctcaaggtacgaggccagacctaacccaggccttcaccagcactggcgtcttcagtgagattgtgccgcctttgttaacctgagtcattgaggagcagaccttttgaagagtgagtctgcatcacagctttaacaacctgagccctgtggcaggtaattgtgaccaggaacagcgtctaatgagctaatttttgtccagtgatcacatcttgagatagtgtgcgtgagctgcatccctttgtaattgccacggtcacagtatcgggaggccccaagtccgtgaggaggaagttgtctttgggtcaccagcaaggtcacagcctgtggtttgggttcatttgtgcagattggggctaatttgtttttgctcttttatctgaattggaaattgctcagccaggcaagagatacggtcattt

SEQ ID NO: 82315 - DNA, 1047 bp, Homo sapiens
tagtgctttggaaggattcaaggagattctatacagacacttgacatgatgcctggcaaataataaatgtttagtacaagtcacagttgataaaagtattaagagcattccccagggtgaatgcacagtagtcagtacatgcttctgcaaatggagagaagactagagttcctgacactgaataggcacctgataggtgggtagctccaaacagcctaagcacagcctgtgtctgtgttctgaatttgtggacactggaaccgattggtgcttatctgtctcatgaaagaatagttcttaaaggcactctgcagacatgcccaaggtaacacaaccatctcccgtgatgatatctaaaccatgagaatatattaacatttataagatgcaaattgtgcttttctttacacaaattcaccacccacccctgccccctcctgtgggtccacattgtcactttttaaatatatatttttttaacattcttgtacctgcagagagaacgaggtgctcaaagtccaactgaagaaatatgtaggagctgtccagatgctgaaaagagaaggtcaaacagctgaaggtgagggggagcctgagcccgggttgggaggggccgggcttttccattaacacctgtacgtggcacgcaatagacactcaatgtgtgacgagtgcatatgtggatggattagaataatggtgctgctcagcgttccagaaaattaatcaggtggaaaacctgatgcgtatccctgcaacatgcataactagtattgtaagactcacttgctagactattagcaacagtcttattggtttgtgtacttagagaattttatgtccagagtcttgagacagttgcatggcagtgaaccttgtggtatgatgaagtcacagcaggccacgggtgcaagcaacagaaaggcaagatggcagagaatcagagcgctggacttaggctgatcaggttccaattccagctctggttaagttttctaatctctttgcacctcagttttttcatctgtacaatgaggttggttgaca

SEQ ID NO: 82316 - DNA, 1006 bp, Homo sapiens
tccatccattaccctgacaaaacagtatttgtgtgattagccagtttcccgacctttaagtaaaccctgaacaggtaagccccagtacccagctatgtggccaccccaaattgcaaggtgggctgggagacgtggggcttatttggcagataaggaaggagcgatgaatactgggtaggcagccaggagtccctgctgcttctggtggccttgtgggaggatgaggctgttggagtcagggatggagggtgctaaagtcccatcaagccacccctttttgccccactccttgggaaaacgtcatcaaatgttgggtcatagctgcaagaggatccagtcccaggttctaaaagtggccctcgtctctctggcgacctccattaaggggtaacgttttatttgttcgacctgatttcctccctggcaggggctttcttctcccaaatcactgcaaatggaattgcctggaaatatcaagtatcgattcacgattgttgttcatttcatttttattgtttggtaggaaacaaagacccagaaacacaacaggaacaattggagtgcctcagctccctcctcggaaggaggccagacgtatatttattgttgtcgtcattaactttttggggctgtctcagcattgtgtttattggtgtagtttgtcagtcagcttttgttttcaactgctttctgtcctgggagctgacaggtggcttgttttgtaaaaagccactttgattttgaaaactgctctattttaagtttctaattgcagcttttgtaaggaaactggtcattttgttttgctcgagtgggtaatgatgccgtggaccttggttgagagtgacttgcctgaatatttttttttttctcagactgaatggaagaatcgataccctgcacagagagagagcctctctcctggtctgggcttaattcactggtttatggcttcacttgcattctttgcatttccgtagaaatagactccctccttgtcttccct

SEQ ID NO: 82317 - DNA, 1363 bp, Homo sapiens
atccaagggatttcttgtcccagaacacacaggaaactgatcctgcatcattgatgcttgttttgaggcttgaggctaatccacattcttaaacatgctgtggatgtttttctttgcccttggtgtgggaggtcttccctgttcttgttttctgcttttcttggaactatctggttcattctcagcttttctttatttgtttttccctgcagagtgggcatatatgggcatatacataatcatggaaacactactcagagccgtttgtgtgcatgcttgctctgacctgggagccagtctctttaacatgtcttttgcattgacgttctgtgttggtttccgagtttttctaaaggttttcttgctgtcatcctaagtatggtttataaataccaatccttggttttacacatactctgacccccattagtgctccacagctggctgtcagcaggccctacctcactggatcacttttttgttgtagaaaaaggaacttggcaaatataaaagatgtaagtggactgaatgcagtggttcacacctgtagtctcagcactttgggaagctgaggagggaggatcacttgaggccaggagtttgagactagcctggtcaacatggtgagaccttgtctctacaaaaactaaaaaaacaaaaaaagaactagcctgctgcagcagggttatgcctacagtcccagtgactcaggaggctgaggcaggaggatcgtttgagcccaggagttcgaggctgtagtgagctaaatgattgattgtgccactatactccagcctgggtgacagaggagaccccatctcaaaaaaacaaacaaaacctccaccccccaaaacaaccagctcttatgtcttgccaaacctgccaaaacattgcctgttttctcctgaaatggaaagtagtgacaagattatttcttgactcctgtgcttctgtctcatgacagttcttgcattttaaaaatacagcttatcgctttttatttttttaagtgacaaagtctagttatgtcacctaggctggatgacagtggcacaatcatagctcatggcagcctcgacctcctgggctcaagcgatcctctcaactcagcctcctgagcagctgacactacaggcgcacaccaccattcctggccttgtcactcgttttattgtacttaggtgaaaatgtcccattgttgaagtagttagtaagtgtgtgtgtgtgtttttcttgagagctttttcagtctgaagtcatctgagaaagaagaattttttctttttttactgggagaataattttcgatactgttgaaatatttatgacatgtctctctttctctaaagtgccaaatctttgg

SEQ ID NO: 82318 - DNA, 1766 bp, Homo sapiens
cacaattgtgcctctgtgcaggcatgcttgcgcccctagccttctagtgtttatccttgctgatcttttgatttctctcacagaaccttggatacctcgtttcccatttcctggtgaggtcaccaccctctccggtggtggcgctgggccctgatctttgctgtttctccaccccatgtgttctgtttcgcttccatttctgctgaagcctcatttccagttgtgcctctgatctggaagtctggagtacttgcgaacgaacagatgaacttccttagagaaacacttggaaaatgatccaatactcctttttgggcgatagataaaaatacttgtaattatagtggctggttttcagcttttcagacccacactattttgggcctgttttatatttgccttcctctttgaggcgggaagtggcttcaagaagccacttctgggtccccagaaggagtcgtgtggccttgatggacgcgagtgaaagagatgtagtcctgtcaaggttgggctcagagttcagtatacacccggcgaaggggcagggctgtcctgaatgctgcatgagctcagcctgcaggcaacataaagggctcgtcactggcagtgtggagctggagaaacgggatacagcgggagtggagaacgctgagacagggcggagggagggacttgttgcatttaatgcatgtagacgggcaatgacaaactactctgggcccagtctacttgggccatttctttttctgcttaaaacttaccagtggctcactttagcatttaggttcctgtaaaagtaacatgttcacatgttaaagtaagcctttttgctatactcttgccttcctcttcagtcatgcttcttaccttgctctgagcatgttttcctttctcaaatgcacgtgttctcactgcagaccttcacacaggcaggtgtaaggtcccacctggaaccctgttctttttttatgaaccctttcctgtccgttttcgctggctgacttctgatctttcagatctcatcctggaagccttctcaaatcaccccactgcactcttgaagactgattcagtttgccccaggtgtcctgcacgtcctttgtgtcacctctcctaatcctcctagtacggtgtcgtgaatgtgtcccatttacctgtgttcatccttcatgacctctggtacctggttgatgcttgtatgatttaataatttttttggttgcagaataaaaaaacttggctcaagctgtctgtgacaaagactgtgtgatttatcaaggtctgtctcatttttctttttgtagacacataggacagatgcatttcctagtctcctttatgggtagcttgggactgtgtgactagttttggccagtgggttgaaagtagaggtaatgagtgttatgctagactgaggcataggagagtggggatgagttttcttggttcttgctcccctgccatggtgattctggaagctttgtgttccatgatgcatagctagaaaatgatactgacctggatccctgagtcactgcttggaggagagtttctctgttgtgttgctggatccactatagactttttaagagcaagaattgaatggtatctattcagcttgttatttaccactgagtcgagcctgtcgtggtaatctcgaggaaggtaatcctttggcctcaggaaaagtctggctttagctgtggcaaatgcttgatacttgagctgtgttacgaggctcctgtttctctctctttagtgctttc

SEQ ID NO: 82319 - DNA, 1061 bp, Homo sapiens
cctcaagtgatccacctgccttggcctcccaaagtgttgggattacaggtgtgagccaccacacctggccagcttcacttattttcttgcttctcctcctattttatttcctcacttaagaatattactccataattcacttgtttatataagtggccatatttttttaaaaagagaggatatgaactataaactctcatttacctagcatgatggcagaatatgattttacgagaacattctggaaagctgagctttattcagaatgttttattcacaaagctgccttgatcatctatttcagctgtgcatgttactaattttccaagaatgagaatataattaaaatacacttaatgctaaaatgcaactgaacataatttgatcttcgataatttagaaggcagttaaagagcgtgctgtgcctcaaggctgtaattaggaacatcaattatcatagtgtgacactataaaaatctggttatttcggctttctaatgatttgaaatctgtgggaactagaatttcgagtctgtgcatgcagtctgtgtatatataggtcttttgagcccctcatatgagcagttcatacatgttttcatagctgatgagtgtgagaaaggagaggccacctgacaagtcttggcagaggtgtgacgaggttagactcaggtgttgcgaagatcccccccggccacggagtggtatcaggactggagcagggcaaggctaaggcagtaatccctgcccaaggtgacagggaccaaagggcacagcgccgagggcgtcaagccctaggcattttagctgccagtgactgtgacactggcaggtcccttcacttctctgggcacacttgaccatcttcagaaggagcaggagtgtggagccataggccagaggaaaaatcagtggtcctgagcctgtcctcatgcctgatttaaaattttgctattttgttctccatagatttatttttttggcattaattttgatatttcaaaacattgcatggaaatattatttatcatgattactgagctttttgccacctccttaaa

SEQ ID NO: 82320 - DNA, 1037 bp, Homo sapiens
cctctgtttccttcttcttaaacagtttgtgaacaggctattttattttagcaatggatttcagaatagtgctctgtcaactggaatggctttgatatagaaagagttgagttgaaattctgtgtactcttaaccactcttggtctacattttttcctcgctcacatggcatggtgatgccatctgcatatgatcacgaggatgaatggttttacatgcaggtgcctggccgagggaggttgtgggatagatggtgagtgcggttgttaaggccacagagagaactgtatcctccagtataaaatgagaaatgcaattcctgtcattaaatgaggtgatgtcactaacatcatgaggacagtgccaggcgtgtggaattctcacatttgtgaatgttgaatggggtatggatgctttcatgcagggctggtctgggtacaattttgtccccactttattctgtgtctggacagagttgggaagcttaataggtgtcaaacatttgcctgcttaatgcctaggccaagaagaggggagaagttgtcagcagtagaatgtagaggctacacagggtcatgaatggtcttggatttgccgaagcctggaatggcgtggagaatctgtcttgagggcctgcctgtctgcacagtggtcaaggcctagatgcctttgctaggctcggccttggctggtaggcaccaatgtagccatcaatggcaaaacacacctccatcggtcagcaaagtcctgctaccctgagatcctctcatggtgacgttcacttccccaatgaccctgaccttctgaactcctggcccaccaagagatgggagagaagaggtgggcttcctctgcaatcagggtctgtttgagttgtcttcaggacaaacaacgtttggtgtagacagagtgctgtgttagccactgaacccatccctcattctgccttcatggtgctcatatgggagagatgcacagacagggtctacctcagctctggcctcccagtgtaacagtagcctacagcctgcgagggc

SEQ ID NO: 82321 - DNA, 1028 bp, Homo sapiens
aaagaaacttctttctaacctttcagtgcctctctcccagagcttgctggattgagtagagatctttcctaccaggttccattacaaaggggacaggaattgaagcccttgctccaaacacagcctctcaccccatgacattatttgcacccctgtccaggtgttagtttctctgggcagcccatagggacctcccaggcagggctcacaccctcctccgtcctcctttcctggctcctggcttcctctgctggctggactgcaccatgctggccgcctcccatttcctccaggagatgcagggcggttgagcttgcagctccctctgcctgaaatgctcttcccaaggccgatggcccgtccgcctttaggtctgagccctcccttccttgagatggcgtggctggccatgcctagattcatctccaacccttcacccggcttatttccttcggaaaaacacagtctgttacttgtttctttgtatgttgtctgtcgccaattccagtgtgagctgctggaggcagagagcttggccatctctgtacatctctgctgtatctatggcacctggagcaggatggcagcctaaaactggggcttgttttagtgagagtgttggtttaacttaacatagcttatcattgggttaaataagatagagttatctctatctttgcataaaagtatgaagtggtaggtgtggggtgggtaggcagctcttttccatgaggaaccggggcccaggtttcttctgctttgttactccactggcctgtgggaagggtgtgtgatccagaagttgctcacatcactaatttccacatcctgctgggcagagtttagctactcaggtggctgctctgagctgcaagggaagctgggaaatgtagtctttatcttgcagccttgtgtccagctacaacttggtgggttttttaactcaaaggcaaaaaggatattgggggctatttagcagctgcagtgcttgatctgtatttgatgaatgaatgaatgtccccatccca

SEQ ID NO: 82322 - DNA, 1048 bp, Homo sapiens
agctgttgcttttattattttactactactgtttgtattaccctcagccagcgatgtttctagcttgttgatatctcttggcctttcagctatagattatttattgtagcaactaacttgaaaagtgatgcatttgtggtttcatgtatcttagaagtaaagaaaattcttctacaagccaaacagaaagcccttggctgcctcacatccccagtgacaatatttttcacagtgttaacaactcttagaagcacaggctatgacctctgccccaaagcacttgactctcagccagggtgaggctgtgggcaggaggacttctggaacatgagtgatacctgtgtgcccagattcctcgttctctgtccccagaggccttggttctctgacttctcggtcagctccactgtcttaccacattcaaacctttcttggaaaagaatcgttcatcctttcacttggatgccctctaaatttgaacacatttctatcacagtctgctaagtcttattttcatctgtgtatctctccctgttttactcagacttttttttcattattgccacaaatgcttctttaaatgatttaggcaaagatggagttgattggctcatgtaacagacaattctgagaatgctggctgaaggtatggctggatgtgggagctgaagcgatgtgatgtcgggacactgtctccctggttccctgggctcagtttcctatcttggcttcatccttggtgggcttttcatctacagtgacaaaataaccccctggccaggcatgatggctcacacctgtaatcccaacactttgggaggctgaggcaggaggatggcttgaggtcaggagttcaagaccagcttaggcaacatcaggagacccagtctctacaaaaaatagaaaacaaaattgagctgggcatggtggtgcgtacctgtggtcccagctactcaggaggctgaggcaggaggatctcttgagcccaggagttcaaggctgcagtgagctatgattatgccactgcactccagcctgagcaacatgg

SEQ ID NO: 82323 - DNA, 1054 bp, Homo sapiens
ctcagcctcccaagtaactgggactacaggtgcgtgccaccatgcccggctaatttttgtgtattttagtagagatgggatttcaccatattggtcaggctcgtcttgaactcctgacctcgtgatctgcctgcctcggcctcccaaagtgttgggattacagacgtgagccaccgcacctggccgcaatcagttaatttttacaactcttaggatgttggtagagttttccctgtttgagagagaagaaagctgaagctcagagattaagtaatttgatcaattacatctgatcaatgatcagtatgggtgtgctgaattcagtgtacctttgttcattcaacaacatttatcaagcacctgtgatgggcctggtgctgtctaggtgttgggcttgtagctgtgatgaagagggtgtgatttcctcttccccagggctcccagtccggactctctaatcttttcatggctcctgataagaatttcttcccaagcaggtgagaaggtcttattacttcagccattatctgtatctctcacagagcctatgtcctggggactgggcaggaaggagggtcctaccctgtaggatggctgaggtagaaaaggccatgtttagccaggtccattccagttattctcagagacccgaatggagaatgacaggtgtggctgccaggcagatgcatcccgcgtttccgtgccctgcatttatctttgccatctcactgaaatgaatgtaacctcatggggatgttccttgtcttcccctgtggctgatgggtgtgtttgttaaatatctgggatgtttaatttttagacggccttgtagggaagcgaaaacatggctcatccctttcagctagacgtagggaaacacttcaaagacactgtcacctctgaagccatccactttaggtctttgaggttttgagtaaagacaagtgcagcaaaatgacaaatgttggtttaaaaacctaagcagtctggagatctttgggatggcatgttttgaaacaaagcacaccgccaaggaactcgcttagcttggggc

SEQ ID NO: 82324 - DNA, 1050 bp, Homo sapiens
cttggtgtgctagtgttagcttcacggtactaaataacttctgtgtccagcaacctattctcggagataaagagaagctgccccaggccctgtgccaggctggctgctctgaagtcacatcttaaccatgtttaaaatcctgctcgatacgatggagccccactttatagccgaggaaatgggagcagatgaatgatggggcttgggtgtgaacctgttctcatgcctcctgccagctgacctcttcctgcctttggcctcagcttagtatcacaagccctaggacgggtagctgcctccccttcctgttcccagggaccgtagtcttcctgctgtgccactggccactttgtctgagaaccgttgaccacctagatccccacgagatagggagctctgtgagggcaggggcaggggcaggggcagggtccttgtcacactgatgcccagagctcagatcagtgcctggcacaccgttgctcaataaatgtttgttgaatgaatgaagaaacgtgaatgaatgactgaataagtaaatgaattagtgcttccaggcctgtgcagggaggtgcatttgacctcttctgtggtttagctgtgtccccacctaaatctcatcttgaattgtagctcccataattcccacatgttgtgggagggacccagtgtgagataattgaatcacagaggttgttcccctctcctgttcttgtggtagtgagtctcatgagatctgatggttttatgagaggtttcctctttctcttggctctcattcactctcttgtctgccgccatataagacatgcctttcgccttctgccagattgggaggcctccccagtcatgtggaacttgtgagtccattaaacctctttttctttataaattacccagtcttgggtatgtctttgtcagcagcatgagaacagactaatacaacctcacaaagggagagggtttataaaataacccaaagcagagagagattgtccagcatggtggtgtgagaaaggactctggttccaatcccacggcctttagtgttag

SEQ ID NO: 82325 - DNA, 1023 bp, Homo sapiens
gggacagcggggtttgggaaaattgaggagggtcttgaaggaggagtacacaccctcaacctagcatccagttctcatcatgtctaaaaactaataaaacagcacaggcagtgtcagcggggtgggaaggctggtctttgggcacttccggccatgccagtttcagaagcattgagtcaaatgtccagagacagtagagcatgggctgaaatggagtgaacgtaatctgtgcacctcagttctctccgagacacaggggctgctcttcagctacagttacggtaccacggttccaggtaaagcacagactggctgggtctctgccacatccagacctttatgctacatccttctttcaaagatctgtggaatggtgctggcaattcttagtaaataatgcatttcctcttgtactaggctgcctcatttacataacccagtgaactgaaaagtcgtttttcttgggccaagttattcatcttattcttggcatttggctgcaataatatccgtctatcggcatggccatacaataattcaggcattttgttctagcagtgaggacacttatagttaataacacatgaagccatttcattaaaaggaaagttttgttaggatacattaacacaggccttgaaccaaaacacaaatcatttcattccctggctattgaggaagcaaaatgaattgggaacctgaagccattttttgaagaatcgttgttatcctcatgtcatctgattctctctgcattcaacagtcagcataaaggggatcagggttttaaggagttgataacacttgtttttctctgaggtggaaaagatgtggtataggctttaggggcagcattcactgaaggcccggtgctagttccgctgctcactcctcgggcaatagagagcgcatttcttagttgctccaggtttgttttaaggcatacaaaactgcagggctggctgggcgcagggtggctcacgcctgtaatctcagcacttttggaggccaaggcaggtggat

SEQ ID NO: 82326 - DNA, 1045 bp, Homo sapiens
accccgcccggagagcctgtgaacagccggcccaaagcagcttcccgcttccccaaactgtcccggggtcagccccgggagacccgcaacgtggagccccagagcggtgacctctgacctcgacaaaaccgcagccacgggccctgtgcgtggcaccagctgcgtccaccccagccactgccgctggcccctcacctcagcgtgacaaccacgtccacctggtgatcctgagagcacacgattcccaacagttacacaacaccccgattaaactaatcagtcttcgagccgcatgataccgtgacccgagagaccaaggcagcacctcgctggagagactgggacacacagtccttctgcttctggggtctaccctgggctgcaagggctgttcctccacctttctgtagttcagggctggcaggagggtgggcaccaggtcaggctgggtgcgccatggttgagaggcaaaggtgatcccctatataggaaggttcatgcagagccagcctctccactctttcccacgtggggactagaatgactattagcctctccttttgctttttaaggttattacctggcctaacctagggatggctggctttgcgggggggggggggggggggggcatggttcctttcactgcattttccaccaacagtcattagacacctggcactgtcacagctcacttttccagagggatattcctgtggctttggcaaggagccattagtgatgtgcaacttgagttcagagaacttcccctacctcccccatggctggcttcaggaaggaccagtgccctccatagcctgaggccacctaggccctcgccaggcttggagtggggggactcagacatctggcccagccatcagcagcaacctagtaacccggcgtcatccagcgtgtccaaagtagcattggccctacagtcatgagagacttgggtcagggaaccactgcagaaggttccagggttttcaaaccaggctccatgactatgaagttggacccagtgtggacacttaacagatca

SEQ ID NO: 82327 - DNA, 1019 bp, Homo sapiens
atataaaaatagcccaggcaggtttgtgaatttatgtccttttgcataaatcagagagctggggccctgtcctgaattatattcaaaatagaactgcatttcctttaaaatggagcgaatgatcctggaaatcagtttttaaaatattagactatctctgcatggatgtttgaataaattctcctaatgctgtgtttctcaactccacttttgaattggattgtattctggttagcatatggtcaaagtctgcctatcgacctcaattccaatctgacagccaagtatgatctttgataattccttaaacaaactacacctgattgtattaaattgtggtcacgattcccaaaacgctaggcaaaacaaagttcatctcctttcctttccagcggaacgaacagctgtctcccttgttgtgagagccatgcagacttattttgacaaggagccaagtaggcaccatttactgttcaattctgagacttctgatgataggaacagaatgcagttgatacagctcggagcttaaatttgccttcctgggtgcctagaaaagtcacctttgcacataaattggccatttctgaaaatctcctccaagagactgaaaccaaagctctaaaacgccgcttcttcagtctctggggagcacgttgagttggttcacatccacattctggctgtgtagccactccacagatgggtggtctcttgggatcagaatgcccctccactcatgagactcttcattttgtccactttgacaggaaaagtgggaatgtatgcagagctctcaaaagaaacaaaaaaggccaaaacggtgccttcagccacatcctctgaattggccctgacttggactaaatgcactaatgcaaaatcccttgacaaaagcgcataggttatttcaaaccagcattgttttttatgtaacctgttttaccgcatcttctcagcagcttctgaccactgctcaattttctcctttacagccattgttctggtggacaaataac

SEQ ID NO: 82328 - DNA, 1056 bp, Homo sapiens
tcccatttaaaatgaaatttttaggctgagtgtggtggctcatgcctgtaataccagtcctttgggagggcgaggtcggtggatcacctgaggtcaggagttcaagaccagcctggccaacatggtgaaaccctgtctctactaaaaatataaaaattagcagggtgtggtggcgcacacctgtaatcacagctactccagaggctgaagcaggagaatcgcttgaagctgggaggcggaggttgcagtgaacagggatcgtgccactgcactctagcctgggtaacgagagcaaaactccatctcaaaaaaaaaaaggggggggtttttaaaaaactatctcacactcatgcccccgcccccccccccacctttttttaagcatccatagaatccagagtttgtgggaccttatcagctagaggaagtttaccctctttgttttatttcctcagatttagtcttgaattcattttcccacgtttggcctattttttaggttccaatcagttcaccgcaaaacatcacacactagtcatttaatgtctgattctcattcactataaacctagataaaagactaactgccaaagctacatctggtgtaaagtgatggattagatttctcactttggaggtatccttaacagttgggctaattaaagttgaaatcaagtcctgatggtaaatatttataaattgagaatctggcgtgtgtaaatgtatgctgctgattcctaaagttaaatcaacgtttatccattcagcaaatagcatggatcccacgctaggcactgaggatggagggatgaacaaaacagagaagtttcttctctgaggttgtagattgctcttcaactaaaaatgtctgggtttttctgttcttttgttttttgtgagagggtctcactctgtcaccgaggctggagtgcagtggcgcaatctcggctcattgcaacctccacctcccaggttcaagtgattctcctgcctcagcctcccaagtagctgggactacaggtacccgccaccacacttggctaatttttgtatttt

SEQ ID NO: 82329 - DNA, 1028 bp, Homo sapiens
tcacaccatcactcagcaacatagggcagggggccatgtagtcatggaatttctaaggtatcctggggaaggatgggcagaggcccccgtcggacttgttggtttgcttttagcacgtgactgcattttgcagtttccatgtgctaggtggagtggatttccagattactctttttttaaattttatgttagtaagtacttaagttagttatttcaagtgaataagcccctggctttctcaggacgtgaccctcactcttccagggaagccgtggcggacggagcagacggaggacctgaagcgagtgcttagggcagtggacagggccatcccactggtccttgtcagcggcaaccatgacattggcaacacccccacggccgagaccgtcgaggagttctgccggacttggggagatgactacttcagcttctgggtcgggggcgtcctgttcctggtcctcaactcccagttctacgagaacccctccaaatgccccagcctgaagcaggctcaggaccagtggctggacgagcagctgagcatcgcgaggcagcggcactgccagcatgccatcgtcttccagcacatcccgctgttcctggagagcatcgacgaggacgacgactactacttcaacctcagcaagtccactcggaagaagttggcagacaagttcatccacgcaggtagaggccccgggccacgggtttcagggaggaaggacaagtctagagagggcatttccagatctttctcccgtctctctgcaatgtgtcaaaaagggagagaggactaggccgggagttctgataccagctcttggacttgcagactgcatgtctggctagttaatcctcctgtgcctcagtttcctcgtctataaaacaggaatagtaatagtagccttattgcaggatggtgtcaaggattaaatgagaaaggcctccaagacatggagaacagaccctagcctaagtactcagtgtgccatagctgctcacagttgaagattggagttctggaa

SEQ ID NO: 82330 - DNA, 1038 bp, Homo sapiens
tattgaatctgtaatttggggtgattttatatttggggcctaactagatgacattcgttttatgagtagggttataatttttagcaggaccttgtatggtaggctactaaattacccagaggttagtccatacccataaactctctaaataatttgaataatttttttcctgtttaagtaggtaaggcactttgctaggagattttgcttttactttcttattcctgaaaaatctcagcattcttgcttctgaataaatgaatcagtggtcatctgtattcatgtccacagcttacagttacacatttgtgaactaaaatattcagagacatttcatctctgcaacattttttttaataataagcaggtgtgtgtgtgtgcgcgagtgtgtgtgtgtgattataaaagtaatagatatgcaatcaaaagacattttggaagaagagaggaaaatcactcgtaattctgtaccacccagaggtaataactattaacattgttggcatatttccttcctaatttttaaaaattttttttgcatagctgagttcctacattatttgcggttttgtgtgctgcaatttttcatataatatcaacaacctccttattattacaagcatcattgtgaacggctgcgtaatgtcctttcattaagaacacaacaatcctttactgggctgctcttctcgtgatgcacattcggattatctcccggatacatgaattcttaacattttctaaagaaagaataatccaagccacgacgcatctgccaacaggccctctacctgcgtcgggtaccgtgttaaccacttatccccaggaaggcgtcagtcattatcatttccatgatgactttgtcctggtagaacaggatgctggcaatttttatactttaaaaaatgaccggattcctcggttttgcaggcaggggtcccctgacacagggaagatgaatgccaagaagaccaagaagagagagagaaaattgctcaaatgttccctccagccgctccctcccactgttccttatct

SEQ ID NO: 82331 - DNA, 1132 bp, Homo sapiens
ttcagctgcagttcctgccttcttcctgaacactgctccagaagtaccagtttgtggcaattccttctacttgtagtaaactgtataatcagcctactttattaacacagtgctttggccaggctttcatctcttgccattgatctcaggcacatgatctaatggtgaagagtctgggttttaaagtcagaaagtgaagacatcatggaaaatagtgccttggtcagtgggctggtgggaggctgaactgaagtcatgaatgggaacaatgccaggcatgtgacaggcactcagtaattgtcatggctatgagtgatggcgtttcttgtattcgcttccagcttgtgggcttcttggataggttctctgccatttatctgattgtatcccaagtacctgcctcactgtctgatgacacatcataggcgctcaaaacatacaggctttttggagattgggtttaaaactcaatgtcatttaggagctatttgtccacaggcatgctcctggaccccaatgagcctctgcttccttatctgtacagcaggggcgatgatatctgtattcctcggttgcttggaggattaaacaagattataaattgcagggcctgtgaggcacactgggggtggcagtaatggagtgatgtcatggctgttttcctttatcctcacttgacatggtgttcaactgcatggtactgtgtcccttttcctgcaggaaggaaaagtatgggagatagaaaggggctttgttttctctttctttgactctccagctcttattcagaatattccaaaagcttgcctggagaagcagggacagccaaaatgccctatgacaaagagtggatacttaattgcatgatttgcctcaataatgtgttcttcttccttttgttgccatatattttgctctgttttagagcagctgtagctatctctcaaatttatttggaaacatggtctttccagccaaatgatctgacaccccaccgtctcctgtaaataattacacaatgttttaatctggcaacatgtgacagcctgctagaaggacttgtcatccttttttaaaaggttgccattaggactggtctggcagattgtctgaaaggcatgaagtccgttgc

SEQ ID NO: 82332 - DNA, 1098 bp, Homo sapiens
ggctctgtgtccccacccacatctcatcttgaattgtacttccataattcccatgtgttgtgggagggacccagtgggagataattgacttatgggagtggtttcccccatactacgagatctgatggttttatcaggggtttctgcttttgcatcttcctcatttttctcttgctgccatcatgtaagaaacgccttctgcctcccagccacgtgaagctgtaagtccaattaaaccccttttccttcacagtctgaggtatgtctttatcagcagcacaaaaatgtactaatacaatacccagctctctctctctctctttctctctctctctctccctctctctctctctctctctatatatatatatatttgtattttttttgtagagatggggtttcaccatgttggccaggctggtctcgaactcctgacctaaggtgatgcacccgcctctgcctccctttggggttttctggagctaatgaacgccttctgcagaagtttgcacaatcccctggcaaatcaacatgccatagacaaagcgagtgtctttctagcttgtgcttagctgactggattatttacatcttctttttcattgtttttgctctaaacactcatttcctggagttagaacattttgcctccttgatgggcctattttctgcaacgaaatgaagcactgaaaaggagcatgatcccaaaggggttcaattatcaggtaattggtcaagtgatcagaatgtggaatgaaaaaaaataatgagaggttggaaaatggcgcatttgaatgccagaacgggtgaggacatatatttcgcgaacccagaatttagaaagtcacctgcatgtttcaaattctgtatggtttttccccagttcctaagtagtttattggaaagccatggtaggttctattcaatatgtattatttggtttgtagaaaaaatttaccattcccttctttctttatatattatttgagtgaaataccactgtcatcatccataaatattcttgtgaagaaattttgtattgatctgcaaggtagcaatgtaacaaatttcacttggataatatacctttcttaatgt

SEQ ID NO: 82333 - DNA, 1052 bp, Homo sapiens
atgcactaccagtttgcatatgcaaatgttccaaaatctgaaaaaagtctggaatctgaaactcttctggtcccaagcatttcagataagagatatgcaacctgtacttaggacaagtcatttggagactcttgaggatattgctgtcacagttaattattttgggggtggggggagggacagggtcctgaaggacactattttttttttttcctttaacaactgttagcataccctacagttcaccatgtgaattgttaattaaataatatttaccactttgggcttctttctgattcaacagtgtaaatgtgtacaattcagtggcttttagtgtattcacagaggtgtacaaccatcacaatcaattttagaacattttccttaatccaagaagaaaccctgcaccccgtgctgaaactgcccccaaagacccccaacccctaaacagccactaatgaaggacactcttatctgctgcataccattctggcagcttcacagtggggacattacgattgttaagtcagaaagagtcccaaagtggtaaatattgtttagctactctttggtgtgtgatttttttttttaaactgctgaaataagattagtccccagagcagttgaagggtattgctggagacatttagattgtgattcactatgcagattgctattgtgagaaactgcaaaaattgcattttgttgccatttgctctttagctagaaagcctgcaggcggctgtgaagcttcccatctttcctgctttataaccaaagcaatatccacagtatataaaggaaaagatgttaagaccaaagcatgtaaatatatatgtgtctctcatcagatgttttctcagccccaccatgtgctgtgggaaccaagagataggtgagtctttaaaaagcctgtctctgctaagataagggtaggggttactgtgaatggtagtcatggcacgagtaactcacttttgaccacttgctctgtgtctagtccaaatgctttacatgttttaagtcattaattcttctcaacaacccttttg

SEQ ID NO: 82334 - DNA, 1055 bp, Homo sapiens
atgctggagtgcagtggcatgatctccgcccactgcagcctccccctcctgggctcaagccatgctcgatcctcccacctccacctcctgagtagctaggaacagagaaggtgctaccacgcctggctgatttttatattttttgtagagacagtttcgctgtgtcactcaggttagtcttgaactcttggacccgagcaatcctcctgccttagcctccaaaagtgctgggattacaggcatgagccaccgcacctggcctaaatttttttaataactttcttgaggtataatttatgtaccataacatgcattttaagtttacaactcaagggattttattaactttagagtggtgtagtcacaatctaactttagcacatctctaccttcccaaaaaagtggttttatacccacttgcaagtctcttcatgttgccactcccagcacaggcaactgctaatttacctccatagatgggccttttccggacatttcatgttaatggaaaaatatgtggtcttttgtgactggcctctttgtggtagcataaggtttctgaggctcacttattttgtagcttgaaccaatactttgttcctttttactaaatgatattccattgtatagataacccattttgtttatccgaccacctattgataaacatttggacattttttttttgacactgatggacatttcacgcatctgggtacctcttgtctattgggaataaagctgctatgaacagtcacagacacatcttcttaagggtatttgttctcatatcttttgggtagatacctaggattggaattgctgagtcatacggtaactatgtttaatattttgaggaaccaccaaactattttccaaagcagatgcgccattttacattcccaccagcagtgtatatgggttccagtttctccatatccttgccaacatttcttattgccactcttttttattataaccatccaaatcggtgtgaagtagtatctcattgtgagttttttttgttgtttttttgagacagagtctcactctgt

SEQ ID NO: 82335 - DNA, 1009 bp, Homo sapiens
tgcagaggcggggggtgttttccacagagccaggggcaggaccctggccgcgtttcccgcaggtactgcccgcccctcacccggggaggggactctggggctgcggaaccttccgccgggggaaccttttgttcaggtgtgcgctccgccagtcggacaccatccggggctgcaccggggcctgggagccgccatagctgcatcaaagcctgctcttagggattccaggggcgcagttgagaggcgaggccgagagagcgatctggtctaggagcctccttggccttgacctaacttcccccagagaagggaagtaagaggagggtagcaaagcatagttaatgacagcttggactctgcagcgagacctggtttccaagctgtgcattagcatcttggcctcagcttccacatctgtgaaacgggaatacttgtgggtgttactggataagcgttcggtgcatgttagagggtgtcggttttattaaggttgttcaccgttatgtattctgtactccataatgacgtttatttaagtcattcaccgaaatggtaacactgccccatcagagcagtagagagggagggcattcgagagtcgtagtgaagtgcttggattttggatttagattatctgctttgccttaaaaatgggtttgataatacctgcctcatagggttgttggaagcgtaaacagatcaaaagtatttttgtaacccggtgttggacgcatgctaggtgctaagtaaagagggaggtttgtttctggtttgttgattcccctctgtggctttttgctgcctgcagccagatcgcctcccaggctctcaccagctttatacccccagggaagtcaccctaaatgccctatatgatcaggcttgtgtccacttccttcagggttgtcattctctctcttgcccagttctgcaacaggttttgttgttgcccttgtttgaactgcatttaaaagggccaaggccgttctttccctgagggtcttggcgc

SEQ ID NO: 82336 - DNA, 1021 bp, Homo sapiens
caggcttcacaagatcgattcctgactactttgttgtgaattgcacaactcacacagtaatttagcttcacatacatcttgggaagcacataggcgtcgaagatgctcgcttcagaaatgtccctgactgctgtggcctccactgtgttttgaatgacgaatttcttaatggctttatccttgggcacacatcaggcacagttcgtgcagcaaataggctgcacatggccgcagccctttttggcatgaccgttgtcctttcttttctttgtcatcttggaggcacggaccggagagggtattttctacatttttatttttgtctgtctcctctgctgaacgctctactagaaccttctagtgggcactactggatccttttgttcaacattatgcttccaactttcagcatgatacctgacacattgtagatgctcagtaaatatctgtgacctgaataagtaactaaatgttagattaacttttcattgttttctaagctcttattcagtaaatacttgcaattcgttagcatttgcttttagaacttaatcagatttgaaatgtttataaataatctttgtatatttcctaaaatatttagttttcctccttaagatttttttggcattatttgaaattaaatcaagtagttgcttgcttattttgaggaaaaattattttagctagaattaaatagaaaagaaattcattttcattatcctttcaaaaccttttctgatgtccccaaagctaatgtaggggctgtgcctctgtgccctcatattaccctgtatttctccccagtcatagtgctcacaacactacattatatttatgtgtttgtctatctcactcacaagataagctgaagcacaaggaacaagttgttcatcccaggctaaataactggtacatggtaggcactaaagacgtatttgttgggtgaatgatggatggatatagtactgtgatcgttagtgaacttctggaggcagagagactctgaaattcataatct

SEQ ID NO: 82337 - DNA, 1116 bp, Homo sapiens
cgtacattggtgataaagatagtaccttcctcctaggattgtcagggtgaaatgaaatgcttatatgtaaaatacttggtagcatggcacatagtcagcattctatgatctctgtgatctctgcctgttggtgttacgatgttcctgttctcgggcagtttaatggaggagacaagtaaagaagtagttatagtacagtatgggtacaaaatgtcataggaacaaaaaaaactaaagtaggcttttgtggagctaaaactcctcccaaaaacctaacctgcttctattatttttattttttgaaaaaggagtgtcttgagttggtgtgactaaataggaataacatgattttacacatgatttggaaccttcggcctcccacttgcttgctggatgaccttggttaagttgcttcccttccttggtctcatcatgatacctactgcatggaattatcataacaattaaatgaaatgaaaatctatagaaacacctaacccagttacctgggatgtagtatcagttctcttcttcctcctgggttccaaccaaaataaagacaactttttggagcgcaacattttcttaaattgagtttctccttttctttggaagttcatttttattattcttgactctacgtaatatttcaatccaggctaacaaaatgtggcctcttagagtccttgggaaaacccaccaattaggtacagaatattttctgagtagtaaattagttatgtacgtgtattgggggggttattgaaaatcctttgtctatgaattcctaaataacattattaatttttactatatttggaagataatttgctgagctagagtaaatttagctccatccacctctatccaaaacttaaacattaaaatagtaaaatctgagtttagtttattgaactattagaagggtcataaatcactgttagtattattgtccatacccttccagatatgagaactggatcaaaagcatgcaagtaccattatgccaaatatatataaggtaaccagcttgatttaggtctaaaagacagactcgtcttggagtaattgtggttttgatctagaaagcatgtctgtatgcctttatgtcatctc

SEQ ID NO: 82338 - DNA, 1050 bp, Homo sapiens
gtcacaattactcaactctgttattgcccaaaaacaagtatagactgcttacataagtaatggtgtgactgcattccagtgagactatagaaacaggtacaggatttggcccagaccgtagtttgctgaccctttccttatctgaataatacactgcttctattcattgaggttcaaagtgtttttgaaaatgttgttgctttgcttttcatttgtttgttgttttgcttttcgtgttgtttgtagcatttataaaaatggggtgttaaaccaagaccagaaatacatagctgctgaaactctagaaaattgttgaaaaatatttgtctctttaggttccatgtagcagtaaactcatttttagaacagcacaaacctgaagttgtagaaatccatgtttctatgacacctaccatgcttgctatacagactgctatactggacattttaaatgcatgtctaaaggaactaaaatgccataacccatcgcttgaagtggaagatttatctttagaaaatgctattggaaaaccttttgacaaggtactctttttccttttaagcacagtttattatgttgtaattttaaagaatgcaagttattttaatatttgcaatgttgttaataggaatttgctgttatttaagaataaaattggaggtcacttaaaaacatagcttctttggtttactggaaagtaataatttatagtaaagtatgtggattggcatataagcatcactctgacttttgcagttatagtaagtgattatctcttattttaactataatcaagaagaaaataaataactttttttactttgaaatgacaacacttggatgtctacaggtagaagagttttacataagaatgctccataattgtacatgaatttatgatctcttttatggaataaaaaataatttggatgagttttcattactgaggagtgtgaaacttgctctgtcttaaaattacattctgaattgaggaaatggtaagacatcagttccaggaatttttattctaactaattttttattataga

SEQ ID NO: 82339 - DNA, 1069 bp, Homo sapiens
acagtaaagaatgcactgaatgccagtacactttcatggcactgccttggttcatgctacggcaccagcatgtacaattatggagcattcttatgtaaaactcttctacctgtagatatccaaatgttgtcatttcaaagtaaaaaatgttatttattttcctcttgattatagttaaaataagagataaccacttactatataactgcaaaagtcagagtgatgcttatatgccaatccacatattttcctataaattattactttccagtaaaccaaagaagctgtgttttaaatgacctccaattttattcttaaataacagcaaattcctattaacaacattgcaaatattaaaataacttgcttttacgccatcactggaaatgtcaacgcagtgaaaaaagtcaaataatgtcatggtattgttacgagaaaagttctgacatcacatagccctgaaaatatcttgggggcccctgggagttcacggaccacacccagaaaaccactggtccagctgaacagcgacagatcacagtagtgggaggcggtgtggttggtaggaagacaggatgacagccagttacgtatgtaggtcatgtgaccatcagagactgttttaaattaaccataaattgatggcactttttcttttaacttttcgtattaggttggctgtttcttgactccagcacctcgatgtttataaatgctcgagcaagggtttatcatcttccagatgccaaaatgagtaaaaaagaaaaaatatctgaaaaaatggaaattaaagaaggggaaggtatcttgtggggttaagtctttaaatgtgttttttatttcggtatttggtatggaaatttaaagtgcaatttaaagtcttctttggccatgtgaaaagtgtgttccttgaagataaatgtatgtatgtttgttatatgtaacatgtaatgtatgttgaaagtatatatgtaaagtatatgtgtaatgtatgtcgaagtatacagcatggcaagtcttgcagtctattgcccagggcttccaaataacagatgtcaaatattgatca

SEQ ID NO: 82340 - DNA, 1028 bp, Homo sapiens
aagacgttggagaggatcacattgagataaacctgtggtctgaattgtcctccagtgtagatctcagcacatacttcctttttctcttccccgtctcttccttcatctccagttgcttttcagtggtttgtttaatagaatattagaaatgtgacaaagacaactgcttttttgtttgtgaagcagtatgataaaacacgagaaatatagctaaaatactgcttttctaagaaatacattagtaaatctccctcctccctgccttatgcacaatatgtccttgggtgggtggctgctttaccgtttattgggaaatgcttttacaacacagccaattatgatcaccatcaatagaatcactctgggaaaatatttcttaggaagtgtgttgtttgtctggacatacacgtgtatgtttttaagaatgagtatctggtactattccaaatccaagtagaaaatgcccttccattttacgaaaggaaaatggtgagatgttcacaaactggttggctacctcttgccctgaaggcattcgataaatctgataaccacctaccagggatattgtcaagaagattgcagcctggtgtgggaagatgggccagataatctctaagggcctcagaagccagggcaagtgctggatggggcatcacagagctgagccagagaaagttagatcagcagagaccatggcctggacggagtgggctgggccagagcaaacttccaagcctcagacattggcaatggagggcagaaattatttttagcagtagtcaacctgcgaggactgccaagaccctaggccaaatttcaaaatggataaccattctgcagtggtggctgcgggttctcagtgtatgtgcaaaatatacatataacctggatagcccaggagaagaattcttggaaatgggggtatttgctgaatcagtggcatggagtcccacgatgggggtcagcatggtgcatgggcggtcccctcttttcccttcacatcctctcgaatggtgatatgcctt

SEQ ID NO: 82341 - DNA, 1108 bp, Homo sapiens
tgtagatcattttcaatactacaatttacacacaataaaatctagaattttgaaatttgtttcagaagtgttgacaatgttttctcccacagggaaaaagcaagcatggttgtccctgaagaaagagaaggcagagatgaaacaaacttagacctagtaagaggcacagcatctgcagatgtttccactgacactcggaaagccggtgagtcctgcactttgtcaggcacctccattgcctgcaaagggggctgtgaagttccagagttactctgccaaggcttggtctgtattaacaaactcttaaaaatgggggttgggccaaggagaggatgtgtacttccctactctaatctcagctctgccattcactaaccatgtgtcctccccagagtgaaggcactgtgtcatctgcgaatcatgtgaggttgagttttaggcaccccagcttagaatgggttatgttccagcatttcctttatatttggttggttgagactcagaatgtacttttgcaaataaactttgttaaacggtgattaggttcttatctcaacctaaaaagccagtttaactcagagtagttaaaggaagtttctccttccctcctctgcctctccccttagttgtatacataggtggggtgcatacactcctcctctccttctgtattcatttcttcttggtagctccccagatacctggtgtctggtacgcattgctgtgcagtgtccaaactgtggcatgccaccaagacctgctgaattccaagtgcactgtgatccagaagtcaccattttcccattccccaaattcctattttcctatgccagcagctgatttcagccaggtggcatgagaaaagcaatacgattgagttggtttaaccttcggtgaggccaagtacagttgaagcagtgggtgtcagaatttagtagactttagaataacctcagatgctcattaaaactgtagattcataaccctcaattcatagaaattccaactcagtggatgtgaaatggagccagcagctcgggggcttctgatggaagtggtttttggaccatactttgggaaacattgcctcagagcctctgtgtcttgt

SEQ ID NO: 82342 - DNA, 1321 bp, Homo sapiens
atagtccctaaatcactagatttgctcagtgagcatttttaacatctactggggccgctattttaagcctctaccctcaggctttgtcctaggaattgggaatacattgaccaacaaaatgtggtcagtgaggaaactacagaggggagaccttagcaggtatgtgtggatttatgaatcatcgcaagtaaggaactactgacagtctaactttcctattagctcggtttccttcaagggaaattgcctctactttataaacaaatctttttgaaaatatagaaattatatggaatattaccatatagaattatgtaaccatccatcagagttaacaacagaaacatcgatttttagattttgttatattccttctttgagagttcttccccagtgacattacttactttttctctgtaggtggccaggaacagaatggtacacagcaaagcatagttgtggatatgcgtgaatttcgaagtgagcttccatctctgatccatcgtcggggcattgacattgaacccgtgactttagaggttggagattacatcctcactccagaaatgtgcgtggagcgcaagagtatcagtgatttaatcggctctttaaataacggccgcctctacagccagtgcatctccatgtcccgctactacaagcgtcccgtgcttctgattgagtttgaccctagcaagcctttctctctcacttcccgaggtgccttgtttcaggagatctccagcaatgacattagttccaaactcactcttcttacacttcacttccccagactacggattctctggtgcccctctcctcatgcaacggcggagttgtttgaggagctgaaacaaagcaagccacagcctgatgcggcgacagcactggccattacagcagattctgaaacccttcccgagtcagagaagtataatcctggtccccaagacttcttgttaaaaatgccaggggtgaatgccaaaaactgccgctccttgatgcaccacgttaagaacatcgcagaattagcagccctgtcacaagacgagctcacgagtattctggggaatgctgcaaatgccaaacagctttatgatttcattcacacctcttttgcagaagtcgtatcaaaaggaaaagggaaaaagtgaacagtgatggctgttttcttatcccatgcctgtacttttcagcggctccttgccagacatcataggtcattattaattattggtttgctatttcattcttttccaatgctcttaatgattgtacggtggaccagaagccaggattcctctctgaactctgcagttag

SEQ ID NO: 82343 - DNA, 1056 bp, Homo sapiens
ccgcaccgtccccgggactcgcgcggggcggggcggccggggccgcgggccggtgcctccttcaaccggtcctcgcgcccgggcgcgaccccggggccgcctcagtgtccatctcgactgcagagttggccctgctgacagtggcagcggcgtttatggagcctctgctgtgtgccgggcacttaagttgcgcgcttgcacgccggggctgcacagagaggtggagcgcccgggccagagccacactgcgaggaggcggtgggaggggaccgggacccctgcgcccccttcctcttcccacctcccactcccctcagcccttttctcctggggtcccgaccaggcttcagagggggtgtctgggagcgccctgaagttggatgcagcttggtatatgggtttcttgggagagagtttttccagggcttttgtctcgttcctaaaagggtccccgatccccaagtggtcaagaaccattgtttggccctgcttggaagcagaggtgggctgagagcagcgggcgtgtgctggtagtggggtgtcaggcccaatgaagtggaatattggagcccagggcttgccttaggcaaaggaaactcttctctaaaagttcgatttttgtttcagcacgcgattccactcttgggaacagtggttctcaacctcgtcagaatcaaggtcccttcttcccctttgcagcaaacatgtataaagccctctttactaccctgaaatgaaattcataaacaatgtgacctccctacacacatccttgaaaagcagtatgatggtttgattgaagcgtaagggcgaaatagagaacagtatatgacagatgttgctgtaccattcacatctaggacatactcttgtgctggaagacagtatatactggggtgcttgtgccagcttctaatgagtacatttgtattggttaaaaaaaattaggaggagctatttcaaacaagagcaagcctgggcaatatagcgagatcccacctgtacaaaaaaagaaaaaattagcgtggtgtggtggcgcacacctgtagtctcagc

SEQ ID NO: 82344 - DNA, 1449 bp, Homo sapiens
aaagtcttaagagtagagtttggaaaggggaggagagaacagtagctttgggccataagttccatgatgagctcaatagtcagtgaaactctctaggttaaggatatgtactgaacctctgaatgtcctatcccccttgagaaatttccttccttcctaactctgggcactttgtttagtgttgcggcatgctggaaatttatcttgagttgaggagagggagtctgactgtattgctgcagagtctaggctactctctttaaatagatgtccaatgtgggaatatggctgaaaaccatcagttcctcccttatcatagttaggcagtggcaaatattagaatttcatgcaagcttttccttcttcagtttgctcagagaggacgcctagttcaaggtgaagattaagtgtttgtgtatgttaaactcagtaagttttattttaaatatacttcagtctgctctaatgtaacaaagttcttcagtctgattgttctagcagctatcactcaaacattaattgctgtcagtgtgaaaggatatcctcctacatcttttctggagtacttgaaaccatcccacttcctttttcttttaccttaagaactgattactgacacttgggaattacaatcagattgcatcaatctttatggaaaggttgccaattattgcactgcaaaatatgcatttccctctaatagtaagtgtttctcttggtgtgtctctcagttcagtgcttttaaatacctcttaggtgaatgaatgctttgtgccatgccctgatttaatatatttaaaagacttaattcatggctttgttaccttcaggtctttgggaggtggaaatggatggaggggaataatttatgtaatacgaaatctttgtaggatcttttgattgattagatgtccttggatagaagaaggatggccggtgactgttacttatactgtgatataaactctcaaatgagtgtgttctttgaagagttgagagcagtgcggaattttatggtgggaatgtacattgagccttgtgcaatgtcttttgtgtgcattacctcattttgttttcacaacagttctgtgaggatagatgtaattaccccagttttaaagagcagaagggctcaatgagattgtgaaatcaggacttgggcatgcagctagtaggttaaaaacaaaacaaaactgtgacttgaatacggatctctctggctccaaaatccatgctttcttccctcggacagggaaaggtggtgttagaatgctcgaaagttcttagaatgttgacattgtagaccatggaaatgctgaacagaatgaagataacgctactttatgagcacccccagcattattttcaccatcctctatttctaatgctcttcatcatcaactcatgaagccaaggagcctgccagggtgtctggctcatcatgttcaa

SEQ ID NO: 82345 - DNA, 1424 bp, Homo sapiens
acccattaggctgttacacgagtccaggtgacagttgatgaggacctgaactagggcactggtggtagagttgtagaagacagaggctggaaatgtttaggaggtactagtcaggactcttggctgcaagttaacagaaacctcactcaaactatcttaagttaaaaggggagctaattggaagattcctagagaaggttgcaaaaggaatgaaatgctgcagaaaccagcacaatttcagggacctcagggattagaagtggtacatcatcacagggcaggagccatcttcacagtcaccaaccaagaggaaggaaacagcttttccctcccagctttggttttaaaatcccaggggcactcttggccttgggagtttgtgctccccggccaggcactggggtctttgttggaagctctctatcaccatcacactgagagttcctggaagaagtggagaagggttgttctggcagagccatctgtgcacgtccactctaggcatatgggttggacccagagatcgaaacgatctgagaataagggaaaggtcaagaatgcctcccaaagccgggcgtggtggctcacacctgtaatcccagcactttgggaggccgaggcgggcagatcacttgaggtcaggagtttgagaccagcctaaccaacatggtaaaaccccgtctctactaaaaatacaaaaattagccaggcatggtggcagctgcctgtaatcccagctactcagggggctgaggcagaagaattgcttgaacccgggaggcggaggttgcagtgagccgagatcatgccactgccctccagcctgggcaacagagcgagacttcatctcaaaaaaaaaaaaaaaaaaaaaaaaaaagaatgcctcccaagttagtggctttggtaacctatgatggcaccacttctgtccaataaaaaggttcagggatatgcaagccaagtacaatgagcaaagtttagatcagcttagtaccacactactcagaaattgtgtctgtgttacatagttttgtgattatttggttgacttggcttccttcactattagaaaccctgagaggacagggactatttttttttgctgcgattctccagatcccagcatactgtacttggcgcatagtgggtgtacagtatatatctatgtacgaatgaatgaatgcaggtgaccatgtgcagtaggtagttagattgtttgattggatctcaggtaagggtgggaaacagatttaggagttatctgtgtagggctagatggttgacaactcttgaaagttattggggaagggacctttataaaacttcagatgttgtctagacctgtgatttttatgtccaggtaatgaaattgtgccttttctttccttttttgtcctgtttagtttttaatgccagtaattatc

SEQ ID NO: 82346 - DNA, 1415 bp, Homo sapiens
acaaaggataaattacccatctatctatcctttttgttacagctttatgctaattatttgcttgtatgataaacactgacatttcctatcagaattattttaaatatataaagccactttaaacatcaccaggaataataatagcactgctggttagggcaccccgtaggtctaaaatagtcttcttatcttaccaaagagaacttgcctgactttgtaagattatgatagcaaaggctacctgaaaggcagtgcatggaaggtaaattgttgggtatacccagtcctgccacagtgttgtttctctcccatgttaagacatacagtcagattacagtgacttagagaataataaccacactgagaataattaaacatcaagtgcttatggtgaaatgagtccacattatcaggcaagtgtggttccacttggggcctgacttgggagactcccttgtagaggattcaagatgccctctgtgctattaataatgggaaatggctctgtgaccttgggcaagttacttaagcttgttaacactctacctgcctgtaaaatgctccattatagagttgttctgaggatgaatgaagatgctacatataaagtacacattataaattgcctatagatgttaagccatggaacaatatcttccttcaaaagaaagggcaataattggcagtgcaggtgtcatgagaaccacacctttgttctgaacttgagtgaaactcaaactacatcaggcatcatttcaccattttaaaagtaaatactggaaatgaaatggacaaatttcatcattttaactatcagctgttgaatgtctctgcttttggatacttttcttaccattttacccaaaacagaaccatcttcacttttcaaaatctgaaaaacaaaaaagagaaggtaaaatgactgaatactgtggtttgttttttgatcttttgttttcatgattattgcttctctatcagaataagaatatttacaaactgtactgaatgcactatttacaacagtgcttacaagtagtgtctaatgtagatataaattgggtatgatatgttcagaacatgtgacagggaatcatgtcaggcaaaatttactaaaagtttattggttagtacagttgttcttttgagaacaagaacatgacagtttagaggcaagctgaaatttatttatttatttatttatttatttatttatttatttatttgagacaagtctcgctctgtcttccaggctgcagtgcagtggcgcgatcttggcccactgcaacctccgcctcctgggttcaagtaattctgcctcagccttccgggtagctgggattacaggcatgtccaccacgcccagctaatttttgtatttctagtagagacagggttttaccatgttggccaag

SEQ ID NO: 82347 - DNA, 1029 bp, Homo sapiens
ctcattctagaattctaagcacttggactacagttctttagtcatcattagcatttattatcttaactttgtattagaagaatcattgttttagtctacctgtagcctatttccactgattttctttagttgtgttatttaaatgcaatgattatgaccttataaattattctaagaggagatgcagagtggccttgcagttcagtactgaccattctgcatgaaatccagcacttacaacaatgccagacatagagtatatgtgcaataaacgtttgagttaatgaatccctttagggcagattgtggttgtaatattttcagtattaagtgaccaagcattcagttctggtagtttagctaaacattcaggtttcatttgaagctaataaacagaccactgtgcaatccaggaagaccggtttgttcactttcccatccagtagtaattaacttttgtagttgtgtttatatagagtaaaggtcaaaggaaaaggtgtatttgaagcagttacagcaattggtttgcaatagtgaaagattttcagtatgctaattaaaaagggacaattcaaatgggatattataaaatgtaaactgttctttttgtaaacagctttattgaggtataattggcatccagtaaactgcacatttaaagtgtacaatttaatcagttctgacacgtacacccatgaaactttcaccccaataaggatgatgaacatatccatcaccccccaaaatttctttgtatggctttgtaatccttcctgcatgctcctttgcccctgtttccaggcaaccactgatctgctttctgtctctgtagattagtttgcttgttcgagggttttgtataagtggaatcatgttgtatgtactcttctttgtttgacttctttcagtcagcctaattattttgagatttgtccatgttgttgagtacatcaatagttcatttcttcttagacatagttggttgtgtagatatgccacaatttgtatatctgttcactgtttttgttg

SEQ ID NO: 82348 - DNA, 1025 bp, Homo sapiens
ttttgcaatatggcccatttagatttagttgttgcatgtggtgaaagatgtagatcaaagttcatatttcttgcatatggctatttagttgttcgagcaccatttgttgaaatgactattctcacttcactgagttgcctttgcatctttataaaaaaatcagttgttcataaatgtgggcctattttggcctctgttttgtttcattaatctatttgtcttcacaccagtaccacactgtcttaattattgtagctttataatgagtcttgaaatctagtagtgttagtcctccaactttttaattttttacaaagttgtttgagctattctgggtcctttgcatatccatttggagtttagaatcagcttttcaagttatacaaaacagcctgctgggatttttgactgagatattgatagtcagtttggagagaattgacttcttaacaacattaagtctgggtcttccaaaccaagaacatgttatttctctcaatttatttatattttttaaaatttctctaggcagtgtttttaaagtagagatcttacacatcttttgtcagatttattctaaatattttgtattttttggtgttattaaaatagtattttttaaattttcaatataaaattacgtgggtttttttggtgggtttttttttttttttaagacagagggtctgtcacccaggctggagtgcagtggtgtaatctcagctcactgcaacctccgcctccttggctcaagtggtcctcctaagaagctggaaccacaggtgcataccaccatgtccggctaatttttttgtattttttgtagagacagggtttcaccctgttggcctgactggtcaagtgatctatctacctcggccttccaaaatgctaggattacaagtgtgagtcaccatgcccagccgtattctgcatcttttcttttctttttttttttttttgagacagagtctcactgtgtcgtccaggctggagtgcagtggcacgatctcggctcactgcag

SEQ ID NO: 82349 - DNA, 1744 bp, Homo sapiens
actttcaatttctattaacactgtttgtggtggtcatggtaactgtagctgtaatagttttggcaagtgttgctgacaagattctgttgaagaggaggaaaacttgggggtagagtgaggtgagattattataaagatctacatcagtatcccactgaaaacttagggtcacttagtaacaggtatttctccaataaactattccttgtttaagacaagttctgagtttttttaaaaaaggattttcatcattaaaaaggcatagaattctatgattttttaaataagtggagtgaaaccagcctaatgtaataacatcttctcagtgtccctattagaaagtttgagttcctctccaatttaaatcaaggtactatatttaggtattttgaaaaatacataacagctgtttgctgagaggcactaatgggactggtggtcaattgtagggaagaaacaaaaggagaaaaatagaggagttattttcaaatggccatgagggcagagggtttgtgtgtattattttagtttctctttaaagaaaaataaagtgcaacctgagtctttttaaaaaaaaaaaaagaaattgtggttgaaagagcaagctgctcctttgatagtttgattttcaaagttaaaacttaattttgtagaggagaaaacagcaagtgggctaagcagctagttttgtgacagtgcaagaaccagaatccagactcttgagtcaggaaactgggttctaatcctgactcttaatcacgggcttaacgtcgcctcttcattggtaaagtggagatgataatgatacctttcttccagttgggggtgaaatgacaaaatgtgttgagttatcactcgtacatgtttaatattttgggtagggaaccattttcccccctctcaaggactcaagaaaataattaagggtcatatacagataagaagatatttactttagagtttttgtgttttctagagtaaattcaactcacccaccacatctacgtttagacttacagatattatttattctaattaaacaaatgcaactgaatttccatgtgtttatacttgctttaaaaactgttagctcttcagtgttaaagattggctctttagtttcatttgttctcaaactttctgtgtccagcaaacaatgcagtatgttaaaacatggtattatttctcttgttacatgccttggagtttaataatattcacatagtatgtgtgtctgcctttttccctttcatggtaggtactttagaatgtgcagttttctctatctgggggcatgctgttgcattagctttaaggtgaaaggagaaggtgaagtagagcatgttgagtgatacaaagtcttggagtagagagaccatttgtatatcagctccctttgccaggagtgccctctctttcttccacatctgcctctactttacaatcttattctttgagactcagctccagcacttacttcctctgggatccctttgctgatccttggccagttgtgttaaaacccctccctctgcacacctccttgctttcacagcactttgctctcatctaatattctttaccacactatgttgtgatgtctgttttcttgtctggcttccttacttaccttaaagtcagggaatagatcttactcatctccatatcccagcacccagcaaaactcctgatcaaaggtgctcagggaaattttattgaataggaagccttgagttcagcgaat

SEQ ID NO: 82350 - DNA, 1065 bp, Homo sapiens
tagtctgcttctaatgccttcgtcaaagtcagtccagccaaggattggcataaattagcccagtttgctacaaatatagtctgcttctaatgccttcgtccaagtcagtccagccaaggattggcataaattaggtgttgaaatagaaattattgaaattgaaagagtagcagttttaaagaggcaactggcctctgtttctctatctttactgtagagaaatattaagaatttaagctctctgcagtcagatgaatttgtaacttccctgtgggagaaactctgcctggtttctggctgctgagacatagaaaccatgatttagtattggctgggattgaggaaaaaaataatgaaatgacatgataaagtgacatttgtactgaagtataatctccctacttcatagatgacagtttcttttcagagggtgctcttaaccagagtgaaaaaacttataaaaattacaaatgaattttgacatgttatagagtggagggtgtgtttaggtatgaggccaggccctgaactgaaatttagccagaaagactgaacactgtgtatttattcagataggaaggacccctaaaggtgtgactgtctgggctgagcatagaatgagcactttctctttcattaccttttcaccatttctaagggtttctgatagagacatcagggagcaacatgacatggtctcatttactcctgaaattcatgttctccacagcagcagaagcactggtgagcaagtagactttacaaggaagcttatccagtagactgatgcctgtacattttacactcaggcaggatgacatggtgcagttctgtgagtctcttcctgtagcagagccttagctttcagatgtatcaataaatctcagtactatttgaaggcttcattattcaaagtgttggggtttcgctttataaacaaaaagtaccccatttgtcataaggaatccaaacaaaaaaatgagaattgttttcgtttatatgcagttatttccagcagtaagttgtgagaaaggtttttaaaacataagcatgagaacctcagta

SEQ ID NO: 82351 - DNA, 1042 bp, Homo sapiens
gggcgctctgagctcccgtccagggcgctccttcttactgggtaccatcccccctgatctctcaagggcattgcttcactgatttgtgtcctcccaccccatcagttcttcactgttcaagggcagtgtggagtaggggcagagtgggatttaatcagtgctgaagctctgccgaacaggtataaagaaacaatggggtttaaatgagtgaccctgaagcagaaagagtaagagcccatatcaagggaggtaggaaaggaaaaaggtggcaggatcagtggtgtggagaccccggtgggattaacggattgttggatccagaatttgagagatagctaggaggcagtggtcagaggtaggtgcgtgaaactggggagatcacggagtgttcctggtttagggaatgatcatgaggtgagtggctgaggaagagtggatgacggggttcaaaggtaggaaattcaaagctgagggctccagagagctggcaggaagagtggtttggaaacaacagtgatgagctggctcgcctccaagcctagtaaagcaggaggattgtgagaggcaaaaatcaccaccacttaaaagggctgcaaaggaagcagtgtcttccaggtgagagccaggtttccctgcttcttctcttattccaccacagtctgttcttcacatagaagtctgatgttttcatttctatctgtccaggcctgtgtgacctgacctctagctgagtttgctgtttctgctccaggcactggcctgcttggtgtgttgagcacaccagggatatttttgccttgggggccgtttgcacttgctattgccatccaacactgttctccaggtatctttatagcttattccctcacctccttctggtctgtgttccagtgtctccatggacagaagtgtcagggcttctctggacaccctatctgaaatggcactcttcctgccaagcagttacaaccccttttcctgccttagtttgttcttcagcacctaccacaatttgacagtatatattttacttatttactta

SEQ ID NO: 82352 - DNA, 2401 bp, Homo sapiens
gtttcacattataatcaagtcatacttgtcagtctgttcatttatggttggtgctttttacatcatgtttaatccctccgttctctaagtactttggggtcataaagagatcctaccatgtttccttctaaaagtttgttctgttttttttcagtgtaggtctaatccatgtgcaatttatttctgtgtgtgcatataagatagagaaaattttccacgtgagtaaactggttgcacaagccagtgtcactgattgcatagtcttatctttttccccactgatttgtgatgccaccttatcacgtattcagtttccttagtatacatgggcagcttcatcggtttataatacattcttttaaaataatatatgcttgtgtcacttctgcactatcttaatcactgtggctttatatattgatacattatgcaaggccctgttaagaaccttgagtggatggttatgattggaacttagtgtgtgggggatagaatagtgggtggttgtgctaggaaagtaggtggacttgattttgtggagggctttgaggagaactctgaggacacaggtaaggtctgtctgtgggaccatgggtcactgggtgctggtagatatagaagtagggcctgggctataatctttcagcagcaatgagtggtttttttcaaagaagattaagggtctcaagaagttatttgtgcattccacataaactcatatatatgtatagtatattttttccagaagtctttttgattaactcttctttaagctgttgctctcttaaaacctcacctcaaatttctcttacatcagaaactctttaaaactggttattgtgagtgttctttgctttggtgttacagtcttcatttgaaagctggttcttagcattgtcattttctttttcagttaatatggctttttttttttttacattgagctttaggcttattttttcccctttctactttgtactgaattgaatcagaaaaaaaaagaatgctatttttaagtgccattattcttttgaagaaaagcttccatttaaaatgtttgtctgaactgtaaggggtttctgtcaaccacttctgcttctgctgagaatgagtaacatgacctttttttctgttttaaagaacaagagcgatgtcacgatgctccaaatgtttgttgtattccttattttggtgacatttgaactcttattaagtagaattgagttagtaaaaattaaataagttagagaaaattgactactacttagattgttaacctcttatgcaaactctagtgcttctgtggtgtttgaaaaggaagtataaaaagagttgcagaatgaggggaaaagccctgaaagcgtttttgtttttgtttttttcaaattggaaatgtctttattctctttgcagactgtaaaggtagcacacgctcattataaaaatttgacgcaataccaaagggtgtagaatagcactcccccatagagttttctgcaatgatggaaatgttctattttgtaccatcagtgtagtaaccattaaccatatgtggccgtcaagcccttaaaatgtgacaggtgcaattgtagaactgagttttttaatttaattgtaattgatttatatttaagtagaacatgtggtgagtagctactgtatggtacactcagagatagccggttgggtgtgtacattctctgtcactctctaccagcctcctgactttcttctctcttttacctctgctctgtcccttttttctcacctcctgtctctgtttctttggcatgcagcctgccaggctgcctccactctccctgccttccccgttctttctcttgttctttctatgtaagtgttatatatatacacataggacattctgttcagcagttaactttttctatttaattatgtatcatggacattttcccctttcagtacatatggatctgttttttttttttcaataatagcgtaatttcagtggaattaatgtaccaactttttttttattatactttaagttctggggtacatgtgtagaatatgcagttttgttacatgtatatacacgtgccatggtggtttgctgcacccatcagccggtcacctaccttaggtatttctcctaatgctatccctcccctagccccctaccctgcaacaggccctggtgtgtgatgtttccctccctgtgtccatgtgttcttattattcagctcccacttatgagtgagaacatgcggtgtttggttttctgttcttatgttagtttgctgagagtgatggtgtccagcttcatccatgtccctgcaaaggatatgaactcatccttttttatggctgcatagtattccgtggtgtatatatgtgccacatttattttctttatcca

SEQ ID NO: 82353 - DNA, 1129 bp, Homo sapiens
ctgtttatatgatggattacgtttattgatttgcatatgttgaaccagccttgcatcccagggatgaagccgactcgtggtggatgagctttttgatgtgctgctggattcggtttgccagtattttatcgaggacttttgcatcgatattcatcagggatattggccagaaattttctttttttgttgtgtctctgccaggttttacggtatcaggatgatgctggcctcataaaatgagttaggaaacattctctctttttctgttgtttggaacagtttcggaaggaatgtgtattaacatgtgttaaccctactgatgggtagtaggttgttttcagttttttttcctataaaatattttttaaccactacagtatttcctgttatatgttttcctttgtgttttctgcgtaccttgctggtgtatagggttgaattgttcaaaactgaaatctgcgttttcttttgtactttgatacctagtagaattcccttagaacttcaaataaagaccccactggaatccttggctgcagcctacaggttaaggttggcatattgtctttcactagtgcagtaataatggttctgattgcttgctgtccggtgtgctaaagagaaagagactggaatgttacatcaacatggatgaatgcccactgttgtctctctcagagaggtgggctggctgcaactgcctctgcctttcttgaggccacctcggcaagggtgtgtgcaaaggcagcactaggcacacctgctgccagcccctccagcaaggccatttctgtttcatgggcaaaattcctgggggtaaatactgtgggcttgaggtctcatcttagatttcagagaaaatctgaattcggtttaatggcaatctagcctggcaaacagattctgcttatgtcagctggagcgggcagcttggaggggaacccccagaggtgctgtgcctagcagtagggatgggtgagagtgagcagactcttctctagcaagcacctctgtttttccagttggtagttttttacagtgtctcccagaaattttgtaaacatattgtttccactcacctgataaaaccttctaaatctttttctttttggaataacttgtttcatga

SEQ ID NO: 82354 - DNA, 1033 bp, Homo sapiens
ttctctttccctttctttcgttcatctcttccctttgtcctcttcccttctgctttttctccttgccttagagaacttggaaataggagtacaatatattttttatctgttaaataaaatatttgtttactctgtttataaacatttacttcttagcatttaaatcatgctaattataattcaacaaaattacagtttgtttttaacccaataattgccaaatatggaaatcatccttgcttaaaattaatcctctaatcaattcttattctctgaaattcattcattatgaatacacttaaaaacacagttgttcaaactgaaaagacttgggttttggccattttacttggagaacaaataacattttctaattccttgtctttttatgtagtaatttaaaagctacatgtgtttgaaacttttgctagttcaaatttttatagatggatcataatgaatatttcaaaaaatggtgtttacttaagtgttatagtacttactaagaatgtatcatgttggagggttagtgtgcagtttgctccatgttgtgttcatttgaaagttattcctctagtgaacaagttaaataaaccctcacactggcattcttagaactataatagccacttccagcacaggaatgttatataactttttctatacagtgtattgtcagtatttgctatttttatagtatattttttctgtatacttaatggttacacgtaaaaatccaacagctacaaataaaaactctacttagaagttatttatttgaaagaattataacctagcaacaaaaagatgtcctgtttatatgtagtgcatctactactgtagatttcattttcttcctctctgaagtttaattccagtcatgctttcagcattttgcaaaatggaacaagaggagagggtttccttcatcggccatgaagctcctgttaagcactaaagtgtggtaactgcctgtttgactaggtcttgcctcctttgagagcagggatcatgattggttcatcattggaag

SEQ ID NO: 82355 - DNA, 1003 bp, Homo sapiens
ttgactgtcttttcattttagcatgcattaaatctttagtgccaccaatggctatgactttctttaatctgtggtattaaaaaatatacaaaatatatttcagctttatttaccttataattgcttgtttttaggtgggaagtatgttattcctgttagataaagaacctgaggtccagagagggtaaatggattagtatgaccatacagcagtaaaactggactagaacccaggattcccgttttaatacttttgtgcaaattggagaaacataactgcaccatctctttacacattctttattttggcagtgtcttcaataggccgtgtttaagaggcgtcttacactccctgttgccagtggctggaacacaatggatcacacaggggcgatagacaccgaggatgaagtgggacctttagcccatcttgctccaagtcctcagagtgaagctgtggctcatgaattccaggaactctccttgcagtccagtcaaaacttaccccctctgaacgaaaggaaaaatggtgagttcagcatgtgcaatgggatctttgatttaaagatttcccctctttgggagcccagtttattcctgtttggtagtaatattttggtcagttcagcagtctgtcatggaggagaaccctgtagaggtactggatggtttttaataacaggcagaatttcactttccattcagttctttcattattttcccagtaagtatctttggtagtgacgttacctttggaaataatctttagattcagccattttagcacaagcagatgatttcatgctggaatggcattggaaagtaggttcctgtgctgatgccggggaagtacattgtggatatgactgcattctcctcccactttctccatctccggtgtgttgcaccgtaatttcacaagtggcaaagctatctcagtgatgactaagaagtcaggagcttcttatttgagtatttattatattaatgggtattggatata

SEQ ID NO: 82356 - DNA, 1070 bp, Homo sapiens
aagaacccacatttaccttagacagtagctgagagaatatagccatatttactgaaacatgactaagtgtgatcagatttacacagtacacttggaccagtataatgtccaaattattaccctaaaagaaaataagagttgaactgttataaaatcagaacacacagttgtgcacaataatggtcttctgtaatggggagggaagagtgaggagactttatcctttatggtcatttacaggaaaagttaatatgtatgccagaatataaggtggcaagcccaaatataaagcagtctccccttataaacttctaaggaaatagattaaatggtaaaattttaaatttattaatgtagttacattttatgaagcattgcaataatgtagaaggattgctttaaccactctcattgttcataaaaccatcctactcaaagtctatatgtgaatctttgtggtcagtgtttttatcagtagtagaacccctgtgcatcatccatctagcactaatttccagggtacatcttcatttctgtctctttggtttgagttacagcagctttgtaacatgtgcatgatttggcactgaacatttcttttttttttttttttttcattaggcaaacatttattaagcacttaatatgtacaagggacaagggagacgcattttttaatgttgtctttctttagtaacagtcaaaataccacacagaaaataacttaaaacttaaccacagtgttattattgaccaattgggtttaatacgttttcttcaaaagatgtttgatattttgtaggagacaaaataattatttagcttatgagaagatagggcataattttggaaatccaggcctctgaaggatggaggtgcatgttttagacacaaataatcttcccggtatctttgaataaatcccatatttggtagtactgattctttttttttttttttttatactttaagttttagggtacatgtacacaacgtgcaggttagttacatatgtatacatgcgccatgttggtgtgctgcacccagtaactcgtcatttaacattagat

SEQ ID NO: 82357 - DNA, 1028 bp, Homo sapiens
tccggaggctgaggcaggaaaatggcatgaacccgggaggcggagtttgcagtgagtcaagattgcaccactgcactccatcctgggtgacagagcaagactctgtctcaaaaaaaaaaaaaataaataaatatatacatacatatatatatatatgtatatatatatatataacttttgtcagtttcaaaataaaagcaaatatattaattttttttaaatctaagtttttgacagttatgtgagcagagtatgttcacatcaagtaatatatagatgaaaggaccgtaacattcttactttaatgatttttttcagacatgttgttcattttttaggtcttcttaatgcagtgtttaagtcatacaaaatgcaggtgttggcatcaaaattaatcaatacaaagtattgtttagatattatgaaataaatgaattcagatttttttggtgattgtgttattattcctagacatttgaatttcacttattagaattattttctgttgagggaaaaatggagatatttcagtttgggattagtgtctaaaagggtaatatataatagtttataaatacactttacaaggaaaatgaagttgacgtttaatgattccaggatcttcccttgttttacattcatattcatgttactgatgatagtggagcggcaggatattcccactattggagcacataggagagatacttagtaaagagaagctgggattttcctttactcttgaatgtgaccaaaatagtacctcaaagtaaagcagccatatttaggcaattaacttttcctaacaagtgaggccttaatgaaggaaaatggatatacagaaacacatgcataatctacctttactaaaacaatgcatatacaggggattgagcttcattttaacattttaaatacacgttagatccatctttctcacgatttgcattccttcacatgagcagactgggaataaaaaggaaaccagtcaaaggaataggacgttagtgtttaaattggaaaagctc

SEQ ID NO: 82358 - DNA, 1104 bp, Homo sapiens
ttgatatatggcctctgcgtttaatgaagacataacaagaaaagcaaaaagtctgattcacggcttgcctttggttcttgtagtctaagtttaaaaactgacaagtgttacagttggtcagcactctgcagatttgcgattcatagctacaaaatagaagaccctctttgacagaagccttgatcctgacatagcagttaagaagaatgttgcttggactgcttgatcaaaccactgccacgtattataggaaggaaaagttcgctgtatcagaatactccgctctcccaaagtattaaaaaattgatatttcaagaatggaaatgatactttttaaaattattgttagcaaacatttattgaatgatcattgtgcctcttactctaaaataattcctagatttttaagcctctagtacaatgttgaaagttcatgatgtagtatattctcataaacttgttacacaaagatctttaaaagacatttccctgactgtatacagaaaaatgattggagatgattcttgtggataactgaaaaagaagaacctagttttaaagaaggagggctgtagagttaagcctggcaggagcgtgctctgttgcactaaatgtgtggtggcaggcccctcaaagccgtggttggaataatcttacgtattccttctagattgttgggaagattgaatgaaataaagcatctaaagtgactagcacacatacggcacatcttaggctctcagtacatgttttaattaacccagtcttgcatgcctgatgtgagaataccatgatggaggcaccaactttggagccaccctaagcctagatcttagccacaccattactagctatgtgaatgtggaccaattagttaccttccctttgcctcagtgtccttatctgcaaagtggggatcacactagtatttgtttcataagattgctctgagggttagatcaagtaatctaaatcaagtatagagaatagtgcaagcacataattagcactttattagtatgtatattttgagaatgcagtatcgttaacccttggacaatgtaggggttggagcactgacccccgtgcagtaaaaaatccatg

SEQ ID NO: 82359 - DNA, 1814 bp, Homo sapiens
attcttttgatatttctaggctatgtggttcatctgagctttttcaaattttcacacatctccaaaaaattttgcaacacatttattgaaaagaatccaaatatatgtggacccatgaagttcaaagtcatgttgttcaagggtcaactgtgttttaatttttactaagtcagtgtggcttttcagaattttcaccatgatgttttataacttagcatttcttttggtcgtcccagtaacttttgctcccattttctacaagtatttcttttttaaaaaggcaaaatgacattcagtttcttaatgtctcaccatgtaccttcataacatttgaagagcagcttatctgatgagtgctgagagggcaaaggcagtgggcactgatttcccatgaagttcatctcttgttggtactgccagttcccacaatcctagcattctctgggcatcagtcagtgtctacaaaaaaggattttcaaatattaaagcatgtgaaaagacaaacaggccaaaactcagagctctctagggactatgacctccaaaacagactccattctgacattttcacaggctacttgaaggaattccagcagggttgttccatttggtaaactcctaaacaaaccctctgtcatcgaggactgatttatagaattttctccttatgtgcttgttctgaagagattaagatagtagatatggttgctgagactcttttaaaagtcatttgatatatatgataagtactatacagaagatttttggtattttgaagtaataaaacagttatttgtaatgtttaaagagattttgtgttctgagttgtcttctaagttctttttctttttgattccaggaaatctatgtcataatcacatctctaaattaagtttttttcattataaacccaatcatttaacaaagaaattgaataaattcagaaattatctttgtataaacaagtatgttaaaaacatgtttatgcatatatataaatatatacatatgatatacatatatcatatgttttacaatgacctttagaatatgtgaaacagaaacagttcggttgttatagaatattcttctatgaaatcttggtgtaatggcagctgtttagatgatgctgtaaggtcactagagggggtggatctataagttgtttttcaattaatctggatcctcttaaaatattttattgtgtatttttatgcatttctttttttaaaaagaagaatataatgctaaaaataaaggagaagggcagaacccaagagatttggagcctggagaacttaaggaaatgggtagttgggatttatttggcttgtagttgtccttaactgctaacagcctcatggtggtctcatctgaagtctgtgagtggcatgtatgaaattccagggtgaacggcattccacattgggaggaccaggtttgttggggaatttttgtatggtttgtttccttcttcgtgtgtttctttttaatcctttaaatgaattctttaactgaattaacagagttttaactgctaaataaaagtcctatacaatcaaaaatttcttaagatttgatatctgattctgttgtaggaatgtaatatattttgggaatgagtttaaaaatgggacacaggcaagtaaattgatttatgatgctttcaaccaagcttcacaaaattagtactaaaaataaaattcatgttatcatattctaataacctgtcataaacctagcatattttaggtctccttagtggaaaaaaaagaaaggaaatgaaagtgaaataataaattgcttaattggtc

SEQ ID NO: 82360 - DNA, 1051 bp, Homo sapiens
gagaagccagcatgggagttaggagacagggaacagatgggaatctctagtagtgggcttggtgagggaggcttccatgtcaaaactggccacagagatggagaataactgatctacagcagatagatgcagctccaacaaggaactattgagtttggttctcaggttcatttggtccaagtgacctgctgatgctacagatactgatactgatactacagatagaagccaaataaatgagacatcactgaataaaggaaatgtggaaagactgtgtttttgaaaattagaattgtcaatgtataatttgtactttagaatatatcatattctatttttatcaaatgacttttatatatagtttcattttattggcccaaatgtttgaaaatgtaattatttgaattaatgcattaattggttttaatgtgttattgcagaatgttttccaatagaatttttatttttaagctatatggtttttataagggatagttcccccacttttgctttcttaaggactataatcatgtaaattaaatacctagcacttctattttgactttcttagttaccatgtgtcttctcacaaaaacaaaccactttttttctcattccttttggtaatgtaaccaatcaacacatatttttatagatccacctacaaacaaggcactgtgttagatttttccatgtgtttctgcatatttccacattcttccttcttgcttacacggtaggcctagaaccaattggtaaatagcaagttaaactattaaattctgccagtagtgagaggatgtcttccctgactaggcaaagatattttacctttgaagtaggttttaattgtttccattttataaaacctataaattgagggtcagagaaattaaataatgcaaaacacccagctagctaatgaggtataaagttttaaagtatattgttggttctaaagctacctggtttagatggttataaatagtgctattacaatagaaaaaatataactttcacatgaaaggtagttaattaaagatatgtttaa

SEQ ID NO: 82361 - DNA, 1051 bp, Homo sapiens
tatttatccattttccttttagtggactcctggacactttccaatctgaggctagtattaataaagctgctatgaatagtcttgtacaggtatttatttctttgggtatgtatgtgggagaggagttgctgggtgaatatttagttttctaagtctgcatgcccttttcaaaagtggctgcatcattttatactcccataaatgtatgagagttccagttgtgccacattctcaccaatatttggcaaagttagtcttctccattttaaccatttctgtgggtgtgtgttgatatctcattgaagttttgatttgcattttcatgatatctaatgatattgagcactttttaatgtgcttatgagctatttatgtgaaagattttttccaaatcttttgctcattttttccaactttatattatagtaatttttaaatatataggaagttaaagaagtgttacagtgagctctcatgtataccccacttggattctgccattaatattttaacatgctttgttttatctcgtgtactcttacctatccccctccgaccatcagtcattttttgacatatttcagatatctgtacacatctctctaaagacttcagcaaatgtatcaacttcagtgtttgcttaaaatgtccttatttgagtaggaacaaattatccatgcttctccttcttatgttctttccccctaatccattctctgcttttcctgcctgtttgtattctgagattattgtcagtcccactcaggtccgattctgaatatttcataaaacataatagcatgaaaacacctttttttaactttgcccattttttaacctcgtttttgtcttttaattatgaaattttggagttttttatatacccttgattctaatcatttgtcaaatacatgttttacaaatatattctcctggtctgtggcttccgtattcattttcttgaattatctctctatgagcaaaaactttagttttaaataagtctaatttatcatttttaagatcagtttttagaattataataccttaa

SEQ ID NO: 82362 - DNA, 1566 bp, Homo sapiens
gcgagaaaaatatggatcaaatatgtattttactaaaaatatggtagcattaggaaaaaaatttacgtgtaccctagactgaaattttccttcctaaatacatccaatctcattatctgtgtagattttgtaatactctgactcagcctgtgtgaaggaagttgcaaagcttactattattcacttgagtgaatagctactgaggatctattagcaagtactgagacatagaagatgaagagaaaaggtcatctttactcaatctttatgtcaagaatgctaccagaaaagtatgcctcaatatttacccatctctttgcatttgttactaattattttattcattactcttgaatgtttttacattgtgaaacattgcccagttggaaatattacgaggtttttttcatagtgaagtatagtatcatcacagcaatattctttttatcagtagttttataagcatatattaactctgccaagtttttgtgtaagtcccttgagctgcatttgtttgtattctgattccctgaagactttcttggattgttcctagtctctaagccatacagtttttctcacacttattaaatatctgcctggggtggtgggaaaatggacttgatttatggtcatctctttcatactaaaagagctcttttcagtgtgcatacacacaaacaccatggaagcagatttatcatagcagaagtgactttcatcacatattatttgaagttaaatgttactcgtgacattagagccaaatgacagtgaagatgatgtaccacatatagtagaggaacaagggcaaacctactggaaagcaattcaggtgacagtggtgggggtttctcctactgagggatactgcaggtctcctccatctctccctaattcattccaaaaggcattgtgtggagctgagctaggcagctgccccgtgggagagggggaggcaggccagtgtagagtgaagaggcttctgcacagttttagccacagcagtggcagtggtgatgtatacagggtgtccatgagtggagtggcagaagctatgggagacaggtttctccctgtaggagaaggggccacaaatacagaaaaaaatgagagcgaacctgtggcactggaatggaattggaggcattgggatgaactcatggttttcaatacatataaataaatacagacatacgtacttaaatatagatgtatatttacatccattcatatatagagatataaatgttatgtagatgtgtgtgtatacatccacacacatataaactcagacatgttcctcagctctgtctgcagagaaggcctgggaacagtgacacccttgcagcagtgagcatacctagcattcagaccttgggttctaaacaaagcagggaaaaagtacaacatgagtctgggacatcttgtgccgggaagtaagaaggtaataaactgctcaaagaatgatagaatcatgacaataagaaactgggagttcacactagccaaatctgggacaatttgggcattaaaataaataatgaaagtcacagattataagct

SEQ ID NO: 82363 - DNA, 1056 bp, Homo sapiens
caaggaaagataagtgaagaaagactgagagaatgttagagatggacaaaaactaaagagacttaataattcaagaactcaatgtcatatgtgatcctggtttggatccttttactatacaggatattgttgggacaattggtggaacttgaatgcagatatatcaatgttaacttgtttcctctttttatgtgtttgttttttttcttatcaatgttaatttgatatatctataccgactaagcagtcatcaatatcatcttgatattgattattatattttggttctgtaggagaatatccttgtttgtaggaattacacacctgaacacttagggtaaagaagtatcatgttagaacctattcagagatgattctgggggaaatgctctgtaaatttgaaattatttcaaaaaatttttttaataaatgttctttcaggcacattcaccactagagaaattactttctttgagaactacaaagacacaacttttgatataaacctacagcagaataatgtgttttcttattgggattttgagatctattagatacaaaaataagcatgcagaggtttcttaagagatagctttttaaaaacacatttaacacacactgaagatacatacacacacagatatggtaaagaattttaaagtggctggtgtagttgtgcatctactgagatttataggattgtgacctaaaaacagttgggcatttttcaggatttaaaagcaacatcctgaaatttaaaaaaaaaaaaaaaaaaaaaagttggcatttattgttttcgttgttctttttgcaaagtaattaagcatgtaggccccggagccaagctgcgtgctttggaatcctggccaccacttatgagatatgccacctctgacaaagtatttgattttttttttttttttttgagatggagtctcactctgtggcccaggctggagtgcagtggcacaatctcagctcactgtaacctctgcctcccgggttcaagcgattgtcttgcctcagcctcccgagcagctgggattataggtatgt

SEQ ID NO: 82364 - DNA, 1001 bp, Homo sapiens
caaactcctgacctcaagtcattcgcccacctcggcctaccaaagtgctgggattataggcgtgacccaccactgatttttttaagcctccattttcccatgtgtagatcaggaaaataatgttgaactcacaagtcttgcagtaggatagcatacagtaatcactaaataaagttggctgctattattatttcatgagtagttaaaatgctttcataaaatcattttagtatgattatgttagctttctttcctctcaccaggagtagaattaccagggggccatcaaagtcatggcttctgctattaagcctgtctcaggatgaaattaaagcctggagctggagcatattctagaagacagaaggcagggcaaggccatagacagacttgggctttagagaactaagactttggttaaattccatacctgctacttagaagctttgtgacttgagtcttggcgtgtaaaatgtctatagcatacacaatcatagcgaccacgccaattgtggagggttaaattagataaaccttgcaaaacagctaattaagtgaccaacctaaagaatgtcctcaaagagctatggttatttttattactcctttaaaagtgcatgagtagtttcttcagaagaatgtaggcgttagggtcagagatagtaacagaacgtttgagggcatttttgagagtgtgataagcttgtcactatttgttcctgcagaggtttggactgccgaggatggacttaaattgcttcagaaggaatttcagttgacaagaagcatgtcctgtgagatgctgaaaaaggatagatagcaatctttctagaacaatatgggtttagtgcacaccagccttggaaccaggcacaaaggacagaatacttcatccagacccacctgtgtttaagtggtggaaagaatattgatttttctgtctgtaaaaatgtaagcctttatcccagaggagggtctcatcaggtgcatgattaaaatgt

SEQ ID NO: 82365 - DNA, 1028 bp, Homo sapiens
tgaggaaattagtctcattactttatgatcatgctttatatatattacattggaatagtcttccttttaagaattcaaattaagggaataactgaaatgaagaattaactttatacacaaaaattgcaccacagcattatttatagttaaaaaattggaaacaacctaagtgataaacagggactatttagtaaactatgccatatccacctaacagagtattttatgtagccactaaaataataagaatatttatcattgtagttacagagtgatcggagtatgtagaagcagagaatcaaaatctatgcttaaagacagaggaaatacatggtaactctagttgtgtctctctggatgatgatattatcggtgattttcttttttagtttttttatcctactgttttctatttccatattttgtgtaatgaacatatttggctcctatcatgtgtgaaaagattttttttaataaaaatgcctgggacccaggctagttaggaaagatgggatacatacagtaagtaaatggatttataacctcatctccctccatccgtgagggtgctttgcctgcctcttgtgagttttgtcatctggaaatatacagctcttgtagaattgtcaacttggggtaaatgttttgcacagagaatacaatgctacctgtatgagatatgcttttttatatctgtcccccttttttgataaaatgaaacaggtttacaccttgttttaaaccatgattctaaatttcaggacttcttaggaccatgtgttggattgtttagcctttacctttttcaaaaataatattctttgaaaatgttcaaatgtgagcaattgtaacatgaagtctgtttatctttattacttatgtcctttgtttctgaaaggatgtacacactcagtgttttgaactgtttagtcccctgaggattctatagtttgtacgtgtatccttttcttgcatgatggccatggaagatactgttactcaacttactaagaagacggaggctatga

SEQ ID NO: 82366 - DNA, 1045 bp, Homo sapiens
gtgttgttttattttaataattggtggttggtgtctacgatattgtgaatataattagaaatgtatatgtgttctttgtcttgggtttctggcacagaactcctaaagttctcctaaatgtcctgagtaataggagcatcatttgttatacatttggtcttagtccccagttcttgacaaagagcttctttctaagatccttggactctctggagtgatgagagtggtttttgtatgctactgagatgacaggtagttgaaggtctttaggtagcttccagataggggctgatcaccagaaagaccaaggcatggccagaggaaaggtggtatacctagagagggcatgggagctctgtgccccttctcccataccatgccctatgtgtctcttccatttggctatccctgagttgtatcctttagaataaactactaataataggtaaagtgccttcctgagttctgtgagctgttctagcaaattatcaaacctggggaggggattatgggaacctcccaactttataactcattggtcagaagtctgagtggcttggcctaacaattggcatctgaagtgagggcagtctcttgggatggagccctttaacttgtaggatctgacactaactccaggtacctagtgtcagaattgaatcattggacacccagttgggcatccagaattggagaattggttggtatgagggaaaagcccacacatctggtgtcagaagtgttggaaatagaaacagatcagaatgacacgcatccgtgttgtatgttaccctcatggtagcaggtacctttctttccatgttagcatgaaagtgtgatttctggtgatagatgatacagctgacaggactgctgtcctggtaaatgaaggcacctgaaatgaccaatgtacaatcaagagatgcttccaggactaaccagctgttgtcatcagagtgttggtttgcaaatcaagttgttgcagatgtatgcatcattcaaagatgccattcacccaaaaaacgtattgtgtctgatagatttg

SEQ ID NO: 82367 - DNA, 1099 bp, Homo sapiens
caataatgatttcttacagtcttataaaacctgtatgaaggctttcttccttaagagttgaatacatttctaattaagaaaatctgatcaaggatatgaacttaccaaagaaaacacattaagatttttaggaaatttgttatctaggtggatttttactggacctgaagtatagattttattgagtttagatatttaagtgatttaaatcctatgtttattaaaaaactatcttcaaaacacgacctttcgatgttcataagttttaaaagtttataaatgcttagtttataccaacatactcttcaagtctgtgtacaattttgaaggctacagtttaaatcatgtgttggatactagtttttctaagtgctaatttctactcttcgtctcaaacacatgaccataagcgtatcgtttatttaaatggaataccttaaagaacatttaaaaccacaataaataataaatgatttatggtaagactttttttctttttaaagactgaaaactttttgaaacacaagattcggagtcgaccagatcgttctgaacttgtcaggatgcacattttagaaggtaaaggatttatttcttcttaatctgctgtattttttcaagaaaagaagtgagaatttccaccatttctgtttattcccattttaataactttttaacccacagccttacttcctccaaactggatagcaacatgaagacccaaaactaaaacatgttagatacacagggaaggtttgattcttcacataaccaattaatggactaacacttccacaccagctggtaccacagatgcctctaccatactgttccactaaaaaaattggggtccagaggatttctttatcagtgagggacatgtatccacttattaagtcataaagaatgcaatagcacaagtctaaccctagattttcaactacttggaccttgtctgtgtctaactgtacagtgcccacacccaacattttctctttattgccacttacccacaacaagccaccttgagctgaccattagcacctcccatccacctccgccaaatgatctcagtcatctaacctcatcacttacgagg

SEQ ID NO: 82368 - DNA, 1052 bp, Homo sapiens
acattttatttttgaagttttatcattttctcataacatttagttaaattatgtattcgcaatagcggtcacaacagatatgaatcattttgtggacaatcaaggctcacttttggcaagcatacagctcagctggtggatagagaagctacacagatgtgctgcagggtaacctcctagccatgtgctttcagtgagccttgggcttcacaagaatagtctattaatacctacagactaaagaatatcagttcatcctaagccgacttatggggagtttcattgaaagaccttctactgtatagcttaagaggcaagcaactttcagcttggaattttgggtagacaccacatcattatttttcatcatttctaaacattttttagaacaatggaaaaaacattaacaagagttaccagaaacacaagtatgacagaataaagcagatggatgaattatggtatttatagttttacattggttgtaccaattttatgcatttgtaagtagatgagttgatgcctgtatacaaccattaattactgtatattatagttgaatgttcctaacagacacaaggatatgtattcagaaataaacccaaattcttaattatgatgaccgaccgagacacaggggatcaattcaagaatatgaatgatagctcttcccattgacctctgcagagaagcttataaccctaagaggcagtgtctcccttctaagaattgactttccaatgaagccaaatccagaactgtcaacttcttgaaccatgggccacatccgtcttgcccatcctctgtatccccaatacctagtaaatgtgaatttgaccctcctgccataaacaaacaatagcagtgccccacttttggtttaaggtcctgttaatttgagtctgtgggcatccaaattacatagacaaagtaaagctatccagaactaaaaaatacaaaatgcatactggagaattcttaaacagtcattttctctttccataaatatgtcgagaacacaaaaatgtgtctaaatcagtttaaattcagtt

SEQ ID NO: 82369 - DNA, 1033 bp, Homo sapiens
tcccttgttaggtctgagttttaattcttaacattctgatttcatctcaccttttggggtccatctctttaggactgcatggaatcatggttgattgtactgcttacagttcttgactacaaattgcctaagctttaaagtcataccagtgcaaaataggaggtccccaggggtgatgaaaactacaatagtttttaagataggatattaacttttccaaattgcttgctaagtagcattattattgaaataattttctaagttaaacttatttagtttaatatttttactaactttttatttctgtctacttctaggaaatataaatagcatgttcagtgttagttcaggaaggtgaagagcagatgagtacagaatggtagtatctctctgttttatcctcgtcttaccacacttagttactgatgtttctctttttgtttctggcgtaagctttagcagaaaaacagaaaaaatcaggtgagatgtcagtgtagctgggttgctccctaaagtgggagcgtatcaacatacacccagtcatggccccattttcctccttgtcacgtttttttgtttgtttgtttttcttttttgagacggagtctggctctgtctcccaggctggagtgcagtggcacagtcttggctcactgtaaactctgcctcccgggttcatgccattctcctgcctcagcctcccaagtagctgggactacaggcacccgccacatgcccggctaattttttctattttttagcagagacggggtttcaccgcgctagccaggatggtctcgatctcctgacctcatgatccacccgcctcagcctcccaaagtgctgcgattacaggcgtgagccaccgcacccagcctgtcacgtgtttttttaacagttggatttcctgtcaggatccaaacaaggtccacacgttgcctctgcctgatatttctgttaaatcttaatctattgggtggatcttttttttttcttatttgttgagaaaaaggcttgttttgttctctagcat

SEQ ID NO: 82370 - DNA, 1081 bp, Homo sapiens
tgaaaagtacctttagataaaaacaaagaagagtaatatatgcagcacagtgacgttaggattctggtaattaactacatttaaatctctggtcactttaagaccctaaataaaaggcagacagctccactcaaaaactaaggctgatgtgagggaggtgagaggtcactgcacttggtacttcctagagacggccggagccaggcccaagacacagcagaggtcaaaggcagtggagagccttggccagttcagtgacagcttctggctgaagacttttggttctattcagaaacctgtgtcgtttttttggtgttgtagtttattttgtgattttttggaatcgtactttatatttccaaatttaaatttaaatgcaagatctttcaacataaacagaagatacctacaaaatactgtcagaagtccaggtatactgataacactgaaaattctattagcaaccttctgggttggttagattgattttaatgtatatattagacatttgtatgtatgctctgacattgtgatttgtacagcctacgctggggtaaggaaatgggtatccaaggtcctacttttttaatagctcgaatatttctagagtacttgagccacatgtatttctgtatttaaagaattgctgactaactttcaggtaaccagacccatctcaaagaaccaagaaaaggctttagcatgaaatatctttctgagctggcgagttagaagaatggaaggtaaggggaaggtctgtcatctacccaggacattcccatgatgagtacaggtcagattgtgccacaaggtgggcctccacgtccctgccctggccctctttcttctgtcactaaccctggttatcattttacaggcttgtaactggatattctaccagagctctcactatattgtcaagcctaagattgaaaaactggaggctttattagtgtttttatatagaaaacagttattacatatgtgttaagtcatttcttaagaattttctaaaatgccaactatcacaggattatttcaagctagtcattgaggtatatgacaaaatgtaaataacaaa

SEQ ID NO: 82371 - DNA, 1047 bp, Homo sapiens
tttaaaggaaccaaaggcattgccaagtatttgccaaaaggaggcactttttatttaaaatttgagactaatgagatctcaaaaatcagccccaaaaaggtattatccatttaaggttataattttcactaagatgtagatatttctcttattgttttcatgtaaaatagtatagagttgttttgttggtttaagagtaacattcagtagtaatacaaagttttttttctatgtagaaattagttttcttttcttgcttgcaatagaaatgcaatgtgataggtgtttctcttcttattttcattgtcacattatgtcttagcatctcactttatgaaaaaaaggagaaagataccaatctacagagccctgcttgttgaagcactagtttaatcaacaaaaaattatggcaatcgggggtccattcatctattgcctttatgttgttttttaaaagaaaaaccatgatgcctttgtatttgctgtttgcacccctgaaatcaattccatatcatgtttgaatgccatacattttgcacatgtactgtacataagtaatgcatactgtatttttatatgtgtgcacatttatcatcagatcttttgtacatagtggcagtattgtagctgatcgggaaatgtttgatatctcagcaattttgcatttttgtgtctcaaataaaagacattttgatgtactatgattcttgctgtgcagaggaaagaccactccctatgggttggtggagccattgtagactgtggaacgggagtggatttattaggaggagacactatacctttagcatacaactcacaacagaaagccagcaggccaagcctgtgaacttgtcaccctcccctggatccaagaccatgagatacaaaatagaaactcacaggtacgagctgaacttgaatatgtcaagatttacacaaagtgagtttctttcttccacaatgaaagttagaaatatgtagttctccctagggggttgattttcacactcggcgcgcacacacgcacaatgaaaactgactcaataa

SEQ ID NO: 82372 - DNA, 1085 bp, Homo sapiens
ctcccaggggatgaagcgccccaggggtagctgtgtgtagggagccgatcgccggggccggccaaatttgcggaccttactcgccgaggctggaccacccagacttccaccttctgcgagggaaggatgggagcttgaacccaaacccttgaaggaaaacagttggctgggtctgcagtccagggggaaggatctactcgcagagtacggcaagagtcgaccactcctaaaaagtctccaccctatagctgaaggttggatatcaggcacggacggggttcgaacccgtgatcttcggtttacgagaccgacgccttaccacttggccaccgcgcctgcgttgcgatggcggtctcgcgaacctctatcctggcgccgctcccgtgcgcccgcccagcgagcacgagctcgcaccgtccccctccctgctgcggccggcggggcggggcttcaacgggcgcgccccggcgggctcgggggctcggggacccgcgggcgattctgtcgtctgcagtgggctggagaacctctggagtcggggcgcggctggagcggtgtcccgagggtcccgcaggtcccgcgggcggggcaccggcctgtatctcagaagtcgggttcgaatcccagccccgccagcgatgtagcgcttcgggacggctcgactcggagtctcagtttccccctctagagtgaggcacccaggaagccaaggaatggtagcaggtttccttatcggcccgactgcgggccgtccaccgccgccttgcagggagcccacgcccagccagggttgctgaatggaggcgtgagatttagaaaataaaagcttctggaagctccgcgctttggcccgggctgaaggatcgcttgagcccaggagatcggggctgcagtgagccgagatcgcgccgctgcacaccagcctgagcgacagagggagaccttgtctcaaagaaaagaaaaaaataaaaacaaacaaacaaagccgaaagtttcttcttcccccagtttacctgtttagcctggatgtgtccctggtcccaagaccagcagcagcacctgggattttgtgagaaatgcaactt

SEQ ID NO: 82373 - DNA, 1011 bp, Homo sapiens
gtgggattacaggcgtgagccaccgcgcccagcccgagtgtgtgtgtggttttgttttgttgttttttgtttgtttgtttttgagatggagtctcgctctatcacccaggctggagtgcagtggcacaatctcagctcactgcaacctccatctcccaggttcaagcgatctcctgccttagcctcccgagtagctgggattacaggcatgtgccaccacgcccggctaatttttgtattttcagtagagacagggtttcaccatattggccaggctggtctcgaactcctgacctcgtgatccaccagccttggcctcccaaagtgctgggattacaggcctgagccacagtgcccggccgagtgcgtgtgtttttaaagtgtgcatcattattactgaacagcaacaccaagagagtctcacggttcctgtgtgttcccacttggactattttgcaacactcctcttgacgttgaaaagaaaatgctatgacacttggttactgctgaggcgaggccaaaccaccctctccagacctgggaaaccagtgagtattaaaaatagttcaatctttttcgctactttttaaaaaatctcatgagttcagctgaaatctttttcccccaaatgattcatggagtaaatcaatgtgtctgatttttgccgaggaggggaaataggacacctgaaggccagatcatgtttcccctggttgtgcgccatcctctcctccaagttgcctgatcctgcaaacagcagttccgtttgtcttcagttgcctgctttttctagtcatgctgtgaacttgaacttgagaaagcttgatgctgactgggcctggtgagaacgctacatgttcaagttgagggtctttttaaatggaaatctttttagactggctcacgcctgtaatctcagcactttgggaggccgaggcgggcagatcacttaaggtcaggagttcgagaccagcctggccaaccaacatagcaaatccctgtctctactaa

SEQ ID NO: 82374 - DNA, 1138 bp, Homo sapiens
aaaggaagaagattacatgaaggtggggtatgctctgtagctatgtccaagttttaagcagtgggatagcagactgattgaagaattcttcagttctgctctttatgcattaggcagtcatgaagagaataatgctatcttctgatttaatgtaaccaaaactattatttcattatattatctctactattctattctactattctgttacaatagttttatcaaaatagaggctactttacggatttgttcttgagcactcggatcagcttaaatttgtgtatatctatttacaagcataatttaggacttttttctgaataagcttgttataggtaaactttcagacttcagttcataataaggtctttaatttttacacacaggcagcagctgcccatgttgttgatggctggctgagtgttaatagaattaagagtattaaaatatttttatagactagtcttcctgtaactctcagcaccttttatgttgttccactttttgcatttcagttttacagctcccagcacagtaggaaagagaaatttgagtcctagtcaagaggaagctggcctggaggacggagtgtcaggggagatttccgacactgagcttgagcagaccgattcctgtgcagagcccctctcagagggaaggaaaaaggccaagaaattaaaaagaatgaagaaggagctttctccagcaggtttgtattggatcttgccgaagttctggggccgtggactatttaaatgctctagaaactcctattttgggggagaaattatagcaaggcttcacttggtggcaaagcccatgtagtcttccaccaaagcagatatttttaggatcaatttaatttaatttgaggaatcctaaaaagctctggctcgggtagcataaggcctggggggtctccttgttaaagatggctagtctattttggtaatctctctctcctccatggtgtagaggttttgctgatgtgtttaaagcagcctcaatatttaaaatgtgcatttaaatgtgcgcagaggcccctcctacatgttattttcagtagcagcgttttcactgtttccagcaaaacccccaggcaacctggatttctctccgaagcagaattatataagaa

SEQ ID NO: 82375 - DNA, 1652 bp, Homo sapiens
tcccaaagtgctgggattacaggtgtgagccactgtaccagacccgtttttttaggtcgtttttttatgtgtgttttttttatttctttgtttgtttgttttagtgtttcaaatgttttatctttattttattttatctatctatctatctatctatctatctatctatctatctatctatttagtaatgggatcttgctgtgttgccccagctggtctcctattcctgggctcaagcgatcctcccacctcagcctcccaagcagctaggattgcagtcacacatcactgtgcctgtactgtatagttctttaaactttctatatatttgaagttttcataataaaatgttggggaggagtagaactgtgaaactagaaacttgtgtacatttccaatagagtagggcagttgaggtggttctcagtgatccacaggttccgaacagaataattagctaatgcccatgtggctgatggcttacctgcccatcagcaaggctgctggaacactttcctccttgctgcccaacactggggaccatcctatacaagctattcttgctccttgtgcctccttactgctcttccttctctttccctcctctttttctgatgtttttcattggtcttctctctgaagacccacatcagtgtcttctctaaaaacatggaccgactgtccacctttcccaccataggaaagggaggtgacagagaaggcactggcatttacagagtctctcatgtgccaggcaccataacacacacttttctattttgttttgtttcttaatcttcacagtaacccattttttaattgaggaacttgctcagagtcacaaaaccaatcaataaattcaagccctcctctctctcttcccaaatcccattcatgctctttacaaaatgcctgctccctcctaagatatccatttatgatccttcccttcgactagaagtgccttgtgagatgccttctgtgccacccagagtccttgggaattctttgcctttgggactcttgtaagaagtgaaaagaaaaagtcagggattgtcacgtattcttcttagtgttcccgcacctagcaagtaataccttgtggccacttggaaaaacgtttaaataaatgaatgagcaggagatcctgtaccacacttggaacatgtcttcccactcactgtcctgctcagaaggccatgcagactgttttctttcttttaacagtataaagtcgtgttaggaatgttttcaattgctttgcttacagtaaggcagagaggaatgacattcttttgataattgcaccataatctaccttatttgtattgccttaccttttgttcagactgaaagagccacctgaaggtaggagtatgtacatgccttggaatattaggtctgaagacttttcatgccattttttaagggaaaataatttaaaaggtaatcaatatcatgcaatgctgcagaaatcagtattcacaccactgttttctgagtattacattaggtgtcatctatttgataaagagaattggggaattcttgtgaatgaccatgtggtacattggttcatcttcgtaaattaatgactccgaattcttggcagattagtttctagtttgctataattgcaaattaaccccgga

SEQ ID NO: 82376 - DNA, 1034 bp, Homo sapiens
cagaggctttgttgactgctttgaggggcaggttaaagttgtcatcagaagcatgcgtcagggtcagggagctcgggcttcacaccccagccctgctgtcagaatcgccatcttcagcaggccactcaacctctctcggcccctgtttgcctggccatggaaggagaattgttacccactttgtggggtggttttgaggaggaaaagagcattgggcagattgttagcactagttggaaggtcacatctctggcagggaccttatcaggtaccagctccatggcctcttctgctcttcctgtcttcccaggttccagccctggtgcttttgggaagatccctcccctcccctgacctcgacccctcttcagaggaaacagtgaacttccaggtgcgacttcctgcccccagattcacaaagctgtccgcgcacacacctccctccttctgtgcctctgtcagacatgtgtccccaccatgtgctccaagtcccttctcaggggccttgtgctacattttatccatgcccacccatgggcagaattccttccacctgttcaaaagaactcccacaaccccagctcgcctcttctcccaaatctttccttccttttcggaattcgaggcgtctgcagtcaccacccttaccgtggttcctcgctcactctcctctcgctgtggtccccacaccacagagcctgttcttactgaagaccctctgacccctttgccacacccaccaggcagtcttctcaccttgcctgagtgctcagtactctgacctctgttttttggagacagagtcttgttctgtggtccaggctggaatgtggaatgcagtggtgtggtcatagctcactacagcctcaaactcctgggctcacgatcctcctgagtagctgggactacaggtgcgcaccaccatgcctagctaatttttttttttagtggacattgaggggtatgtgttgcctaggctggcctcaaacccgtgaactcgagtgatcctctcgccttgtcctcccaaagtgctg

SEQ ID NO: 82377 - DNA, 1105 bp, Homo sapiens
gtggatgcatttaacctttcgggtatacatggatctctgcttgaaactgctacacccaataatttaggaggcagagaagaaccgtatgtctcagtctcatatttttgtcatgatttgagctcattgagtcaagcttatattatgtgtgatgtattgttgattagctgttctttctgactagtgtaggaatttatctgctgcctgaacacttcccaagtaattttttttttttaatgagccatcaaataggatgtggtttggggtttctcagcagtgggaatggatttgtgttaatctgtctagacgctctttccctgtcctttgtgaacaaacagtggcattcatttctgagcagggtgttgagggtatagccttgtgttcatcgaacaagccaagctatctcatccttgacctttaaaagataatgagaccttggactcatcaccctgtgtcaactcatggaggtaaacaagctagtgcttaaggctttaagctagcagtgagtttttaatttttatttcttacatttttttaacaagggaagactaatgtataatttaaaggaaataatttcatagatgtgatagtggaagaataagaacttttgatctgattttgtgtattcatggggctctttaaaaggagaaatgatccagaaactaccttgattgagcaatcctatagttgggtggcattcagaacttttgacattggtgaatattttttcctctgtggctcagtttttttctgaaaagaaaaattgcctcagaaacattttctgctgtttttatagatgtcttttcttcctttgccttgtctttccccctcctggtttagcgtaacagaagagtaagtttggctaggtgataagcattgcctgcatggcaaagtcaaaacaccatgtcacatagatgggggtggcaggacttctgtcctgggcctcatgctgttggcagccgaggactggagcatggagatctaggctcaaaacacacttctctggcatggacttcaaaaaagcagaagggtagattaagaaactaagtccagctaaaagtttgggtttccttatttgttgttttaactaagtaattattttctttct

SEQ ID NO: 82378 - DNA, 1152 bp, Homo sapiens
ctgtggcgggtgttggtgggctggggggaagcagaggtaactggcagagctctccctcctcaggtgctgcctctctctagagtagcctggggcttgggattcctgtggacagcttcaggaagaaatgctcattccttcaccctgtggtctccacaggtctggaggagacttctgtgctgctcaccaagagaaggatgtcgtgattaaagcacagtcctctctctgtccaccttgcttggctctccttgagggagcaggatgaatagcttacctgatgagcagaatcaggaagagtctgacacccaagggccatttgacaagtggatggggccactgcattgaagaaggcaggcctggaaaccagctgctggggtctcttggaagctgagattaaggaatcgtttagagttcagaggcctcttgcagctgtcatgatggggtctcgtggtctggatttctggatttctgtagggatggtatcacctataggaggaagccccatttggacctcacactcaagatccttctccagcacagtctaccaaggagtcccatgcttgaggggaacaggaaggggatgccgagtcctcatgggctccataagaggatgatagtcctcgttagaaccatcagaggacgatactccctacctgccaacgagtaccagtgggagtggttgttgggccagtgtctgatactttattgctggccatcaaatttggactttgtgaacagcagagaacctttttgcacagccagggggatggatgtgactctgatgacatgataaggaatttctttcatagggcgcagtgggcttcaatgtcagggctgagaggctggaagtggctgcagtgtgcccagaagtggagcagtagccagtagtgacctacagttactattccattactgatctgtgagggtgtttaattgctactgacattgttcggattttatggaaactagattttcaactttgccatccatctggcttacaaaacttgaaatgctccagatgtgactttgtatcttaattccttttcaccaaccagaaggtggtgctgtcgtgctggcaaccaatctacctttccaacgccaagtaaaacattgaaatgcttattcatgctaagtaatgtggacagacttagcatt

SEQ ID NO: 82379 - DNA, 1063 bp, Homo sapiens
aattgatggcagtggtgacctgagcacctcagaccaggggtttacccacatctcatctagtactcactaacatctaggttagtgagtactttcaggtgataagattataaaaagtaaacatgacttaaaatagttatttagccagggtgcgatggctcacgcctggaatcccagcactttgggaggccgaggcgagcggatcacctgaggtcgggagttcgagaccagcctgaccaacatggagaaaccctgtctctactaaaaatacaaaattagccgggcatggtggcacatgcctgtaattccagctacttgggaggctgaggcaggagaatcgcttggacccgggaggtggaggttgtggtgagccgagatggcgccattgcactccagcctgggcaacaagagtgaaattctgtctccaaaaaaaaaaaaaaaaatttagaaatgaaactttacattatgcagtccagctattaatagtaggaatgcctttcatcctttccgcttgtgaagtggagcgatgtggggaacttcacagaaacttgttttcaaattgcatcagaggccaaggagcagctgctactcctcctatgtaaaggaacacagaaagacactgtcatataaaataaactgaaaatgagatttttcccatcagtctttttttaatattatgtaataatttagagggaagagaaacaaatgatcgtagcatattatgtagggggggaaatgaactcattatagaatatcactaatttaaataattgtctattaatgccccaaataagtttgaatcgcttttagtgcatattgaagttcacatttaggtatgcacttctgtgattatattttaagatggagggtaagcctcttatttcttactgatttatctttgtatagtctagataccatatgtttatatgccctgtgttctttatagtaacaacagaataattaggaaggtattttgcaagatttttgaaacaatggctttcatttgaaacctgcagtattattctttaagtattgccttttttttttttttttttctgagacaggg

SEQ ID NO: 82380 - DNA, 1068 bp, Homo sapiens
ggccaataaggtgaaaccctatctctactaaatatgcaaaatttagctgggcgtgatggctgaggcaggagaattgcttgaacccgggaggcagaggttgcagtgagccaacatccgcacccactgcactctggcctgggcgacagagtgagaccctgtcttgaaaaaaaaaggaggggattctaaaaagatggagcaccccgtctcttgtaggatcctaaataattttgatattttgatattaaccatcaattaaacgttttgttttcttaagatgggaagtttttgaataaaatattggtgaaaatatgtattgttaagctgtatattcaagtaaatttcaagcaccatgttgctttgataatgtaaaagatgtgaaatttttaagtgatgtgtttgttttttactttaacaaaatgccgcacagtaaaactataattctgatagtagaactggtgagtaattatatatgaaaatttctgcaaatatacaaattcagatcacagtattttggcatttttctttcattatctgactgttgcaggaatccaggccatgctgtagaggggaaaagcttaggcttttggaatcatactgcagcatcacttaacagttgtgtgactttgggtgccttatttaaccttgatgaacttctgcttatctctgtaaactgcgcataatagtatggactttagtgttattgtaaggattccatgagattaagtaaatgaaccttggcatggctttgagcttttactgtggttctttaatagcagatttcagggtggaatgtactcaggagcatcagacaccagggatagtggtggatgcagggtgtgattgatgttgcttgttaaatattttaatttttgcatagagattttttctgtgatccatttccccactatccttagaaagatggtttagagagaatccagagggattgaattattagaaagctcaagataactttaggtgggggtggggaccttgaggttacagttacagtgaggcttcagtgtggctgcaagaagactgagttcaaagtcctgacctgcagtctaattc

SEQ ID NO: 82381 - DNA, 1598 bp, Homo sapiens
caaagtcaaaagacagggcacattaaattactgtgaagccttgagtctggttttttaagactggaaacaagtgctacttcagggaagggactgcttgcctcaagttgatactgccttatttaatttctgccttgtgatcttgattgccacttctgtggcagcatcaaaaaactgctttttaaagaaaccttacaggccacccacccagcaacctgtacttggtatgctagccctgcagcactgcaggggcagtccacgtgctgagctgttctagtcttgtgtttgctctagttactttaaagtacatttctctctggcttaatagcttgtttattattataatttaaaataacttgttgaggtaaaaggaaatcagtcaacccttggatgtatatttaagcaacttgcctcctctgtagtagggtattggattagtgttctgtagggtattggattagtgttctgtggctgctgtgacaagttactgcaagcttggtggcttaaaataccaagtgttttaggtgaatacatctctcatggttctggaggccagaagtttcaaatcaagtcatcagcattgctgagctccctccagaggctctggggaagaatctgtccttgtctcctctggcttccagtggctgcaggcgttccttggcatccctctgcttagggccacatcactccagtctctgtccccatggtcacattgcctcctcctcctctgtgtgtgtgtcctctctgtctctgcctctctcttatgaggacacatatgatggcagtgaggccccacttgtataatcccagataatatcatcaatcccagatattatcattttagtagatgttaatataataacatctactaagattccttttccaactaaggtagcactcagaggttccagggagtagaaagtggacatatctttttggaggccaccattcagcccactgtaggcaggttagtagtaaagtcagcattcttagctatttccagccttgcattggtcctggcttggagcaagtgggtaatagttatttccaagactatttagcatttaatttgcagtgttcaaggattagcagtatactctaagaaatttgggctacctatcaaatagcttatcgattgaacaccttccactatgcacagtatgtcacctgcattgactgttttttctaaaggcagccctcatagataggggaaaatgtgcccattttaaagccgagacatctgcctagggccccaggagtggcagagtcagggataatcaagcctgtgctccactaagaagggattcttcttccatagcacacagtgtctataagggacaatgctgtagttggtggcatatctttttaagagacagtgttagtgtctttgaaagaagatttccgtttctctcaatgtttggcctgagcacagactgtaaaagatgttgacttagactgttggattgtgtggggcttgtttcctctgacactttacagtatgttgttttacaggccctgcaggcattgcctttgtataatgtttaatttaatgtttttagttgatgtaatttgatatgcttcatttggagactgttgaaatg

SEQ ID NO: 82382 - DNA, 1013 bp, Homo sapiens
gttcactcatttaaagtgtatagttcagtggtttttggcatattacgttattaattttttttaatttggtaaaatatacaacttttgctatttaaccatttaaaatgtacagtttgatggcattaattacattcacaatattatacaaccatagccactgtttccagaactttttcgtcaccccaaacagaaactctgtaaccagcaagccagtaactccctatcttctgcctcccctcagctcctggttacctctaatctgtctatgaatgtatccttttgtgaactgttctttttgagcaactcattgcttcactgacattttaatttattaaaacaatgatattttgcatcacctggagcatttttcttttgtaattgtattactgccttatgtttagatcacaccttgggcacataaactttaagatacatagatgtgtatctgtgcaacatctcagctagggtggcttatgcataaggcagcaggagcataagggaaatagctgaggcttcagggtgggtcggttggattgatgccaccagacgggagatttgtcttgccaaagctaggtttctagtctttcaactgtagatcataatctccacctggttgggcagcagcgctgataaggctgtttggtgttgggtgtggcatgtagaaggtgtgcagaaagggtggttgttactgtgacttacactgtagtgaacttgaagaaaataatggaaatcttgtttctcatttcatttcgtttttttaaattcttttttttttttaaatttgtatatattttttgagaagtctcctccatcgcccaggctggagtgcagtggcgtgatctcgtctcactgcaaccttcacctccgaggctctagcaattctcatgcctcagcctcctgagtagctgggattacaggctcaagccaccatacccggcaaatttttgtatttttagtagagacggggtttaaccatgttggccaggctggtctcgaactcttggcctcaagtg

SEQ ID NO: 82383 - DNA, 1079 bp, Homo sapiens
aatatttgatatgttttaaaaagatattggccatttgtgtaaatgtgctaggggactctatgatagatatgatgggtgtttttccttgctttgtgaggcctttctgaaaacaggcggccgggcatagtggctcatgtctgtaatcccagcacttcgggaggccgataaggatggattgcttgagctcaggagttcgagaccagcctgggaaatatggggaaaccccatctctaccaaaaatacaaaaattagccaggtgtggtggtatatgcctgtggttccagctacttgggaggctgaggtgggaggatcgctggagctcgggaagtcaaggctgcagtgagctgtgatcacgccattgcaccccagcctgggtgacagacagaccctgtctccaaaaaaaaaaaaaaaaaaaaaaaagaagaggagaaagaaaacaggcatccgcattttacataggtaaactaggtcatgctgctggttgttctagacagcttgcttggatgctgaattgcctgtagtctaggacattctcttatttgagcagttggcctgggagaaggaatcatcttataccttagatgctgaactttgcatcagggaagctttaaggccatagaaaccctctcaaggtttcatgctgtctcactgccagctgcaggcttgtaaacacaggggcgctgtagggaaggcccctgctgtcctcattccgggataaacagaggtttacagagccttgtaaaagaagagggttggctcacgaggacttctcttgctcaagtaagtggggcgattaaagtcgaatagaaagttggaaagatccggagagaaacaatgctgtgagcctcttcagcagtggctgagattacaggtatccagaaaagcagagttgagtttctggttccatttgctcatgttgtgcacacctagccagcagacttcagataagtggtggttttgattgaggcgggccctaaaattcagagatacggaacataagttggttttgagctcttttgtagccgtcatgatagttcagtcagcttttccaagattggacatttgtttgtcttatacac

SEQ ID NO: 82384 - DNA, 1024 bp, Homo sapiens
ataatggtacatgtgaagaaatggcttcatgttgcgtgggcagacaaaattaaattttagaatttgggtcgtaagcacagctattgtcctgagtacacagggtacactgatagaattgtgatgggaagtgggtggctagtggtgggttccttctgcagtttttcaattttataatttgttgttgctgttaagtcaggtataaaattagagattaaataaagtagaaaaataatcttggtagataatttatctttagtggacacaaaatatatgagaaagaaagtactagttatctgacactttggcagaaaatccagagttttttcttatggtaatacaacatatatatgtaagttttgttaatgttaatacaacatatacattttactttaaaactcttcagaagtcaatgttcaaatgcaatataacttttttagtatttgtcataggaaatgtcttattctcacagtctgttgatatttttaactgatgtctgttgggttgaattagtaaaccgtaggaaaatgtcatggaaacacagagacaaaatttggtttgtaatgcattagctcaacttatgttggcatttcaaagtattttctgttgtatttggctcatgaaagactacagtggctgggcatggtggctcaggcctgtaatcccagcactttgggaggctgagatgagcaggtcatttgagcccaggagtttgagaccagcctggacaacatggtgaaactccgtctctactaaaaatataaaaagaaattagccaggcatagtggtacatgcctgtagtcccagctactcaggaggctgaggtgagaggatcatctgaacccagaaatttgaggctgcagtgagctgtgatcatgccactgcactccagcctgagcaatgggagtgataacctgtcacacatacaaaaaaagtgtgcggttacaaaaattacaacttctggctgggtgtggtggctcatgcctgtaatcccagcactttgggatgccaaggtgggcagatcact

SEQ ID NO: 82385 - DNA, 1072 bp, Homo sapiens
agctccttgctgctcctggaaccgtccaagccatttccatgttctgggtattaatacttgtttcccctacccgaaggactcttcccctagctcctttcgtatccgacttattctcatcctttgggttttccctgactttcctgattttcttgtcagaagtagttcccttcactacagagcaggatgcatcagcttgtcactgttcattccccagtgcctaatataatgctttggcacagcataagtgccagataaatatttcttgaaagaagactgaatgaatggatgaatgataaacacatttcaaaatcatttgcctttctgttcattttttgagatgtagttaaatatggtaaatctttcctgagtaatttagactctttggtttgttaaacaaattttatgttagacagttacttctgctaatgcattctttttaaaatcgtgtttaggaattccatatttaaatcaggaagaagaaagacagttaagagagcagtatgatgaaaaacgttcacaggcgaatggtgcaggagctctgtcctatgtatctcctaacacttcaaaatgtcctgtcacgattcctgaggatcaaaagaagtttattgaccaagtggtgtaagttcctaaattaaaactaagcgtgcattgtgtgctatatattggggatgacaggcatctatatctcaaacctgtgctttacaaacatagtacacacacgggtgtgatgttgtgaatggcaggatataattgtggcatattaaaaaaaaaatttttttttttttttttttgagacagtcttgctcttttgcccaggctggagtgcattggtgcaatcctggcttactgcaacctctgcctcctaggttcaagcaattcttgtgcctcagcctccagagtagctgggattataggcgtgcaccaccacacccgcctaatttttatatttttagtagagacgaggttttgccatgttggccacgctggtctcgaactcctggcctcaagtgatctgcccgcctcagcctctcaaagtgttgagattacaggcatgagccagcatgcctagccg

SEQ ID NO: 82386 - DNA, 1036 bp, Homo sapiens
acggagcgggaatcccttctgcggagcctccccagccgggtcgtaggaggcgcgcggggcctctcctcacgcaggcccgagtcctgagcatccccactcctggccgcggggttcggaccccagcttggccaactgcgctatcccttcccgagagccccacgtccgcacagccggtcgctgggcctcgcctgcgtcctttcgggggtcagggtcagagccactccctcctggggctccctagggcgggaaggaggaggggtcgcttccaaacaccttggaggggaaccacggggcgcctgcccgccaggagcgcttgccacaccctgcaacagccggaccagaattgatgaggcttctgatagtcgccacgctgagtttacggtctaattgtcgaggcacgttcctggcctaaggcggagcgattgtgcccattctttaaagtagggtgaccgaagcgcagaagggagaaagtgaaatcccaaagtcacactggggccaggcaagaactcggctcttctgattctgcgacttgcggctcggaaataacttaggcaaaagagaattttcttttttttctttttagagacggagtcttgccctgccgcccaggctggagtgcggtggagcaatctcggctcactgcaacctccgcctcccaggttcaagcgattctcttgcctcagccttctgagtagctgggattacgggcccgcgtaaccacgcccggctgatttttgtatttttagtagagacggggtttcaccatgttggtcagactgttctcgaactcctggcctcaagtgacccactcgcctcggcctcccaaagtggggagattacaggcgtgagccaccgcgcccggccgagaattgtcttttattaaaaaagccggcgggagggggcgacagatgagagtcaggttgtgtctaaacggggacctttggaggggcaggaggcagcatcccagcttccgcggaaaacagagtgagagcctagacgctgttaagccctcaactgtcgccattgggtcctcccc

SEQ ID NO: 82387 - DNA, 2129 bp, Homo sapiens
ttttctggtctttatcagaaagcctcccccacccccaccaaaaaaaaaaaaaaatcaggctgggcacagtggctcatgcctgtaatctcagcactttgggaggccaaggcaggcagatcacgaggtcaggagatcgagaccatcttggctaacacggtgaaaccccgtctctgctaaaaaaatatgaaaaattagctgggtatggtgggttgcacctgtagtcccagctactggggaggctgaggcaggagaattgcttgaacctgggaggtggaggttgcagtgagctgagatcacgccactgcactccatcctgggccagagagcaagactgtgtctcaaaaaaaaaaaaaaaaaattagcgcttcaatagaatgtcaatacttttatattaactgctcttcaaacaactactatttgccttatttttgtctctgttttttttttctagattaatgatgttttgcagcagttttctacgtctgaaattttttatgtctctggaacccagaatttgctaagagatggaggaacctcagaaaagctatgtgaacacaatggaccttgagagagatgaacctctcaaaagcaccggccctcagatttctgttagtgaattttcttgccactgctgctacgacatcctggttaaccccaccaccttgaactgtgggcacagcttctgccgtcactgccttgctttatggtgggcatcttcaaagaaaacagaatgtccagaatgcagagaaaaatgggaaggtttccccaaagtcagtattctcctcaggtaatgttcagcctatattggtagcacaaacagcccataaaatgtggtttctctcttgcttttttttttttttttttaacagagatggcgtctcgctatgttgcccaggctggtctcaaactcctgacctcaagtgatcctcccacttcagcctcccaaagtgctgggattataggtgtgagccaccatgtccagccagtgggctttctcttaacaggaacagcagtgtttgaaaggtcgcacacttggagcccacctccttgggggtggatcttctggaatatgagtcagggagctcaaggaactggaaatccagattctcttcctcataggtgaccatgactttttaaattatttattatgaatgaaggaaagaaagaaagtctggttagcagaccgttgctggtaatcctgtcatataaaggccagaccagtggctcacgcctgtaatcccaacactttcagaggctgaggtaggaacattgcttgacaccaggaatttagaagcatcctgggcaacacggtgagtccttatctctatagaaagttttaaaaattagccaggtgtggtggtacatgcctatagtcccagctatgccagtggctgaggtgggaggattgcttgagcctgggaggtcgaggctgcaatgagctcacaccactacactccagcctgggcaacagagcaagaccctgtctcaaaaaaaaagaaagaaagaaagaaagaaagcaaatggtataactgtataattgtgaataactggtttgttgctgattttaataatctttagataaccccagttccagttatcacattaatagagtttctcatgtgtagcatcacagtgccaaagccacctttcagatagcttgttattttctgcttctttggctcataatgtacctgtgaaggctctgaggcttaaatcctcttcccctcttctattgtctaacaatgtgtgtgcccttcttgatttcaacagagtactagaaagttccatgaacccaaccttttctttttcacaaaagatgtgtttacactttgctcttacctgtcagtcttgatttagctgaaggttaaatttaatcttaaattaaaggagggttctttgtgtataactgaacatttaaaaagagccctacaatttaagctgacagttggtcttattactgaattttgcttttttcccttcttataaactgattttaataacataagatacatatatatacacacacatacacacacatacatacattcattgtttatattctttgagacaaagtctcactctgtcgctcaggctggagtgcagtggtacgaccttggctcactgcaacc

SEQ ID NO: 82388 - DNA, 1056 bp, Homo sapiens
tttctccaccttgacacatttagtgatccagcaaatgcatttaaaattgtgatacttcattgtatgaatataccatatttcatttagccttttacctagtagtaaatgtatatcatcaggttggtgcacaagtaattgcagtttttaccattgaaagtaatggtaggctgggtgcagtggctcatgcctctaatcttagcactttgggaggccccggtgggcagattgcctgagctcaggagttcaataccagcctgggcaacatagtgaaaccctatctctactaaaaatacaaaaaaaaagttatccgggtatggtggtgtgcaccggtgagccaagatcacgccattgcactccagcctgggcgacagagtaagactccgtctcaaaaaaacaaaaggagaaagtaatggtaaacaacctaatagattatttcagattttttgcttttacccacaggactataatacatttcttgtcagttctcctagggtagctatatattattagatgttgactatcagggcttttttggcctctaaacatgatatttagtcaaacaactgtcttaattttttttttctattctccatagggatgccattgaaaagttatttcctgatgccattagactgagatttgaagacattcagcagaataatgacatagtccaaagtcttgcagcctttcagaaatatgggaatgatcagattcctttagctcctaacacaggccgagcgaatcagcagatgggagggggattcttttccggtgtgctcacagctttaactggagtggcagtaagttgatcactgtgttcctctgtgcccccccacacctcaccccccgacccctgatttccactgaagtcagttctgttgaaatcactgaaataattgatgatgtgactccatgtaatttactacgtacattgaaatctgctgggttctatgatttcctcaggaatgttgcttactcaggtagatcagatcatagtacctagtaaatggagaaaggtggtagaactggaattcaagaccatgtctgccttggtaa

SEQ ID NO: 82389 - DNA, 1050 bp, Homo sapiens
gagccaccacgcctggacctccttggtaatacagtcttaagaacccaccagtttactaacttccaatgtggagactattttcttttaaagttctgtgcataaaaaatctaaatgtttttccagtagaaaaggcacaagtcagttatgttgagcaagttgatggagtcaaggcaccacctgctcccaggtgcctgagataagtccttttctcgcctctgtgccctcactgccacgcaatcagcagagagaggcacccgaggagagctgtggtccccagttctctgtggccgtggcgttgccctgcttttgttgccctgcttctgtgtacgggctccgcatcattccctgtgagctcagcctcttcctttccccacctcccacccgcatatttagaaactggcatctctgcctctccatggtttaaagtccctgtcacttttccccaggtggtcctgctcgtctatcactggagcagcagggaatctgaacacgacctcctggtccacaaggctgtggccaaatggacggcggaagaagttgtcctctggctggagcagctgggcccttgggcatctctttacagggaaaggtttttatctgaacgagtaaatggaaggtgaggagcaaagtcttctgacacaccgtggacattttagaaaacagctttcttgagatataatccaggccaggcgcggtggctcacacctggatcccagcactttgggaggccgaggcggatcgatcatttgaggtcaggagttccagaccagcctgaccaatatgatgaaaccccatctctactaaaaatacaaaaaaaaaaaattggccaggcttggtagtgcacaccttgtaatcccatctattcgggaggctgagacaggagaatcacttgaacccaagaggtggaggttacaatgagccaagatcatgccactgcactccagcctaggcaacaaggcaagactccatctcaaaaagagagagagagagatgtaatctacataaaattcacacgtttgaagtgcacaatccatggtttttaatgtgttc

SEQ ID NO: 82390 - DNA, 1050 bp, Homo sapiens
gaggtcaaggctgcagttgagccacatttgcaccactgcactcccaggctggacaaaggaatgagaccctgtctcaaaaggaaaaaaaaatatgtaaatgtaacaaagtgatgaagcaggtgaagttgaggctgtcacagggaggccttgcccagtgtgggggcaaagaagctccctgtaggtcatgtccttgagagttaaaagatgggttgagtaggcagaggtctcaggcaccggggacagaagacaaggacattcagcacgggcagccatgctcttcccagcacccagaaaaggcccagggcccggactcctgggtgtggtcatgagaagcgcctccgattcagcctcttctcttcttgtttcaggaccgtgcctcagaggatgtggagccatttctggaaagtatcaacgcaggggctttttgtggccatgttctggcccctcatccctcagtttgtttgcaactgtttgttttactgggccctgtactttaacccaattattaacattgatcttgtggtcaaggaactccggcggctggaaacccaggtgttgtgactggcactgcccaggctgagactcttcaagtcccgctgacgtctgagctttgatgcttaagaggggtgaggcagggagcggacttcctattttctaccctcagtaaaacaaggtgctgctttgtatatcaaaagctccaaccatgtcctctccccctcagcctgtgggtggcacgagcaaggactgacatccgcacagggaggattgtctgtttggctgacacagcagcagcccttcccacccagccaccttcctcacagggactaggaggctcagtccccaacggctggcaagactcagggtcctcagtggacatggtgtgggtgacatcagaagggtgccacatcagtcccctccccaacctcagtgactgacagaggatccggatctcagagcctgagaccaggtttattggggcctggcctgtcctctaagtcaagtttaggaaaacaaggataagattctgtcataggcatagagagttgcaca

SEQ ID NO: 82391 - DNA, 1042 bp, Homo sapiens
tcatgttattcagaattgttttggtgatacctcacccctgtaatcccagcactttgggtgggtgaggcaggcggatcacttgaagccaggacttcaagaccagcttggccaacatggtgaaacctcatctctactaaaaatacaaaaattagccaagtgtgatggcacatacctgtaatcccagctacttggaattggaaatcgcctgaacccaggaggcggaggttgcagggagggagactgcaccactgcacttcagcctgggtgacagagggagactctgtcttaaaaaaaaaaaaaaaatcatctgtaaaataaattccgggatagtcgttttgttcaaggaaatgttttgtaaattgagctcacactatataatctttattgtcctatcctgatgtataatacagcaggtataattacaccaagcgctatagttataaatatggcatgaagtgaactatggccttttatttccttccagtgtgaacacagcaggtgtgagatgtcatcttggaagacaggccttgcagaaataggcctacatccaaaatattatcttgtgactccatgaaccattcattaaccctttgtatctttgagtgaaaattttactcaaaagttgcatctggaagttcgaagaaattacttgaaataaaaataaagatttctatatagataaaacctatatgtagagaaaaagcaattgtctagaaaacacaaaacttctgcattgccggatagaatcttctagccatgggccgagcgtggtggttcgcgcctgtaatcccggcactttgggaggccaaggtggatggatcacttgaggtcaggagttcaagaccagcctgacgaacatggtgaaaccccgtctctactgaaaatacaaaaattagccaggcacggtggtgcgcacctgtagtcccagctacttgggaggctgaggcaggagaatcacttgaacccaggaggcagaagttgcattgagccaagatcatgccactgcactccatctgggtgactgagcaagattccgtctcaa

SEQ ID NO: 82392 - DNA, 1054 bp, Homo sapiens
aatttttgtctacggagtgaggtaaggggttgaactttattcttttgcatgttgttatccagttatctcagccctcttggttgaagagactcttccccattgaatcatcctgctacctttgctgaaaatcaccgccaggagtggtggctcacacctgtaatcctagcactttgggaggctgaggcggatggattgcctgaactcaggagttcgagaccagccagggcagcacggtgaaaccccatctctactaagatacaaaaaaaaattaggcgggtgtggcagcatgctcctgtagtcccagctactcaggaggctgaggcaggagaattgcttgaacctgggaggtggagattgcagtgagcagagattgcaccactgcacttcagcctgggcaacagagcaagactccatctcaaaaaaaaaaaaaacaaaaaaagaaagaaaaagaaaatcacttggctctagatggaggaggatttcatcactttgagctaataatttgacttctcttaaccccagcttccttacctgtaagataggtgttgtgaagatgagaaaagatttgtaagatgagaaacagattttgtttttgttttgagatggagtcttgctctgtcgcccaggctgaagtgcagtggcacgatctctgcccactgcaaactctgcctcctgggttgaagtgattatcttgcctcagcctcccaggtagctgggattacaggcccctgccaccacacccagttgatttttgtatttttagtagagatggggtttcaccatgttggcctggctggtctcaaactcctaacctcaggtgatctgcccacctcggcctcccaaagtgctgggattacaggtatgagccaccatgcccagctgagaaacagattggatgggaatttttcttctatctcctcctcctatctttatctgaacttctctctgacccctgctaactcctggagagaatcaaagatctgttccaactcttgattaaaactccaggttctgctgacttggtctgctctggtggcaaagaggctattgtaag

SEQ ID NO: 82393 - DNA, 1111 bp, Homo sapiens
cgaaatccactggtaacagagcctacctctggtttccccttgggggaacggcagcgtggtgtaccaggctgactgctctaccatgtgaaacggattctcattgtcccagtgttagggcttgtaaatggaaaccagtttgggtttcttcacggattcctgctttcggtacctgacattctgccctccctcaaagcccttctgtctgttccagcttgggagtctgcttgtccaatccagtgcatacccggtttttcatgcatgtggcattcaggagcaatgctcgtgttttaagacggctacattttaattttgagctggtaggaataatatattttgtcttttttcaaggcagcagctgctgtagattttgttcacttgtcactggagagttgaaggcaataattgtaaaggttgggccagatgtcttcatgtgctcacagtggtatagcctactcctgggttgcttagcataaattgggtggaagacaagaaaaagataatatggttttcttgtgccatctctggggtgaatgttacgtgttttcctggctgggaataaagtctttccggtcgtctgattagcagggtgtctaccttttggtactttgagtttgtccagatgagtggttcttaaagcagggggcaatttatttccccaggagacatttggctatctctggacatagttttgattgtcacaatgggggcagggaggtgctgccggtacctagtgggtagaggccagggacgcctctaaacatcctacgttgcacaggacagccccccacgctggagaattctctggcccaaaatgtcagcagtgttgaggctgagaaatcctggtcaagatcatgtttataacaccagcagttgagtacaaaacgatgcaaagtggtgttatcaatttcctaagaaggtgggtgggcttcatgtgattgtaattggaatcctgaagaactggggtgatctttcctccaggaataattagcctttataggaaaatctgcagggtgggtcagaatcctgctttaaatattacttttctggcatttgatcagtaggttacagtagttgctccctaagtgttaattgatgataaaagatcttaaac

SEQ ID NO: 82394 - DNA, 1059 bp, Homo sapiens
atttatttaaccacaagtaaatttatatcggaattcagtttataatttgagctttgttttttaaaaagcataaactatataccacgttctttctcttatagttgcttaagaaagaaaaaaaaaacttgaagcaacgctagttgaatgagggaagtagcgggagagtggcgggggatgtgtgctgttcccatcagcccatcaactctttttattctgcagtgggcaagatatggtgagcatcctccagttagttcagaatctcatgcatggagatgaagatgaggagccccagagccccaggtaatgaacctggcagcttctcttttcaagtgtatgtgttcttgatttcagtagtgattgcgctctgacaagttgctcaaataagaagctatatttcattgagttacatatgatattaaaataatcctttttattttcagaaagacatttatattaatatatattttgtgaaatgaaggcatttattgaaattagatcccatagtttttatggtatcatgccttagagaggcgctggcagaaggactgaagagtgagtgtcggatgtctttctgctgctgtgcttctgcttcctaagaattgctgtagttgtattcattaggtatttagttagttttctcttcaattattttaaatttaatgttttgaaataagtaaaattattctcttggttcaaaattcagacaatgaaaaatgatatacaaagggaattttccttcctacctctatctccctaccatgttttcttctctagagacagacattaccagtttcttgtgtattcttccagagagattttatatgtattatacaccagcaaaatgtctatgcccaccctctctaatacataattactatgcatatgctgtgcatcttgcattttttcacttatgtcttggagttcactgcatattaatgcacaggaactttctcctttgtcagagctatgtgttttactttgaacagatgaaccatattttattttattggtcccctgtcatgttgcactgttacaaacattgctgcagcaaacaacttt

SEQ ID NO: 82395 - DNA, 1036 bp, Homo sapiens
agattacaggcgtgagccaccacacccagcctctaactagcatttttgacagttttatttactttggatgttttagggctgaaactctgctatgaactatgcctgtgttatccagtgctggccttagttcataataagccagaaccatgatcttcaggctttttatatctgagaattcctggtctctacttgttttcatagtttctgctctttatggaattgggtatggatggagggttattgtctcgctgcttggtaacctcagctgtaatgaggtgtcagccatctatgatgaggatgtttcacattcctgtcctctctgcctgataaaagtgacaattcctagcttgagaaaagaattgtctccatgattataaggttgacttatacaatccttaactagaaataagagcatattaatatgtatctcttaacagatatgaaaatgggtgtgcttatttccacgaagaggaaagagaaggacttgcaaagatatgtaggcttgccattcattctcgatatgaagacttcgtagtggatggcttcaatgtgttatataacaagaagcctgtcatatatcttagtgctgctgctagacctggcctgggccaatacctttgtaatcaggtaatgtggtatcaggtggctattttaaagaaataatgtcttattttgttctgaaagttttaaagttgacccgtttgtctagttgctgttcttgctgagtgaaaagaaagatggtcttatatgcttttgtcatatttgtaaaaattactgaatttagaaataaggaatatgggatagattacccaggggcatccacagtcaacattttctcttttttcccagactttaatcgaagggggtgtgtttgtgtttatatggttgtatctggctcttttcacttattgttaaaacaggaatatatcattttaataataatttttcaaagtatagtttatttttaatgtcttcatggtattccttcaagtgaatatatagtaattaactgttgcccttttggacaactaagagt

SEQ ID NO: 82396 - DNA, 1050 bp, Homo sapiens
agattttgaaaatgaggttcttcattgtcatcatggaattgagttctgcttattttcagacatgcaggtgataaatctctccttaatgattccagaaggaaaaggaagggatggattttagagttttttatttcttttgtcaaggtagttttattttctagttcaggtacatcagtgagtaatagtagagatacattcttggctgttttaggagagttaagagaacatttcatttaaatgtaaatgtttaaaatcaaagaaatgttcctgcatatgtacagtttttacctttaattttgtttaactgatttttctagtcttcaaggaaaactatttgattttcacatctatgatgagagaaaacagaaaaattgtcaagagtaagaattgatttgacattacttttgagagttatctgcttcttttgtaagtcataatttttcattttatagcttttatactgggcacctcattttttaatgatttgttttggttccaggatgttgccttcctggagaaactgattaaagatgatatagagcgaggaagactgcccctgttgcttgtcgcaaatgcaggtaggtagcatgatgctgaatctaccattttgaatatataggagcgaggctacgtcctcagcctataaaagataaagtcttaagaaatgtgtgtgtaccacatgtttaagatagtccatatccacattgtagcaaaaactgtaatagtaaggttggctcgttagatttttctttaatcgttggtttgttttggaagttattttatgtgtgtgtatactttttcatttagatggtaaatgcttctctatcttctccttcatgtacttcttttccctgttctaaactgaattttattttatttttttgagatagagtctcactctgttgcccaggctggagtgcagtagcacaatctcacctcactgcaatctctgcctcccgggttcaagtgtttctcctgcctcaacctcctgaattgctgggattacaggtgcatgccaccacatctggctaatttcttgtatttttagta

SEQ ID NO: 82397 - DNA, 1060 bp, Homo sapiens
gaacctgggaggtggaggttgcagagttgagatcatgccactgcactctagcctgggcgacagtgtgagactccgtctcaaaaaaaaaaaaaaacagttatgaatgcttgtgaacataactttaaaatatataaaggaaagctaaaggaaaagtctgatgtaacacaagtatatattgacaaaccacaatcttggtgggagatttgaatatatttctcatgagtcagcagatcaagtagatagaaaataagtatataaaagaattcaatgacacaattagatacatgtaatagagattacatactcttcaaagcttgtaataagtcaactcacaaacactgattttaagtccttccacaaagaaaatctcaataaaatagggatataataagtcacttccctcctagggcgataatgtgtataaaagtgtttaaggtataaagccttagaaaacatttgttccttttaatgccctgatgtgttttatcctaggaacggcagcagtaggacacacagacaagattgggagattgaaagaactctgtgagcagtatggcatatggcttcatgtggaggggtaagccggcggtgaggctggtggctccattcgggcctgcacagagtccttatgaggactggacatccaggctctcactttggtgacatttatcacgaagggctctttgggtcacagatcacaaaataacccaaattggcttaagcccaaagagatcttactggctcacataactacaaagagcagtgttatgactgcctcaggcacgacatcaaccaggatccagtgtgttactcccacctctgctcccccagtcacaggcactgggcttggtttcctctatctgtggacagatcttcctgttacagtgcaaagtagctgcagaaactccagccttctttccagcttcgtggtcagctggaagtcctaacagaagtctcgtattgaaccagccactgtggccagggagaagtaatcctctgatagttgaggttctttgctctcctctggagcagatagtggtgtctcctccccacaaagctc

SEQ ID NO: 82398 - DNA, 1045 bp, Homo sapiens
atatctgttgaattaatatactccaatcccatgagttagatatgattagtgatgagggacctgggattgagacattagtctaatgacactacattctagaccctgtttctaagcacttcctgtattgcatatcaactcatttaatcctcacagcaatgtgagatacatactatcctccccattttataattgagggaactgaagcatagacaggttacatagctggtgactggcagatgaattgacttatccgtggtcctgcaggtgatgagtggcagcactgtgctcttatcaccagctcttgagcgtgctgcatcctctcatttgtcgttggtctcccctagtgttcagtactgtgccttgcacgtgtttatactcagtagcttttgaatgacagacttacattgcaaatacaacagatttccatgtcttattagaaactgcttttcttgaattactacatgtaacttgaaggattggtgaatatttacagttgttgaaatacaaaaacaggtggctgaacttagaaaccaccaagtggcaggtgactttgcctgacatccgtgttcacagacctccacagcccctggtgaaaaccacttcttcatgtcccacgtccatctaattacatgtgttattttttgtcatttgcagagtcaacggttgcaggaaagtttgaagaaagtgaattacatcaaaatcttggtatagtatataagttcatctgttttcaaaatataactttttttgaacctcagcaactttgaatgattttagaactttagaatgattttctccacatttcagtggaattgtggcagctccagtaaaaaaacaaaacaaaaaaacgaaacaaaaaacaaaaacaaaaaaacctgcttatatttatacagtgagtctgaagcgaagaaatttgaaccatacaatgtttaattcctatggtgcttttcatgtacttcatttattgtgttaaagttcagaattgcacaaagataaacaccattgacttcagctgcccaaggccttgggcacactcttcttccca

SEQ ID NO: 82399 - DNA, 1050 bp, Homo sapiens
ctgaagctgtgttgtgaaataaagcaattatctgttgcagagacagcctgtgttgcagaagtatcctcactgagtttcagcgcagtctgtctgccctttctgtaggccagaagccttttaaaaggtccctgcgaggttcagatgctttgagtgagaccagctcagtcagtcacattgaagacttagaaaaggtggagcgcctatccagtgggccggagcagatcaccctcgaggccagcagcactgagggacacccaggggctcccagccctcagcacaccgaccagaccgaggccttccagaaaggggtcccacacccagaagatgaccactcacaggtagaaggaccggagagcttaagatgagactcattgtgtggtttgagactgtactgagtattgtttcagggaagatgaagttctattggaaatgtgaactgtgccacatactaatataaattactgttgtttgtgcttcactgggattttggcacaaatatgtgcctgaaaggtaggctttctaggaggggagtcagcttgtctaacttcatgtacatgtagaaccacgtttgctgtcctactacgacttttccctaagttaccataaacacattttattcacaaaaaacacttcgaatttcaagtgtctaccagtagcacccttgctctttctaaacataagcctaagtatatgaggttgcccgtggcaactttttggtaaaacagcttttcattagcactctccaggttctctgcaacacttcacagaggcgagactggctgtatcctttgctgtcggtctttagtacgatcaagttgcaatatacagtgggactgctagacttgaaggagagcagtgattgtgggattgtaaataagagcatcagaagccctccccagctactgctcttcgtggagacttagtaaggactgtgtctacttgagctgtggcaaggctgctgtctgggactgtcctctgccacaaggccatttctcccattatataccgtttgtaaagagaaactgtaaagtctcctcctgaccatatatt

SEQ ID NO: 82400 - DNA, 1032 bp, Homo sapiens
acagcctgagtggcagagtgaggccttcagtcatgatgccaaattgcttcccagacaggctgtaccatcatatgagtaagcttgcttcatggcctggtggttagtcaacacacgacaatgttttctttctttcttttttgaaaatatttgctaatttaggccaggtgtggtgactcacacctgtaatcccagcactttaagaggccgaggcaggtgcatcaccaggtcgggagttcacaaccagcctggccaacatggtgaaaccccatttctaccaaaaatacaaaaattaggtgggtgtggtggcgcacgcctgtgatcccagctactcaggagggtgaggcaagagaattgcttgaacccaggaggcagagcttgcagtgagccgagatcatgctactgcactccaacttgggcaacagagcaagactacatctcaaaaaaagaaaaaaaaagaaaaaatttgctaatagggaaaaaatggtatcatcagtgttttaattttctgcagattaaaatggacatttttgccaggagggagggtggctctgctttcacacaattcagagcacttactattttggaatgtgttcactgctgttttagtagaaaatcttgtccccagccctgctacccctccctacacatgagctccacgcattcagtctttctgtgaaattccaagctgggcagtctgtttctctgtgctgctccaagtgggtgtgcccttcttgggttttgtaccaattgggatttttaacccaagcaaatatgggtacatatttatgtccaatttgggggaaagaaaaaaaaaatgaacttactaagaagttgatgagtgagtttttgtgacaactgcctgtcgtcactgaagcctccaacaaggtgtacttccagcctggcaaagagatgagacgggtcagaggccagaagaagacaccggtgcgtgcgctggtctcactttgaactttcattctcagtttccatgaacacttgctctacagcagagctgcaggtcatcttcgtgccacc

SEQ ID NO: 82401 - DNA, 1028 bp, Homo sapiens
agagtgagagactgtctcaaaaaataaaaaagaggggatgtgatttcagagccatccatccactattcctgtgtaatctgattctctttacaatggtaaaattgttaagagtctcacactctttagtaaagaactgtgatagctgggtgtggtgggtcatgcctgtaatcccagcactttgggaggccaaggcaggaagattgcttgagcccaggagttcaagaccagcctgggcaacatagtgaggccctgtgtctttaaaaaacaaacaaacaaacaaaaaactataataaaggatttttgcatctcatttcataggttactatgacatccgatttcataggttaaaaaaaccaccgcgcagaaccgcatcgttttctctgcattgttctgaatgaccgtggctgctgcctttttctttgagcctctctgtccactaacacactccccacacactagcgtgctgcccacgcagagcccactttggctctctccacatctttagtttttccatcctcactaatttacatcactattttattttttttttaattaaacaggaaagagccagacttctcagaggtcagtctgttcaacaagtgggaccccagggccttctgtatgttcagcaaagagagcttgcagtgacctccccaaaggatggtaggttaggaagcagtgaattgggcgttatcccaaaaggctattggatattttattttatttcttttttaaacaggctccatctccattctgggttctgatgatgccactacttgtcacattgtggtcctgaggcacacaggtatgatgagagaggtgaaggaaaccattacttaaactgacccaacctttgggaccattgaatttctcgtgttgagtttcctggtgtcttgttggaagcggactccgcttaccttttttctggtctgcatggtgtctccctggtgtcctggtcagaatgggttggctggggagcacagacctgtccgtttttcccctacaggatattcaaagatgaggcggtc

SEQ ID NO: 82402 - DNA, 2161 bp, Homo sapiens
aacaaatgattacaatgtgtgatgagcagttatgtgggtatgttggtaagaaggaagtgcttatcagagggagcttttgttctgttctgtttttctagagacatggtctcgctatgttgcccaggctggattcggaactcttgagctcaagcagtcctcccacctccacctcctgagtagctgggactacaggcgtgtgccactacactggctttcttttgaaattaagatattttcttcaccatctttacaaacgttaacaccttcctgaggaaggaattgttgaaagcttttcagtcagcactggtgatgttactgatgatttctgatgtttctgcaggacatagtggaagatgaagatgatgactttctgaaaggcgaagtgccccagaatgataccgtgattgggatcacaccaagctcctttgacacgcatttccgaagtccttcaagtagtgtgggctccccacccgtgttgtacatgcaacccagtcccctctgacggcagaaatttgtgactgagatgtgacatttgggattccccatcacttgtcatgccctcagcacccagcttgtgccattgggcattgatggcattgaactagagcgagtgcctgcctcggctgtggcacttccaggttcgactgaatcaagcatctgaagactgggtttttttgttgttgttgttccccttacagacaaaatgaagactatcatgtgcaatcttttacagtggggttgatgatacatttggaaggatttgcttgtttaatatgtacattttttgtgttaacagctttttgacacaattactgggtaatttctaatataggcagcagactgttttacgggttgctgttttaacatgggtttttgtcagatccatggtcttaggacttgactgatgagctttcagtgaagaatcctctaagataaaacttctatttaaagactttaactagaaagtgtttattttggctacattgttcaccttctgctgtattggtatttgtctgttgggatttcaagggagtgtagagaagacagaaggaaagctgagagctggcccgacatggtctgggacacagagttggagctggcactgaagatctccagggacttcagagaccaataaaagcccatagggaagagagagaggatatagggaaacagaatcagatgtgtaatatacttggcacagcgaaaaaatggatttaaaagacaaaaatggaggtccaggtagatgtaattcacacagactgaaagtgagttcgggcttgtgtaaaacacatgagattggatttgaccccttggctctcaagtgtccccttagatctagaactgctccttggtggccattagatcgagtcagttttgatctgcatcacttagttattgggaatttctttgttggaaacaggaaaatttttttagattatttggtgtacggttttgctcacaacaataggtggaagttgctagtgcagtcttggtctgatggctgtgtgcatcgcacattcggcttggtgaaatccttctctaaagcctctttttgtatttttataactaaacagaggaagtcttcagaagacctcgctttaaaacaaatttgtgcaaacactgctagagtcattttgaagctcaagcattttcactttgtttcttacatgtgtacttttttgtttacttgtgaaaatggccatctttaagcatatttattttctgccactttatttaaaggcaagcaatattttcttgatcataaatattttgtaatgaaatacttcctcttttccagggctttgtatgcacttgtataattacattgatggcaatgtagagtttgaatttcagtctgtaaatacttttttggaaaatagaaatttttattgctttaaagttttggatatgggtggttttcttttccgggtttggtggaaagtaatttgagaactttaaggttgtctttttaactgctggcaaaatgttgattttttaatattagataaaacgagtaaacgaaattccccagaaattagtagtaagtggggtctttgtgggttgggaagtagttttaatgtagaaagacatttacatataagtctgtttaatttcaaaggagtttgtgaaaaaaaatccatggtgaaaatgaaacaatgac

SEQ ID NO: 82403 - DNA, 1026 bp, Homo sapiens
ccccaaccacaaaattattcaccataggacttgactaggatgcatcagggaatactgaagtccaccagactgtctttctcttgagaggtgttggtgaacgtgtcctgtttggccaatcaccttaagaggggtgcctttgagatggttaggagaacctgctttccatcccttgggacgttcttaggggctcacctgttcctagaaggtcagagctactctgccttgtaattggaaggttgtcttcctacgcacccatccttatccttcctttctttgcttttcctctgtacccatgggtattatttaaagaaacctatgaacttacttagcatggtttgtaatgaaaggcagttgtgtgtttttatgttattctggtttttttatgatgtgtaaagttgacttgaatttttcttttctctagtactgtaaaatcatgcctagatcttttggttaactggctgcacatataccttaataaccaggattcgggaacaaaggcattctgcgatgttgctctccatggaccattttactcagcctgccaagctgtgttctacacctttgtttttagacacaagcagcttttgagcggaaacctgaaagaaggtcagtgttgtgggagtgctggactggattttccttgtgttcttgtcacccttcagaatggtgattcattacttttttgagatttttataaaaactggattcagaaaactgcatgtgcactcaaacttttaataataatttcaagcagctcataggcccctacaaaccccttaagatagatttgagcttgagaaccctacaaaccccttaagatggatttgaggttaagaaagaggtttctgcctttgaaagtttgaaatgtgaagatgtctccagaggtgaggctgagccctgggctgtgccagcgccctgtacaaagcttcagttggatgcaccttctctttgttgtccttgtaacagcccagtaaatggcaggtattctccctttacagacagcactaaagcacaggaaagtcattt

SEQ ID NO: 82404 - DNA, 1040 bp, Homo sapiens
cctcctgccttggcctcccaaagtgttggtaattataggcgtgagccactgtgcgtggtccatttctttgttttagtttagttttttttttttttttttggtggggcacagagtcttcctctgttgcccaggctggagcacacgaactcggctcactgtagcctcctccacctcccagttcaagctattttcctgcctctgcctcctgagtaactggaattacaggcgtgcaccaccatacctggctaattcttgtatttttagtagagacagagttttaccatgttggccaggctggtctcaaactcctgacctcaagtgatccccccacctctgcttcccaaagtgctgggcttatagatgtgagccgctttccccagcctctttgttttatcttttaagggaaataatcacttatgacagttttcctactaaaccactttgacattgaattttttaatgttagtatttactttttgtcttcaaaggatgaagatgaagaaactgaacatgaaacaaaggctggtcctgaacggctcgaccagatggtgcatcctgtagccgagcgcctggacatcctgatgtctttggttttgtcctacatgaaggatgtctgctatgtagatggtaaatcacagtagctactgtttattgaacacctgcagtgtacctggctttgtgctgggcattttccatccattatctctagtaatactaaaaatcctgtaaaaatatctattgagtatgagtttaagatgatttaaagaggtcaagttacttgccagtcacatagcttgaaaatgggactgggattctggctgagttatatttgtcttctgtcttttcactgattgttgtattgaaagattatatatggagtttggccagttttagatcaaattacgctcaagttgctgaatgcactgaagaatgatgtagggtgcactaatatatggtgctccgttatgtattgagtttagagggtctttgcctggcaccattgttgtgccagtgttagtactatatgtgcttcttgactt

SEQ ID NO: 82405 - DNA, 1050 bp, Homo sapiens
agtggcacatgactgtaatcccagctactcgggaggctgaggcaggagaatctcttgaacctggggggcggagtttgcggtgagccgagatcttgccattgtattccagcctgggcaacaagagcaaaactctgcctcaaaaaaaaaaaaaaaagtgatttgggtggggacacagagccagaccatatcagagctagaataaatgttgaatttgttgaggctgcctggcatagagcatcatgtgatagttgtcgattttatataagtatgtagtaaaaggggcttggtttattatatttaaattccttcatgacctaggtcagtttacaggcttgcaccataattgtgtattgtgttggggtgtgatataaggcactaatctggacaccttgaacatgcgtatatcagatgaatttccatcccaaaataacatagttgtattttttaaatccttttattctttttttttctccctttgttataggtgaatgcatcccggcagggtattgaagatgctgaagaaacagcaactcaaacttgtggtgggacagattccacggaaggattgtttaatatggttagcagtttattaatgaaagtggagatgaagtttatcataaagggtggaaacagctagtgctgctcatctttgttaaggctttagattgaaagaattaaaatagttcagcaaacttgaaaacgattccttatatgagtaatttgctgccatgtcatttagcacttagcatagttggtctatttccaaggctttgaatttgggtttggtgaagtatgtttcacttttgttcttgtaactttcagtgtttgtttttgtaagccagatgctgtctgtgagggcgtggttaatagaaaagcatacctgtttaatttctgcattttaccacttgtacactttatagcattacttcttttgggtggtatctgaagttgggttcagtggaaggagagtctgagacagggattcaggtgcccttgggacagagggtgtcagggagcagaagagggcaggggagctaaacgggggccggg

SEQ ID NO: 82406 - DNA, 1066 bp, Homo sapiens
tagttctagctactagggaggctgaggaggaaggattgcttatcctgggaattcagggttgcagtgagctatgattgcaccactgtacgccatcctgagagagagagcaagaccctgtctctaaaagaaaaataaatgttctgaaattgattatgttgatggtctcataactgaatatattaaaaacttaaattgtatactttaagttggtgattgtatgatatatgagttttatcaatacagctacttaaaaacctatagttatgcaaattaaaaatttcatttactgggaataattgaaatgattataccgaacataatacatgtagaaacagtatagtttttgtattgctggatagtctgtttttttctttttaaatatttgaaactaaaggtcatgtaattgatgttttgcttacataactgtgaaacgtttattctctgttgaaatgttttatcttacattttctcctttaggaatgttacgttcataacttactaaggattagtgtatattttccaaccttgaggcatgaaattctggagcttattattgaaaaactactcaagttggatgtaagtattgagtaatctatttttattttcatttactgacttgaatttgttataatcacagtatgtggaaacaatagtcagtgatagaaaagaatccacttggccaggcgtggtgactcacgcctgtattcccagcactttgggaggccgaggcaggcagatcacctgaggtcaggagttcgagaccagcctggccaacatggcgaaaccccgtctctataaaaatacaaataaaaaattagccaggcatgatggtgggtgcctgtaatcccagctactcaggaggctgaggtgggagaattgcttgaatccgggaggcagatcttgcagtgagctgagatcgtgccactgcactccagcctgggcgacagagcgagactccatctcaaaaaaaaaaaaaagaaaagaaaccactagcaccattctttgcttcctttctttgaatgtgtgcatgtgctgggagttgtagacagttccttctcatgattgg

SEQ ID NO: 82407 - DNA, 1613 bp, Homo sapiens
tcgtcgagctcgtttccgtgaggataacgttatcttgggtgtctgtgagactgctgcactgagtatagagcccaggctcctgggtcagccgggttcgaatcccctttcctccgtgaagatctgggtcagtcacaagtgcttcagtttcttcgatttgactgagggaggctttgactccaaaaaattaacacttgagtgtacccggccacagcttagcacatccagggtgtttccaccctttcttcgggatcctcagggctggatggagccggtccttcccgtctctccttatactcacgcactagcgctggctggaacaagtcctccaagtagaacgaggagcgggtttcagcggcgctctagcccgccgagagcatacgccctccccacgcggggccgctgattggctgaaggttgcgctggcacgcgcaacttccgggacagaggctgtggctggaaggagctgggcatccggcctgaggcgcagcggtcgcgttagttcggcccaatggcggcaccgctgcttcacacgcgtttgccgggagatgcggccgcttcgtcctctgcagttaagaagctgggcgcgtcgaggactgggtaagattcaggccgcttccttctgcgtatctgggacgaaagctcaggacggcgcttagaggagcggattgaaaggatgtgggacaaagctcatggcgtgtgataggagcacggggtggagggtcatctcacgttcacagaaatgagctcattcctcctaactgggtaatagacatgggtggggcctggaaaagtgactatgttctctgttctggaggccccctttcccgactgtgtctcttcgtgatttcccaggcctgggtactgccttctgcgccttgacccctcttccttccctcttcttcgtccaaatttggaagggatttccctgggctatgtgggttatcagccgaacgtcgtcactcatggcaaattgaatattacatcttttttgtttggaatttgtttcgacacacgtatttgtttcgcagtctttattttgctccacttttaaaatccctaacccccgtagcactcttggcgtttaactttcagagtcattaggatgctatgttttttcattaatttactacgtgtaagtgaagcaaaccttgtaaaacaattagcgtaatatgattcataataattatcgagctcctgcttactgtgttaaacactggggacagtggtttatccaaagacactaatgtccctgctttctacagagcttacagcataggggggaaaggcagtacataggccaataaataaacgaacacgatgatttcagttatacaacaaggtaatgggggagggagaagggagagaaggagcttttgagatttctcattgggaagacatctgtcatttgagcttccacttgaatgaagacaaaaatctaggccgggcgcggttgctcacgcctgtaatcccagcactttgggaggccgaggcgggcggatcatctgaagtcaggagttggagaccagcctggccaacgtgcgaaacctcgtctctactgaaaatacaaaaatcagccgggcatggtggcaggtgcctgtaatcccagctactca

SEQ ID NO: 82408 - DNA, 1947 bp, Homo sapiens
aggcaggcaaatcacctgaggtcaggagttcaagaccagcctggccaacatggtaaaaccctgtctctactaaaaatacaaaaattagccgagcatggtgtcaggcacctgtgatcccagctactcaggaagctgaggcaggagaactgcttgaacctaggaggcagatgttgcagtgagccaagatcttgccactgcactccagactaagcgacagaatgagattccatctcaaacaaaataaataaataaaataattcagcaggatgaggtggctcatgcctataaccccagcactttgggaggctgcagtgggactactgcttttgcctgggagttcaagaccagcctgggcaacatagagataccatgtctcagaaaaaaaaaaattaatttaaaaaaaaagaattcattgatgattctgtatttacaaatatattcctgcatcatttgttcatggtaaccaggaaattgcaatgcatatatacatgctgtcatttccaaagccgctgtcttccagaattggtactgattctagtagacttttcattctggtgttaaaaatataattaatataggaatgtcttctacctaatagcttttttccccacaactccccaaccccctcactctagaggccttaagtagtctaagttaatcagcttagtctgaaatataatactacctaggcatcttgttggcctagtatttcttactcttttatggaatgaactgtgcaattgttttgtgtggttaaaaggtattctaggtcaggtatagtggctcacacctgtaatcccagcactttgggatgccgaggtggtggatcacctgaggtcgggagttcgagaccagcctggccaacatggtgaaaacccgtctctactaaaaatacaaaaattagccaggtgaggtggtgtgtgcctgtaatcgcagatactcaggaggcagagacacgacaattgcttgaacccaggaggcagaggttgcggtgagctaagattgcaccactgcactccagtctgggcaacagagtgagaccctgtctcaaaaaataaaaaacaaaataaataaataaaaaataaaaggcaatctaataaagttgttgctttttttttttcccaattccagagtggactgatgtactggccctttgtacaggtaagttccacctactcagtaatatgaactcagggctttggtttccatgtggccctaacggactctctctctgttccagctgaccaacttcagccttgttcctgttcaatggagaacagcttacgctggagtctgtggttttctctgggccaccttcatctgtttttcccagcagagtggtgacggcacattcaagtcagctttcaccattttatatacaaaggggaccagtgccacagaagggtacccgaagaaatgagaagtcaaggactctcttaaagggaccacattttttacctaaaatgcacagaattgcctgcagacaaaatatttgatgtgccaattatgcacttcattttgaggaattactactatttatagacccactttttaaaaaattatcaatgattatttttgaattgtattcagacttttttcctgttctagtctgaaatattacttctctaatattttggttaatatgaataatagtggcaaaatggcattttagaattattaatatttctaatattttaacacaagtttcaggaaacttggttttgattgttcacatttctattctaaaatctcaggttatctcctgaacacttttgggcagatgaagttttataccaaaaaatagttcttagagtgaattttaatttacatagaactcaatcgaaatgaagatttaataaccagatttctttctccaaaacatacacaatttgttattttagtaaatacctttttttttttttttttttttgtggtggagtcttgctg

SEQ ID NO: 82409 - DNA, 1619 bp, Homo sapiens
cgcaaaacattgctccaaactccaccacctatccccaaacctgtaagaactaatgataatccaccaccctttgctgactccttttttggactcagcccgcctgcactcaggtgaaataaacagccatgttgctcatacaaagcctgtttggtggcctcttcacacggacacgtgagacagtctccaactcctggcctcaactgatccactctcattggcctcccaaggtgctgggattataggcatgagccaccgcacctggctcagtaagtacattttttattatcaaaaacagagtagtgtatgattggcgtattctgtgtagaatgtattttattgatgtcttctatttttataatttttaatgaatgctttttagttttgggcagattcagttgactaaagcacctcatttcccagatacatgaaataaaatacttggtttcttttccaatttcacactgatgttattttgtgaaaatcagtgctttaagataaatatttatactttaaggtaaacatgagaaacttgatctaatatttaatatttattcagttctacactttattaacttctacaccagcagatttaaaaattatgtaactatctcaagaagtttcacttggacgtagtggttcacgcttgtaatcccagcactttgggaggctgaggtgggaggattgcttaaggcaaggagtttgagaccagcctgggcaatacagcaagatcccatctctattttaaagaaaagtttcactttgggaggccaaggcggttggatcacaaggtcaggagatcgagaccatcctggctaacatggtaaaaccccatctctactaaaaatacaaaaaattagccaggcgtggtggtgggcgcctgtagtcccagctactcgggaggctgaggcagacgaatggcatgaacccgggaggcagagattgcagtgagctgagattgtgccactgcactccagcctgggtgacagagtgagactccgtctcaaaaaaaaaaagtttcagtaaattccacctaagaattccaccagagttctgtcatctccaatgtcatgttccacagatttcaagttgtgaagccctgaactgttaatttatcctgagaatgtatatttaagcttaatttaagactatatacctaaaaattgagcatataatttgtataatttgtttatgtaagtttctgtaagtcataaatatgtagtttccaagtggataatttacctgaatgtaaaaggcattaatatattttacattattgggaccatagtacagaaatttctaaatggtttgtaaaataacttgttatttgctttgttgtaaaagtagttaatacaatggaaaaatggtttcgtaataagaagatacattttaacatcaaaacgtaggccgggcacagtggcttacgcctgtaatcccagcactttgggaggccgaggcgggcagatcacgaggtcaggagatcgagaccatcctggctaacatggtgaaacgccatctctactaaaaatacaaaaaattagctgggcatggtggcgggcgcctgtagtcccagctgctctggaggctgaggcaggagaattgcatgaacccgggaggcggag

SEQ ID NO: 82410 - DNA, 1074 bp, Homo sapiens
cagagcaagactccatctcaaaaaaaaaaaaaaaaagccaggttgttttgctcttaatcgggttacgtttgaggattcttttggttctaggtgaccaaaacccactgggttcagccaaaagtggatattgttgaaggattctagggtgtctcacagaacacagggccatggttccactggaattcaggaaggggatagagtccattgtgaatcaaggaggtccctcccaccacctctacctcttgactgtttttctccatgtctcctctattcttctatctcatgggagagtgacagaagtcaggttgagactggaatcttaatctcagcaccaaaagctcagggaaggagcctattggtccagcttgggccagatgttgacacctgatccaatcaaatatggagaggggatgtgagttccattgtatcaacatgatcgtgttagtggtccagaaatacttctgagggaaaaaaaggtgtatgttacacagtgatatcaattaaattctaaactatagtgaaatattattgtcatttccacctcttttaaataaatctgagatggtctaacccctagcatagttcagtttctgggtctagattactggggtttgaatcctggccccaatatttgctgtgtgatcttaggcaaattacttaacctgtctctgtgccttcgttttgtcatctacaaaatgggtataataatattacttacctgacagcatggttggagccattaaatgtgttaatgtaagtaaaatgctcagaactctgcctggcaaatagtaaagatttaacaaatagctattattattactgtaaagttcatttcattatgacagattgtttttcagattattcaaaatatagaagatgtttaaaagggaatttctatgataatgggaaaatagggctgaataaccattactaagattgaatatatcattgctattgcccttgaattctataatttgaattcatattatttgaattctagacggtacttttgatttataaccttaaaagctttagtaagggtttcttctaaacagccttatataaaataatagc

SEQ ID NO: 82411 - DNA, 1058 bp, Homo sapiens
tcttctgccatgatctgactctccctctgacttcacattgaactggacccgttcacgcctgcacacatcctgtttttcccctggctgctcttccctgcgtcccccctccgcagaccaccctcattcagatgaggatatatcccaccctatttcttgggcttacctttctgaatgaaaataatgttcctggtgcaatttatctctcctgtcaaatttccagcctgcagggaattaaatgaggcacatgattttcaggctaagcagtttttaaaaactgaaatattactttagacaggcccaatttattttcctctggattctcatcattttaaccccgccaagcacatggttttaagcagctccatctgctcctctaaccatccttgcgtgacctgggcccttgactgacttctgaattggtttgtaaattggaagaattagggagtcggttaagatgcatgaatcatagctcaggatagatttataattgtctgttttcatgaactcattctgagattgcagggatgggggatatttcagaacaaatggaccttgagtaacagaatgaacctacagaagtgccgaaaaagatttgttgtttatgcaattttaaccgggcaattgttgttattataggtttatcaatttccacaattttaattccacagccctaatgatttgctttgaattaggaagtatatactttattctctcatatggtcccaaagggccttagaaagcaatcggagcccttctgcttgtcattggaagaaatatgacagcatggtttggtgattcattgaaggtcactttgaagtgttggggagaggacactgagtaatgtaaaatgacattacaatttgttaaataatttgccggaactcttgtgtcatctctttcaaagtctcaccctggaaataacacacacgtaattcaaatgcaatctttctggaagtcccacctgggaactgcagtcccaatctgtggcaaagtcttgtgaatatccttaatgtgataaaactttgccttagacggagtttgctttttggaataaccaa

SEQ ID NO: 82412 - DNA, 1047 bp, Homo sapiens
ccgggcgtggtggtgcatgcctgtaatcccagctacttgggaggctgaggcaggaaacaatcatttgaacccaggaggcagaggttgcagtgagccaagattgcaccaatgcactctagcctgggtgacagagtgagattccatctcaaaaacaaaacaaaacaaaaaatacagaaaactacaacaaatattatattctccttacctccggttctgcttccagatctagaagaaattatcaatgccagtcttgggcaggcagacaagctgccccaacatagtgagacccccctatctctacaatttttttttttaattaactaggagtggtggagtgctcctgtagtctcagctacttgggaggctgaggtgggaggatctcttgagcccaggagttcaaggcttcttgagttacgattgcaccattgcactccagcctgggtggcaaagaaagaccgtgtctcttcaaggcagttcagcaagtctgcacccacctactttatcttggtgatccttggaagagctggggtgactcgctctctgagacctgcctcatactttgtgggagcacaggtgaatagggtggcttcaaaatacaaggtcaggagaggtgctgcctcactcactgaccccccagcagggtcctgtaatgtccctgcctctgccctggggtcacatacctacctctgggtaagcatttaccccatcattgatatgtgtctctggttcagagcaggttcaccagatacaacatatacatactgtacacgcataacacgtgacaacatacatgccccatccacaaagcctgttgcttaacctattggtttatttcattggttccttgatgctttccttgcttgctgtgtatcttcttttcttttacccatctactttcacagggagcaagaagaagacaaggaaatggctgatttcctgagaatcaagttaaaacctctagacaaagtaaccaaatctccagccagtgagtatatacattattcattcccctcccccacaaaagagaaaagtatatttcaggccagg

SEQ ID NO: 82413 - DNA, 1008 bp, Homo sapiens
taagtacttttaaatgatcaaagagctaagagaaggaataaaacccaaaatgaaatagtaagatgctatgaaaaaagaataagtagacatgcaaaaaactggccttctgaaatttttttttatcaataaagtaaaaactcaatggattaaatacagagacacagctgaagggagaatttatacattggaagacagccctgagaaagttacacagaatgcagcacaaagagaaaaagagatgagaaatatgaaagagaagttataaaaccgagaggatagagtgagaaggtccaacttacatgtgataggcattctaggagataaaacagagaatgggaggtggaggtatctgaaaagacaatgtatgagcattttcaaaaattgaaaaatatgagccctcagattgaagtgacttgaacaaaatttcccatttatctatttaccaaatacttcttggatgtcaggccctgtgctaggcttggcaggtacaatgatgataacagctgactaggagaagggctgaaagttagggttggaagctgagcattgaggaccatataaaatgaggactataaaatgaggaccagctgaggatcatatgaaatgtgcatcagctctccataccacctgaacaaggcctggaacaagacctggccaggggttgcagtggggctgggctgcagatggtcagggctctgctcacctcacctctctctctctgttcctttctccccctctccctgtgcccacatcttgctgcaggctcccgggcagagaagaaagcagagcccccacctagcaagcccacggtggccaagacggggctggcactgatcaaggattgttgcggggccacccagtgcaacatcatgtagcccccacgtggggtgccctgggccatggggacccccccccaccctcttgtctttatagcccccatttcaccggggcccaagagctctccaaggcagaaggggttgaaggcaagcccgtgactgtcaccagagg

SEQ ID NO: 82414 - DNA, 1022 bp, Homo sapiens
tagagatctttccaactttgtaatccagtgggagaggtgggatgcagtttatagatacttgatttctgtgccaagttcactggccacacaactcatatgtaaactgtggcatagatgtagcatttagaagctttttattactattattatcttttgagaaaatatgagcaaggaagagaaaacccacacttcttacagttcctggatctgaatctgtttgcttttctgtgtttacagaaattatgattttaaaccaagaagaaaaaatggagattccaataccaggaaagagcaaaactctgacctctgactccagctcgtcctgcatctcagcagctgtccccgtgcctccctgcccctcctcggaaacctccgagtcactgctcagcaaggaccccgtggaaagcccggccaaaaagcaacccaaaaatagagtcaaattggcagccaacttttccttagcacctataaccaagctttaactcccatttggaatatagaattaggatgggaaaacactgtctgattctgcacacaaaagtgggtttcaaaaatacatccttttctgtgtcatgaaaaccccccgaagccattgacttcatcttacctgtgttctatcatgtttttcttttccattgaacacagctttgagctgaagtctttcttttcttcttcctttttctttcttttttcaattatttgaagaacttgtggcatttgttaaagaatccttaatatattttaccaaatttttagtaactattatgaaatacaatggtgttccaaaagaagaaagcactaaaaactcaactagcaggaagcggttttgcttccattgagccacgtcggtggtgtcatcctacatgtagcataatagagtctctcagcctttgcttactggtgtttccgacagtattaacccagtgcgtggcatgtctttgaagcaaagcctgtcccgctagcctgtgtgttcacacaccaaaggagaagggtaggcgaggggttcggagtgtattttcagg

SEQ ID NO: 82415 - DNA, 1547 bp, Homo sapiens
tgagagattgctcttaattcttttaggtggttgttcagtttctgcaaaaaaatggcaaagagctctcatgtgagaactaccttaatttatatgccaaagctggtgtttggaagacagtctttttaagaattataaaggatatttctgaaactgtgtctcatgatttttgaactactctgctttttataggggtatgtttctgtcagcttctgttgctttaaaagctaaggagagagtagagaaacatgcttcttggcagtaactcagctcctaaattctagcctaaggcaggctccgtaggtcacactcttcctgaatgttagggcttctgtcccctccttttccgctgcttaaccagtagtatgtcttgtgtgcaggtggtctggataaaaggacatggtcataagagaattgtagtgttaaaaaatgacatgaaaagtaagtaagcacccatcccctccccccttaaaaaatcacggttctctcactgacatttctctctgacgggtgctctttgtcctgtaggtcgtttgagttcactcagtctctcccctgccaatcatgaaaaccagccctcggagggcgagcgcatcctggaggtgcccgaatcgcacacagcctcggaactcaagcttggagctgacggcagtggtaagagaggaaaagcagagacataggagcttgtgaaattctaggagaaacggctttggggtcggggagagcgagggaaaggactccagcaagtcatccaatctgctgaagttacatagccacacatttttcaaagcagttttggtatttagttagtaacaggataaaattgacctttatctgttagcattgcatggttgactggttaaagtccctgaaggatgttggcacccccataatgatcatcttaccccagttcagatgttgaagaaaaaaattattccgacacttattataatggatattcatgacacttgcaacaggggagagagagccaactcccaatacatagcctaggagcagagtgagggctcagtgggtggaaaattactaagaggattcttgctataggcatgcaggccagccaaggatctagacatcagtggttgggaataaggaattcgatcagctgtgaagggtgaggggattctcactaaactgactcaagctaagactctagagcgagccggcaagttcagcaacagacatggaaggccaaggtcaggcctgatccggaagagggctcagggtgcctgactcatggctggtcaaggcgtctttgtcacaggacagccctaggcaggatttgatatactaatgcattaatattacccaaaattacactgagtcacatagatttcagatagatccacctctgtagtagatagaggccaattcttggaatgttatagcagttctaacttttctgaaggacttttgaattcatcgttataggtgagaattttgtcttcataacatgcggcgagatagcacgttaccgtcccctgtgcccttaggataactgagttacacagcatttgacgttttatgaagcg

SEQ ID NO: 82416 - DNA, 1272 bp, Homo sapiens
gtttttgtgccaggaaaggctcacgccacagcctcaccctcgccacccacagcctgctggctcagtcaccagatgcgtgtttcttcacatggtgtttggtccccaagtgacaatctctgtcttttttgtaaggtttccctctcagcgcatttaaccgcttaaaccctttatctccttgagaatctgaaataattgaggagtggacagttactagtcagatgaaaataccagctttgtggtgagtaatagcagactagaaaaatgcagcttgccttgtaatcagagtaggccctctctcacctccccagcccgccctggggacgcatatgggcaagtcgggtctgcacagaagccatgtgagtgttgcttagagtctagcctccccatccctaccccccttcgagcacagcaacccacacttcacaagcttggaccactggccatcagctggccagtctgtgtccttcttatagtggggtttggaaagaatgaatgaaaaataaagagaatgatgcaatttcctcccccattattatcttgttgagagttttcagttatggaccggcagggggaggacagtttctgcttccatgttggtctggtgtcccaaagacgctaaaaacaaacccacttgctttatttcagtgtaagagaaaaaaattagagatttttcatctgttggtctcattaaccaaaatgaagtgagctgagttgggtataacctagggtgtctctcttgagctctgaaaagtgtgaattctcgttttccccaggttgccgatatagaatctggcagacagattcagctgatcaaccgaaagtctctgcgatctctcactgcccagttgctggtattgttgatgtcttgggaaggaaccacccatctttctgttgaggagctcaagagacattacgaaagtacccacaacactccccttaacccctgtgaatatggattcatgaccttgaccgaactgctgaagagcctgccatacttggttgaggtaggcacgttaatggctctttagaactatcattgaaaactatcgattgggcatttccggattacctgatggtctagattagagtgtgtagagctggaagggacccgagagaccatttcatggatgaacacgccgagacctcaggcagtgaagcagccctgcctaaatgggtggcagaagccagtgaaagcctggtctcctcatcctggcactggggtgtgtttgtcccgttctaggatgaaagcctggtctcctgatcctggctctg

SEQ ID NO: 82417 - DNA, 1021 bp, Homo sapiens
tctctgcttagagagagagaggagaggcagggctcaggacttaggagtggggagaaggtccacagttgtcatggtgagtggagagtggcttgatcaggatgtcacgtggagtgcaggggtatcgagagctcactgcaagttggcaccgtagactctgggagagcagcagttggggtgtggctatgcaggtgtcggttcagggaaagcaggtggttggattcaaggtgggagtttaccgatgggcgtcaggaaaaggcatgggatgagcgaatttaaatattgacaagaatgtcagtgccagcatgacaaaagaggagagtgaagcaagggagtgggctggcaaattgggagcagataggaggcagtgatgctgctgaggtttgagaaggggcggagttgagcgggtagagtctctttctgcactcccaccccaacagcagctccagacttgcttttgcaagtgggatgctcaggaggtttgaatgatttatgttggatggggtaatgacaggtttgcactgtgaccctggagatgggtgtctgcagtgaaattgaacacaggaggatgtcgtcggagatgacagaggcaaggcattgaaaggctatacggctgtggtgtgggacaggtccctgggtgttcagttgcccaggatgatgaaaggggtggactcaggtggataggaagaccccacgccatgacctagggctttgctgggtgagtgtgatgggtgggcagctggggtgtgagcagcaagaatggggagagctgagagaggctccgtggtgcctccctggctgcccactgggtctcctgggagcttctccaaccttacctttcagattcttatagaattagtcccagcacactctgagcattggtgtttttaaaagctccccaggcaattctaatgcatagccgggattgagaatcaagggatggatccaagtcgcaccagaggagcaggctctggtttggtttctttcctaagcagctgtagtgatggtgggggtctgggtggct

SEQ ID NO: 82418 - DNA, 1050 bp, Homo sapiens
acacctgctgatttcttacactgaatatttgttcattacttttatacttttaaaatccttcgtgttgaaggtaggtctgagtacatgaggtaacatcagtgctaagctgttcgctgttgctaagttaaaccaaatttctgttgttgattttattttctttttttactactgaagtgctttttaaaaattgttttattgtggcacaatacacataacatagaacttaccttcgtaactatctttatatctcctgtccagtagtggtcagcacattcacattgttatgcaaccgatcttctgaactttttcatcttacacaactgaaactttatacccattcagtaacgctgacttgttttttcattactagctgcatactttttttgctattctgtaaacacccgtgatttgtttattttccctttcctccccccgtgtgttttcaaaggtattggaatgtggagaagaaaagatccttactctgacagaggtggagcggttcaaagctctagctgcccagtttgttaaactccttcggtcccaaaaagataactgccttatgatgacagatctccttacagaatatgctaaaacttttggttatacatttcgtctccaagactatgatgtcagttccatttcggctttaactcagaaactctgccatgtcgtgaaggtaaatgtttttttttttttttttttttttccctcatgggataaaactcacagtgacctaattctcattaggacgtttgcgtgtgctgtagcgtttctttatttacaccttgaactacttaactgtcacagcattatgactcgttttgtgtcattagtgcttattaggtaatagaagccttggtttggaagttgagagttttggtcttcctcttgtgtgtttctgaatggccttgccaaagcaatgcctttgtgaactgatgaggtcactcttcaccccagggttcggtcatgaggtgcagctgcctcagcactgctggcctgagcttgactccttccagtgtgagttttgcctgtgacgttcttgggagcccg

SEQ ID NO: 82419 - DNA, 1060 bp, Homo sapiens
aagctttccctcctgtttatttttgttcaacttttgaagcctgattctctcttctgctagcaagttttaactgaagatcagatgaataaacaaaaaaagtggggatattcagaagcgtgatttcatgggaataatttctagagtacttgcttaagtacagggacctgggtgtgtgtcatgttaatagatatggggcaggggctagaaaattgtttctagcttataagatgacattgtttctagcttataagatgaatatatatgaatttcataatataataatatcataacttcctggtgttctgccctggaacatgtttgagaaccacttgcaaagagggaagagtatatgtgtttgttttaggttgtgtgtgtttggaaggcaaggatgatatcgtttataaattcccaaaaggatttactctagtgtggatgttgaacacaaatgggtagaaaaaaactgtgattttatgttttttggtttttttaaaagaacgcactcaggatgaaatagaaaggacaaaacagttctccaaggatgtcgttgatttgctgcgtcaccaaccccatttccggatgccctttaataaatttatcccttcttaccatcaccactttggccggcagtgcaaacttgcgtactatgggtttaccaaactacttgaactttttgaagccatacctgatactttacaagtgagtgaagaaattctaattttataaagtatttttctgaacaacgtataggaaatactttttcacgttccagacctgtttttctgggaagtagggagttacgaaagaggatgaaaatctaagctattccagtcagagaagccatattcctgactcattagtatttttagataaatatggctttttccttcaataaaggattattcaaacttgttttgggggtaattattgaaaaaaagattcagtaggttttcttttttttgtttgtttgtttttgttttttgagacggagtttctttcttgtcgcccaggctggagtgcaatggcgcaatcttggctcactgcaacctccgcctgcgggttc

SEQ ID NO: 82420 - DNA, 1350 bp, Homo sapiens
gccagccatcttgtgtcatacccatcagtcatttcatcccatcctatcaccatcattttgcaaagcagtgccgagtgtcagactacggatactccaagctgattgagttattagaagcagtgcctcatgtattgcaggtaaggcgtgtcacgggattacttgtttacaggcaggaatgttcctccatggctttggctgcctccatcaaagaaacagtttaattcctaagaagtcagttctgggcagaacatccactaaaaactttcttcagagggcaggaataacacacacaggcggcttctcaatttttcagaacgctgctagtttccagttttagaggaactccttggaggactgaggagtattttccctctaagctctatagaccttcttcatcccagcacagctttctccagaactgttcatgattacaaggaagctcccatgaatagccacatacttgtatgttggtgcctatgtgagagtcaagggcttaacctttcttctaaatttaactagttggagacaagttactgggctagagtgtagcactggatcctatgaagacttttaccagttaactcacagtgttataacagcttcccactcactaaaaacggcttgaaaaacttgtagaccaatttgtctggacaaccaatacagttttcatttctgtactcacgacttttcttttcaaaagattacacttttcatttttatactcaacgactgtttgggagaaggtgtgccaggccaaaaacgataagagtttcagaaggccttggacatttgttccttttgaccaactacattttgttgatcgacatgtgtttcaaattgcacacattctacataaagggagtcatgctctgaggctagtaacgagagggtgagccagcagcaaggaagtcgctgtctgctgaggtcttatgtgtataaataaactatttgctttgcagattcttggaatgggctccaaacgtctgctgacccttacccacagggcccaggtgaagcgctttactcaggatttactaaaacttctcaaatcccaggccagcaaacaggtcattgtgagagaattctcacaggcttatcactggtgagttgatgaaaagaacagaaatgaaagtaaatattttaggacattttatcttctgccaaactctaaatagttatctagtatttctattaagcattcttttggaaaacttgtagtagttttttgtttttttttttttttttttgagacggagtctcgctctgtcgcccagtggcacgatcttggctcactgcaagctccgcctcccgggtttatgccgttgtcctgcctcagcctccagagtagct

SEQ ID NO: 82421 - DNA, 1034 bp, Homo sapiens
ttgcccaggctggagtgcgatggcgcaatctcggctcactgcaacctccgcctcccaggttgaagtgattcttctgcctcagcctcccaagtagctaggattacaggcatgttccaccacgcccagctaattttgtatttttagtagagatgggggtttctccagttggtcaggctggtctcaaactcctgacctcaggtgatccaccctcctcggcctcccaaagtgctgggattacaggcgtgaaccaccacgcccggccgggaccaggtttattaaagaaaaatgtgatttttttttttttttttaccttgtgctcagtattaataatttttaaagtttaagttaattttcaaatttgagtctccccaacatatttgctcctttttaatactgaaagtaacatatgtgtcttggaattcttttggtaagattgtcttacattcttctgatgtgaaacgtgtttctttcctaagaaacgggggaagcaattttgaatatagtccagcctttcctttcttctcagtgggtgtcaatagagttgtctgtctttgtcaagtgtttctaatgtttggggatggggttggtctgtaccttttctttcagctgatgtcaattttgcattggaacttagtgacctgagacacaggcatggtttccacattattttggtccataaaaaccaggcctcagaagcactgctgcatcatgctaacgagctgatcagatttgaagagttcatttccgacttgccccccaggttaccactaaaaatgccagtaagtgggtttgcgttatttttgccattttccaatattacattgtggaggctgaaagacagcccataataagggggttgccaggcccagatggggctgttctttgtaagaggtgggttagattttgaagtaaggcttagaaaccttcggttcttctcacaaatatacagataattggtatgtatgaagtttgcttttatttatttcaaaatatcatatgaaattgacttgtagatttaccttcccaacttgcca

SEQ ID NO: 82422 - DNA, 1032 bp, Homo sapiens
ccagcactttgggaggccgaggcgtgcagatcacttgaggtgtcaggagttcaagaccagcctggccaacgtggtaaaacccggtctctactaaaaatacaaaaattagccactattgttggtgggtggctgtattcccagccacttgggaggctgaggcaggagcattgcttgaacctgggaggcagaggttgcagtgagccaggatcttgccgctgcactcaagcctgggcaacagagtgagactcggcctcaaaagaaaaaaaaaaaaacacggagtcttgctgtgttgcccaggctggagtggagtgttacagtcatagctcactgcagcctctaactcctgggctcaggcagtcctcccagtttagcctcccgagtagctgtgactccaggtggatgtgtgctactgtgtctagccttctcagaagtcttaagtcattcactcagtgtctgtgttgtccttcaggagaagtttgaagtgcagcactctgaaggctaccggcagatctcagccttggaggatgacctcgcgcagaccaaagccattaaagaccaattgcagaaatacatcagagagctggagcaagcaaatgacgacctggaaagagccaagcggtatgggtggaagggaaaagcacgagtgggagactctcctctctgctttttgtccccagcagctgggtactgggccctgtgctgagtatagggaactaagcagtgagcagaacaaagccagtgcccttctggattttagtgcccggggggaaatggacaatagtcgaagaagtgcaatttcattacagcagcaaggctggcagcccagggtgctgtgggggtgtgtaataggatgtattaatttggctgttggcctgggagcgtcaggcgagccttaccaggggaaatgctatttaggctaagaccagaggaatgagtagccatgatgccaggaggggtgtgagacaagaacattccagacagaacaccaagcctgtgctaagcccctaaggtgggaaggaagctttttcaaag

SEQ ID NO: 82423 - DNA, 1039 bp, Homo sapiens
tctgggctcactacaacctctgcttcctggcagttctcccacctcagcctcccaagtagctgggattacactacaactggctaatttttgtatttctagtagagacaggattttgccatttgcccaagcttgccaggctggtcttgaactcctgatctcaggtcttccacctgcctcggcctcccaaagggctgggattacaggcatgagccaccttgcccagtcatattaggttatttttaatgctggttggcattgtgagcttgcaagagaagatggagcatagtggtcttctcaaaccaccaaatgccacatgcagtcctgatagggctttggcttattgctgagtgctgtgtgggcagcatcttatttaatcctcatgacagcctcgtgcaccccatgagctatgatgagtcccattctgcaggtaaagagcccatgccccagaaggttaagggacttggcccactctgtggcatctaggaagtttggggctgggacttgtgcccaggtgtgtctgacccttcgcacctcctggatccgcggtgctggagggatgctgcggtttgtcctcttggataactctgcttttctcttcgccagcgccacgatcatgtctctcgaagactttgagcagcgcttgaatcaggccatcgaaagaaatgccttcctggaaagtgaacttgatgaaaaagagaatctcctggaatctgttcagagactgaaggatgaagccagaggtcaggaggccttggtgtcttcaccagcatggtcccctctccctacctgagcaacatcttgtcccacaagctctcccagcattatctttacagggaccccacaccctgctctgcacccaggttgtctaatcagagggtgtcggactgcactgggcagactcttgccttgggccctggctggagctgagaacagtcagacatccagccctgtaagggccccttatgggtatttagagaaatagctttggggttcacagatgaagtccttgtattgggattctgcctctgggcagcagaat

SEQ ID NO: 82424 - DNA, 1038 bp, Homo sapiens
cttaaattccctttttgttttttgagacgtagtcttgctcttgtcacccagactggagtgcgctggagcaatctcagctcactgccaccctggcctcccaggttcaaatgattctcatgcctcatcctcctgagtagctgagattacaggtgcctactaccatgctgggctaatttttgtattttcaatagagatgaggtttcaccatgttggtcaggctggtctcgaactcctgacctcaggcgatccacctgccttggcctcccaaagtgctggcattataaacatgagccactgcgcctggctgaggacttgaattcctgaatcctttttctggcacagatttgcggcaggaactggccgtgcagcagaagcaggagaaacccaggacccccatgcccagctcagtggaagctgagaggacagacacagctgtgcaggccacgggctccgtgccgtccacgcccattgctcaccgaggacccagctcaagtttaaacacacctgggagcttcagacgtggtaaggggagtgggaattgcaggattttctcggttcacaaagtgtttctgggtaagaatctggggtgggtcctgggggtgtgatgatttgcatcaggctcagagcctgatttgctctcaggctttgagcagagagtagactgggatgttcttggggatgggcattgagatcagtgaggactgggtaagaggcagtagtggagtctgatgaaatggaaaccccacccagagcgggtggctgccactctgcagctacgaggattggcccttcatctgcagctttttccattcttcaaagccagaaatcctctttttttttgttgggtttttttttttgagacaggatctcactctgttgcccaggctggagtgtagtgacgtgatcttggctcactgcaacctcttcatcgtgggctcaagtgattctcccacctcatcctccggagtagctgggactaaaggcacctggctaacttttgtattttaggtggagacacagtcttgccatgtcgcccag

SEQ ID NO: 82425 - DNA, 1153 bp, Homo sapiens
ccaaaaaaaaaaaaaaaggtgtcataaacctctgagactgtagcctgcttcttagcttctcattgagattcctagaggtgcgttcgagttttcagagtaattttccagaccaaccagcgtcagtgggaaatctgacctcttttggcaaactgcgatcattcattttcctgagtcccctggtggggtggggggaattctgcctcaggaccctgaggggtctttggggcaagatggccttggtaatgcagccactaagaacaggacttcattcaaaggcataatgaagtaaccagggtgaccatcaagtaaaattaaagcacaagatcattgtaggaggcttccttgtcaaagacgtgaacgtgggatttccaacgcaccatggtgtgtccactcatcactgcatgttaggaactgctgtctctttgggacacgagttaaaagaacacactaatttctggagtgtgcctgcagcttcacggccttcattttgttactaagttattttctggaagaacagcaaaaatttcaggttgaaaacagaactttccaagtgctactgaaattccgcagagaattacgctgcgatggtgggtttcttaccctagaaacatcctaacctgtatccacagaagatgtccttttatttttttaaaagatcaataaaatcaagagaaacgaatgttgaacttgttgggcttctggtcaaagaggctttgtatgtttatactttaatgttttcccacagagtggtgaaaaactttttttaaccaagttaaaaaatatgaaaaaatctttttgaaaatttctattcaagccaggtttttagaaatgtatccgggatgtgtttgtgcgtcattcaaggcatattagcatctggtcacaagatggagtcctttgtttccatgtttcctgtctcccaaatctgtctgatcccatggagttggtggtatacggcatcgtttgtgttgaacagagcctttgcaggcatgtctgtctaaaacactcaagctgaaagaaggacagggcctacagcttgtttttatggcccttactctaagaatgatttattatgtttttaagggttgttttaaagaagatgaatattcggcaagaccatatgtagcctgtaaaggctaaaatactatctggctgg

SEQ ID NO: 82426 - DNA, 1102 bp, Homo sapiens
cagccagggttgtagtcggaagccttgaatgtggctgaactatctgcttccaaactcataatgatattgacaggcggcctcaattccttactgcatgtaactttccagggctgctgaagtgtcctgaggcatctgacttctcccaaaggcagcaatccaagagagaaagcaaggaggaagctgcagggccattaccacgtggcctctgaagtcagctttgtgccagttagaagtgagttcagctcacactcagagggcaatgagattccatctttggaagggagcgtcgtactgtaaaccattataccagctagtaaatagatacatatctcaaaaaataaatcctccccacaaatatatacacctactatgtacccacaaaaattaaaaataaagattaaatccttttaattgtgttttcaaatttgagattggaaacaaaggaaaacatttccattgtaccactcttgattgtcagcagagcagctttccttgatgcaagagtactaatataaattcccaggcagcacactgtaaggaaaacaatatgggatttggggttcaagtgtaaactttgtttactatctgggggaatctctagcaaatctcctggctgtggttttctcctttataaattgcagttgatgatcttgacattacacgatgaggattagatgagaagaggtatacgttctgtaaactataaagaagattttaaaataataggtaatgtaaatattaatctaaataaatgttagctacacaggagctaacatttatataccatttcatatgtgccaggcacagtaaaaaacacttgacatttattaactcatttagtgcataacagccctataagggagggacggtgcttatcctaatttataaaggaagaaacatttatgaggctggagaggttaagaatcttacacagagtcccacagctagcaaatggcaaagccagaatttgaactcaggtcacctggctctcaggacctaagactttttcagggcaaggacttattaatcaagaggtgtttattgaatacctgttgtgtattagatggggttaggtattgggaaatactctactggactttgg

SEQ ID NO: 82427 - DNA, 1817 bp, Homo sapiens
cattgagttgtttctagttttagcagttaggaatcaagctgccataaacatttacatacaggtttttgtgagaacataagttttcattaatcttgggtagaaagctaagagtgagattgctgggttgtgtggttaagtgcacgctcacctttataagaaaactgctcaactgttttccaaagtgcctgtaccattgtgctttcccaccagcaaagtgtgaaagttccagctgccccacacttcaggttaactttaatttttatttataagtattgtcaccaagtggatattcttttcaaaaataagttattgataaacagacttccaaaatttagtattataatttggatatagaaatggtatttttccaaccaaacactggggaatttaaaaagtgaatttatgttaaactgtattaagacatgcatttaacaaaagagatattttgaaagtcataaaatcacaggcaatttgatctgtcttggtgtgtgttgtcatcattcttccaaaatctaaaaagtgtatgtctggtaaatgtgattcttttcaaaatcttatttgctttttagtttaatagactgagtgttctcatgaatttatttctcccagaatctggtcaacctgtagttccgttggacagacagtttctcatccatgaactaaatgcatttgaagaatcaaaggataatacaatgtaagacatttttttaaagaagtttccacatattgtattgagtcataattgcaccatggtggttttacttcattttaattcaagtatttattcagatctagtgtgtgtcaagcattgtcctaaatccagggtgtgcagcagtgaataagtcagatgagatctgtgtttgctgaagctacaattacatggcttcagagtgactcagcatcttctttctggagttagctccttttgacttcttgatcctttgtccttctaaggctttgtttgttttttaatttataatttcaacttttatttgtattttcaaattatttttgtagaggcaaggcctcgcttttttgcccaggctggtctcgaactcctgacctcaagtgatcttcctgccttggcctcccaaagtgctagggttgcaggtgtgagccctccatgcctggcctctgagactttgccttgtcagttgttttcttcatatttaactcttccttcactccaacttaggaatgtactcagatctctcctctcctaaaacaaaaacaaaaacaaaaacaaaaactatgaacttccaaccccaagcttctgctcgaatacctttttctaccaagattactgaatcagcccactgctttcgttactattactctgtcctttgccctctgtgtacctcctctcaccaactatgctcttgaaaaggaggatgaccactttctagttttcttagtttttttctatttcagtgtttcttaaactttttctggagagtccctgtatagccaaaaaaaaaaaaaaaagtacataggagacctgagaacatagcttaaagcagcctttttttaaatctagaactttctttgaagccttacgttttctcatcctaaaagttcttaaggccaagtgaggtatctcgtgcctgtaatgccagcactttggaaggctgaagtggaaggatcacttgagctcaggagttcaagactagcctggacaacatggggaaaccccatctctagccagacgtggtggctcatgcctgtagtcccagcacttcagaggctgaggcaagtggatcacctgaggtcaggagtttgagaccagcctggtcaacatggcgaaaccccatctctac

SEQ ID NO: 82428 - DNA, 1040 bp, Homo sapiens
gcacgtgcctgtagtcccaactaccctggaggctgaggcaggagaattgcttgaacctgggaggcagaggttgcagtgagctgagatcgtgccactgcactccagcctgggtgaaagagcgagactgtgtctcaaaaaaaataataaataaaataaaaaagaatatgtattagactacagcccctgacagtgctgatgatgtaggaataaacttgaatttgctcaaatatattaagactaaatcactgcaacatgagaactatatgttttagtataaacatggctggtggtagtgtaattgtttaataatttgtcacaatgtttagattaagagctgcttgagagctgtttttgtaccatttaccttttcaacatttcttttcaaagtatgcctaagaatgacaaatttactctgtaactgaagccttaatattttatatcgaacagttttaaaggacaccttggaaaaaaagggggtattagggcatttaaaagcaaggatccgagctgaagttttcaatgccctagatgatgaccgtgaaccccgaccatcattgtctcatgaaaaccttctaattaatgaattaattcgagagtatttagaattcaacaaatataagtatacagcatctgtcctcatagcaggtaagtggttattatttatcacataaaatctgtttctcccctttccccaattctcagaaactgtttatcctagaaatctaattcccttaccagatagtgccatctgggtgactgggacacaaaaatcacatgggttctttctgtagcttaaacagattcttacaagagaaaatacataactaaataatcacttaaactaggcatatacttggaaaaatcatctataattcctgtaaccgagaataaacaattgttgacgttttgtcctgtttgccaccagttttttcctgtgtattaagctttaaaaatatacgctgattaagtatattatttgttaaaaaataggctgggtaggtggctcacacctgtaatctcagtgctttgggaggccgagg

SEQ ID NO: 82429 - DNA, 1130 bp, Homo sapiens
tgatgtgccctacctgaccctcggctcggggcagacttggggtgcagctgaggacgcccaggaccctggtagctgtggtcctgccctcccttccctgcaacacgtggagctcctctctggggatgccccttagatttaaccccggcaagttttcttctgtaacgtggcctgcggagcctgactgggtgtctggagtccacttgctgtggtttaagccccagtcttttgggcttcagcttctccgtaatgcgatttgcctctttgttccaggaaggcaggcacttctgtctcgtgctgtcttgattgttggtgaacgcagtaggcaaatctggacacgactgtttctctctcctcttttgtttaggaatcaggagaaacagccttggttcttaggagctggtgatcagcttccaaaaatactttcttgtcctgttttgccggcctttcctcgagggttgcatttggagtgttgaaaagtcatcctccagggccccattggagggtttggttttgtttgtttgttttttttagtagggtatcattgtgtttaataacctaccacactttgatatatctcccattttaagccagtggggttggagagtaaccccaggggtggaaatagaacacagactttgccttgagggtctgggggtgattggagcctctttgcagatggactttctttagcaggggaaaacctgtggcttccttgttgccaggtgtagtaacagcaagattattttttgcaaagattcacatggtgatctgggtttgtgttgctgtgaattccagaatattctcttgtttattttcttctgaattgaggagggggcaaaacagggtgaacatccatgaggttttgtatcaggacgtattttattgatggcaattggtagttgatggctaatgagtatgtttggggtgcgctttgtttatcttaagaaactcattcacgaagtccagttgtaatattttttaaaatttttattttcttttttctttttattttttccttcgttaaggactttctgccacagaaattgccaggtggttgggttttgcttgggggtaattgtagctgatctctgcctctggtaggtaccccatccccgtgtttgaccttgcgt

SEQ ID NO: 82430 - DNA, 1021 bp, Homo sapiens
agactacccgtgatggagccggctttctgccattacatcccggggggagctgggagcccctggggagcctgcagtgtccctgtggctgagtgggtttctgccacctgctctcagaatgtgatcttggttttttttttttttttttttttgagatggagttttgctctgtcacacaggctggaatgcagtggcgtgatctcggctcactgcagcctccgcctcctgggttcaagtgattctcctgtctcagcctcccgagtagctgggattacagttgcccaccaccacgtctggccaatttttgtatttttagtagagacggggtttcaccatgttgaccaggatggtctccaactcttgacctcaggtgttctgcctgtctcggcctccaaaagtgctaggattacaggcgtgagccaccacacccagccccagaatgtgatctttttcttccttccttccccaccatgtaggatgcccaggtggacctgtttcgtgacatcactttctacgtctacttttccctcttactcattcagctcgtcttgtcctgtttctcagatcgctcacccctgttctcggaaaccatccacgaccctgtaagtgtgaccacagatgagtgtgtgtgcgtgtgtgtgtgagagagatgcgtgacacagtaccagctaacatttcttagatccatccaggatctcgttccagcctccctcaacccctgatacagggaatatcatcccacctactttacagatggaaaaactgaggcttagatgtggctgggggagctgaaggagagaatctgctttgtcattgatgaactgctgtcttgcaggcctgtaggtttctcacttggcatggtgattttggaaaatgtgagcagataattacaaatcaggtattttttatgaattctagctgtccagatgttctggaaaagtaaagttctgacagattaggcctataatcctacagggcagagctgaggagttgctggagtccccggcactccctgttgtattat

SEQ ID NO: 82431 - DNA, 1062 bp, Homo sapiens
tggcaggtattactgatgattactgcagtagaccacaagctccatacaggcaggggtcatttctgtttgtttagatttgtatgcagggtgcttggcacaagggttgtgctcaggaaatacttgttggatgaacgaatgaatgaagtggagataatagtaataccatgtttatagaattccatgaggatataaaataatgcaagtatataagctcttggtagagtgtctagcacatagtagatggtcaataaatattcagtgactgaatgagtaaagtggggacaatagtaatacccgctcatgaggttgtcgtggggatataaggcaaccctgtagtaccttgtagaatgcctagcacatagtaggtgctcagaaaatatttgttgaatgaatgagtgaagtagggatgacgttaacaccaactcctagggttgttgtggggatagaagacaaggcaggtctatagcatgttgtattgtggttgcacatggtagacactccgttgattgaaactggaagagctgccatgaatttctttctcctggctattaggagagggtccttttggggtgcagaatggtgtggagctgacgctagtcctctggaaggaagagtgagcagctgactacttgctaagctctgacctggatgaaaagtcaaatcattcctttccctcttcctcccaaacctgtgctttctttccactagaatccctgcccagagtccagcgcttccttcctgtcgaggatcaccttctggtggatcacagggtaaggccaggccccccagacctcagggaggtggtggggagtgaatgaatgaatgaatgaacgaatgaacatgctcagctccccctccccaacttctccctcctttgctcttctgcagagttgtcttgaatctgcctgtgctggccatgtggtctcagagacaccaactctgtccggcagttccgtgaacttgaatgtgataaacacgtgagccgtgagcagctgacacctctgcagaaggctttgcctgggacagccatatgctggactgcttttgctttagcttcagatt

SEQ ID NO: 82432 - DNA, 1020 bp, Homo sapiens
tgtctcctgtgtttgggtcagcagagtagggactgaatcccttcttttctgtacacctgaagggtttttcttgcctctgttcctggattctaaattgagtatgtttctccaatgtctaacctaacgtgatttgaaggggttttttttttcttgatagcggggtcctttggtgtggtcttggggctcaagagtagggctagtagggattacagggtcagctctcccaccctcaggaggcccatttttaatagacggtgaagttgaggcccagtgcggtggctcacacctgtaatcccagcacaggagtttgagaccagcctgggcagcatggtgaaaccccatctctattgaaaagaaaaaaaaaaatcaatataaaaaacatttacatgtcaaagtatataataaagtttatgagaaaaatagctggtgatgttgagtgatgggctgatcccagggtcgccccagatgtgttgactgcccgtctcttccaaggtggcccacatgaagagcaaagacaatcggatcaagctgatgaacgaaattctcaatgggatcaaagtgctaaagctttatgcctgggagctggcattcaaggacaaggtgctggccatcaggcaggaggagctgaaggtgctgaagaagtctgcctacctgtcagccgtgggcaccttcacctgggtctgcacgccctttctggtgagtgaagccacatttttcctggccctcattgtttgatgttttattttctctgcgtacctgaatatttttaaaaggtcactatgttgcccaggtgcagtggctcatgcttggtaatcccagcactctgggaggccaaagcaggtggatcacctgaggtcaggagttcaagaccagcctggccaacatggtgaaacccagtctctactaaaaatacaaaaaaataagccgggtgtggtggcgcatgcctgtagtcccagctactagggaggctgaggcaagagaattacttcaacctgggaggcgacggttggagtgggccaa

SEQ ID NO: 82433 - DNA, 1059 bp, Homo sapiens
ccttcccaggttcaagtgattcttctgcctcagcctcccgagtagctgggattgcaggtgcgtgccaccatgccaggctaattttatgtatttttttttttttttttagctgaggcggggtttcaccatgttggccaggctggtctcaaactcctgacctcaagtgatctgcctgccttggcctcccaaagtgctgggattacaggtttgagctaccgtgcccagccattcgcccattttttctgaaataccttttgtgggcttttaaaacaaagcagaaccaaacctgtttctttttttgttttgtttaattctaaagtatacactggttctaagaaatgtgggaccttcagaaataagggagggtgtgtgcccctccacacctggggaaacccttgaaagttaaccttggttggttttgcaaaaatgctttttaaaaataactctcccctgccattgctctctgtacaggcgagtgtctccctcaaacgcctgaggatctttctctcccatgaggagctggaacctgacagcatcgagcgacggcctgtcaaagacggtgtgtgtgtgttcagtcctggcttctggaagtggccgccttcccatctcccactgggtcctccctacttgcatttctttcccttggctgccctcaggtttgactctgcccagccgcttgtctgcgagaccccgggggacaagggttctgcagagcctgcagaagggaagggaagcctggcctcctgggcttctgtcctgtctcacacttcccaggagggtgaacttgcacttgcatttttgttttcttgctgagggtcagcagctgcttgaggcttccccgtgggagtcactttccaaggctttgaccttgattctattctgggctaaatgaggactctggaggctggccagcctccatcacccacaagctgtgtagacttaggtctgagcctcagttttatctagataagggaaacaaaagtacctttctttggctgagtgttacttggatttttttttttttttgagacagggtctcattccatttcccaggctgga

SEQ ID NO: 82434 - DNA, 1030 bp, Homo sapiens
ctggggagaagggtgaacgacctccctttgcacctcaaggagggcccagcggtctgatgctggccaccccagtggagagaggtttgcatgtggacgccagctgtttcccactgaccttggccactgctcggccctcccagctggagctgccccgaacctgcctgagaagggccagggcatcgagagcattgagtaattctcatgcggcccccgcctctgcagtcatctcccaagatgatcgtccagatggcgcaaccccatcttacaaggacaaagctgcttgcagtttccttctgctttctgggtctggggctgcctccagaactgcaggttgagtttcttctttcagaacccgtggctgatgtcaccagataataatgcctagcgccattcgtgccaagcgtctggggttgaaccattcaagcagagaaagagagtgttctgtgcatgtggagtcgcacagctcagcctgtccctgacatgtctctgtgctttgtaggcgggggcacgaacagcatcaccgtgaggaatgccacattcacctgggccaggagcgaccctcccacactgaatgggtaagccgggacgtggacacacgtgatggtgtggagagagccacagggcttttgttaaacgtggattcgaattcccaccgtgctccctctctgtgaccttgaacaactcactttgcctttctaagacttagcttacccatctggacaatgggtgcagatacacctgcttaggctgtcgtgagaagcagacacacatgcctagcacagagggttccctgggattgtaagttacagcagccttggacagctagacttagacaatacaggagattcttggcttgcgtaactgggaagttctactttcaggtgcggtgtgatccagggactctgccgtcagaactttcttcatattttctgtgtttcactttctcctggtctgctttatcctcacgcatcctctccccttgtgatggtaaatggtcccaacagctcccactgtgtatcccactgttagg

SEQ ID NO: 82435 - DNA, 1926 bp, Homo sapiens
gaaacggggtttcaccatgttggccagactggtctcgagctcctgacctcgtgatccgcctgcgttggcctcccaaagtgctgggattaccagcactggcatgagctaccgtgtccggccccagtttgtcttgaggtgtcctctcctttcagaccttgcgtcatgcccccagtaaagtttctgcctctccgaggggcaaaaactgttccagaagcccactgtgacaggatccctcaggttactccctgcctcacttctctaagggacacctgtcacctgcctcccacctggaggccccctgagacaggtcactgaactgaactcagcagtagaaatggaaggaatgttgaggccttcagtgtttagtacagtcttgccttctgtctttctctttctctacttggggtaaattgaggctcggtggccatgggcattagcccggcaggcctcattcagcgtggctgagccaggtgtgttgtgtcgtttcagcatcaccttctccatccccgaaggtgctttggtggccgtggtgggccaggtgggctgcggaaagtcgtccctgctctcagccctcttggctgagatggacaaagtggaggggcacgtggctatcaaggtaggatgaggaccagcggggaggggcagtggggaagctggtggtctgaggaaaagctcagaaatgatggtgtttcttttgactgtccctgtgccagaagcgaaagcagcaacgtctcttttcctcctcctcctgtatctttccactgtctctttctctctcgttctttctgttctgttccgtgctgtcctagaaggcaggattttggtatcatttatttccatctgtctcccagcacttaaaatagtgcccagtatatagtaggcacttaataaatatttattttgttacctctttattaagctgttattttattattattattatcattattattgtgtttttttttttttgagacagggtcaggctctgtcccgcaggctggagtgaagtggcgtgatctcggctcactgcagcctctgcctcctgggtccaagcgattctccctcagcctcccgagtagctaggattacaggcatgcgccaccatgtccagctaatttttatatttttttagtagagacggtgttttaccatgttggccaggctggtctcaaactcctgacctcaagtgatctgcacacctctgtctcccaaagtgctgggattgcaggtgtgagccaccgcatttggccacttaagaaatacttagtagacacacgaagactccctggtacgcagcctgtgtctccttcccttgcgtctctgcctgtcactgagtgtctcttggtctgtttgggtctttttggattgttctttatctttatggatctctgagtatctattcttataaatgtaacaaaacaaaaatgtttatgtggttggaatattttcttagaacattttttaaagggaacagtttaaatttttagtgttgaattcttaatatggagctaaaagaagactgcagttttactgcttttaaatacacagtgtactttgaagtaagttgaaattccccaggagtgagcttaagaggctcctttacaaataatccccactggaaatcaacagcctttgtttgcatttagttcactccccatgaaggccttttcctagtgtaacgacacgtccctggaagttttgctaccagcatttccaggagtgtggtctgcagccagctcatcttgcaggacatttgggcgataaagaaccccaggctcaaagaagcgtgggaaataatgcatactccagccccctccctcttggagacttacagtaaacattagcaaattaaaggctctgacaagtcctgcaaggagaaaaaatctattaactgtttaaccttatgtgtcccaggtgtacttgtcc

SEQ ID NO: 82436 - DNA, 1039 bp, Homo sapiens
gttgatcagatctgtctgtgtgtctgtctcacctcgttctccatttgcaacttagggctccgtggcctatgtgccacagcaggcctggattcagaatgattctctccgagaaaacatcctttttggatgtcagctggaggaaccatattacaggtccgtgatacaggcctgtgccctcctcccagacctggaaatcctgcccagtggggatcggacagagattggcgagaaggtcagtataggttggatgttggcccctgaatcagtcagctgttgccgcgtaacaaatgctctcacaatctcagtgggctgtgagtctgctgctatcagctgacccggcagggctcagctgggcggctctgctgcacgctgcaggccagctgaacttgggtccaggctgtgggtgtggctcaggtctcacttacagagcttttgctggggaccggggtgaggggtccacagctttccaaaggggggctcttctcatggtggcagcagaggcccaagataggccccccagaaagcatgcaatgtcccttaaagtacactgtcccttctactcacaaagcaagtcacttggccaagctcaaaggcaagggaccaagaaggaagtacattctacctttgtggtcacatgactgcagagtcacatgacagagggcatgctgttgggaggaggggagtcgatgattcatatgttcacagtccctgtcaagatagccataatactgaaaatagcacaatagctaacacttactgagcattttctctttcttttctttctttctttttatttatttatttatttttgagatggagtcttgctctcttgcccaggctggagtgcagtggcacgatctcagctcactgcaacctctgcctcccgcgttcaggtgattctcctgcctcagcttcctgaggggctggaattacaggtgcatatcaccacactcggctaatttttgtatttttagtcgaggcagggtttcaccatgttggccaggttggtgtctaactcctgacctcaagtgatccgctg

SEQ ID NO: 82437 - DNA, 1055 bp, Homo sapiens
aatctttttcatgtttgaaaaatgatctacgatgtgccctttctgttatatcttttattggcttttttttttttgagatgaattctaattgatctcagaaaaaaaaaaaaaaagcacgcactttttatataccagttgtcatgggctttttgcaggcccccagagatcatcacagattgcgtttcccatgggtctcattcctgcctgagacactgcctttctctgggtacctataaacctggagagtgacatggtggggtgtggtgcatatattcatatatatgtttacatgtgtgcatgtggaaacactccgtctcttatgccatggttcagacccacaatagcagtcccagcagggagccctccgaccctgcccaaggcatctgtacggttgacacccttgtgctttgcttctccagacagctcagcagctcctcctcctatagtggggacatcagcaggcaccacaacagcaccgcagaactgcagaaagctgaggccaagaaggaggagacctggaagctgatggaggctgacaaggcgcagacagggcaggtgagattcgctccttaagtgatgacagtggctggagtttatagagcgcccactgtgcactgggcactgtgcaaagtgccttgtctatgttaactcacctgtccatcacaacacacctgtgaagatactatttgcagcaccagaaactgaggccagagaggctaagtgacttactcacggtcacccctggtcagcggcagaactgggatttgaaccctggccaactccagggttagtacttgtagtctctgctctattgactgcctgagcagctcaggggggtctcattcgctagaggtgagctggatgctttaaatcagggcttcctgcaacgtggggttcagttgtgcatgagatggtgtccggttgtgcacagacgcattaaatgacagaggaatgtttgtttcatttctttttttaatttttatttttttgagatggagtctcactctgtcaccaaggctggagtgcagtggtgcgatctcggctcactacaacct

SEQ ID NO: 82438 - DNA, 1025 bp, Homo sapiens
ctccatgcatgagggcagagaccctgagtttgtctcttttttttgagacggagtctcactctgtcgcccaggctggagtgcagtggggcaatcttggctcactgcttctacctctgcctcctgggttcgaggaattctgcctcggccttccaattagctgggattacagatgccgaccacacacccggctaactttatatttttaatagaggcaggattttgccatattggccaggctggtctcgaagtctctacctcagttgatctgcccgcctcagcctcccaaaatgttgggattacaggtgtgagccacggcgcctggccctcgactttgtttactgctgactttgttgaatagctaaaggggaggggtgttctacgtaggagcaaaggcaggcagctgggtggcacagtgctggtgaagcccccgaccttgtggggctggggctggggctgggtgcgtgcatgtgctaagctgccttatctcctgtgatctccaggtcaagctttccgtgtactgggactacatgaaggccatcggactcttcatctccttcctcagcatcttccttttcatgtgtaaccatgtgtccgcgctggcttccaactattggctcagcctctggactgatgaccccatcgtcaacgggactcaggagcacacgaaagtccggctgagcgtctatggagccctgggcatttcacaaggttggtgccgctgtctcccaccccgcctgatttgggcccctgttgtggctttgtctaattatagaaatggatccttagagtcctcagcgttttgtgggaccccaaaccaagccaaacccagaaaaatggtagctgtcagctagtagacactcagatatttgtagagtgggtgtttgagtgctttgttcatatgggccttggtggtagacgggaggagtgctccagtgtgcccattttacagatgaggacagttgagaacagaggcctctggaagcactgagggttgggaggacccccttgagcatgtttgctttgtc

SEQ ID NO: 82439 - DNA, 1060 bp, Homo sapiens
atgaggaaatgcctgattattacttaatagtttcttgagtctaaacaaatagggctttgttggaaattccttctgcctcttctgtatctcttttgaggtctctagtaacttataaaaagccgagtcattccttttgggagcctggcaaagggaagagagtccttcttgaccttcggccgaaacacccttaaaggagtgtctctgggcagcgcgcaagggagagggctgtcgagttgggttgaccagatgactgatgcctgaggtggggccgagatgagggcactttggggcagggacaagtccggatgccagcattcccaccacacctgggcccttctgtcctgcaggtcggcatcgtggggcggacgggagctgggaagtcgtccctgaccctgggcttatttcggatcaacgagtctgccgaaggagagatcatcatcgatggcatcaacatcgccaagatcggcctgcacgacctccgcttcaagatcaccatcatcccccaggtggggtctgggtgtggcccagggggtgagccagagctggcaagccctatgattgcactgacagtggtgtatgtatatttttggggcaaacatacatttggccctacttcatcgttcttttttttttttttttttttttttttcctgaaacagggtctcgctctgttgcccagagtggagtgcgctggcgcaatctcagctcactgcaacctccgtctcccaggctcaagcgattctcccaccccagcctcctgagtagctgggactacaggcacatgccaccacacccagctaaatttgttttgtacttttttgtggagatggggttccactgtgttgcccaggctgcccttgaactcctgggctcaagcaatccacccaccttggcctccaaaagtgctgggattacaggcatgaggcaccgtggctggccttcattgtttttattgaagttaggctgtgctgctgcttccctgaatttcctcttagtatatgattaacaacgtgggaattaactgactatcagtcccgacttcctgtccccgggaggggta

SEQ ID NO: 82440 - DNA, 1112 bp, Homo sapiens
ctggactcaagcaatcctgcctcagcctcccagtaactgggactacaagagcatgccaccacacccagctaatttgtttatttttgtttttggagagatgggggtcttgcttttttgcccaggctggtctcaaattcctggcttcaagctatcctcccacctcagcctcccaaagtgctcagattgtaggtgtgagctgctgttttgagaatgattctgaacctgcatcttgctgaataggagatgtgctctgattgattagtgatgtctgctgcagacacagatgttgggagtggacatgctttcctggtcaagcaacatagagtgtctcctttcgcttctcccagcctgggcctaggttcagggtcaggggtggtttgacccaacactatctcctggtttttttcttccggtcaagtgtcgggcagcgccagcttgtgtgcctagcccgggccctgctgaggaagacgaagatccttgtgttggatgaggccacggcagccgtggacctggaaacggacgacctcatccagtccaccatccggacacagttcgaggactgcaccgtcctcaccatcgcccaccggctcaacaccatcatggactacacaaggtgatgccactggcacagtggcctctaggctttgggagtttgccttactcactggctcactcattaattcattaattcattcaacactgtccttatccctagtgacagccccagtgggtggatcctctcttcatcctggatggtaccagctatttctttttttttttttttttttgagacagagtctcgcttcatctctggagtgcagtggtgtgatctcggctcactgcaacctctgcctctggggttcaagcatttctcctgcctcagactcccgaatagctggaactacaggaatgtgccaccacgcccatctaacttttatatttttagtagtgacagggttttgccatgttggccaggctggtctcgaactcctgacctcaggcgatctgcccgcctccgcctcccaaattgctgggattacaggcatgaaccgctgtgcccagtggtaccaggtatttctaatatcatctagtcattcattcacgtcagcgca

SEQ ID NO: 82441 - DNA, 1050 bp, Homo sapiens
accagtcctagcaaaaagtgttaggggcctgacccgaagcagtgacttgcccaggtcagttgtcccaggggcacgaggtgctcacccctccccttcccctcatgtctgtatcccctctccctcagggtgatcgtcttggacaaaggagaaatccaggagtacggcgccccatcggacctcctgcagcagagaggtcttttctacagcatggccaaagacgccggcttggtgtgagccccagagctggcatatctggtcagaactgcagggcctatatgccagcgcccagggaggagtcagtacccctggtaaaccaagcctcccacactgaaaccaaaacataaaaaccaaacccagacaaccaaaacatattcaaagcagcagccaccgccatccggtcccctgcctggaactggctgtgaagacccaggagagacagagatgcgaaccacccaaaacacgcacaccctgcccctggtgccctgagacagacacacagcctcacgcccccaggaatgcaagtggtttcctggtgcttcccacggaggagttttggcagccagacttctggaggaattggttgtatagaagatcctagtgaccaaattcagcctactgcctcggatctctccagccgaagtctgtggactgcaagtctttgagatgcttctggctcccatcacctctaacatccttgtctgggtctaccaggaacgcttcatttccttggggctgcagttttgtggttgaggggcctggagaaaatcattttctccccttggcagtgtcccagggccctggatggtcctcttaccaacatctggtcttccaggcactcaaaagctgggaaccagcatctcagcgccagctctaccagttctcgttttgggccagaggcagcctctgcactcccacgcctgtcctcctggaagggacctggttggactaacggctaacctggacctggaactgtagggccaggggattgtctcagggccgacgttccacctggggcttccctccccacccaccccgactccaggctttccc

SEQ ID NO: 82442 - DNA, 1019 bp, Homo sapiens
catccggttagccccccagggggggcagcattgtggagaacttgatatttagttactgatgctcttccaggacacgaaaagaacccatctttgaatatcaatgattttttttttttaagtactgttccggggagaaaaacagtctcaaaacttgaacttcttgggaatagaagtgttgggctgagaagtaacattcccaggaaatagtgagaagctcgccctgtgtttgaaaccgtgttggtctctgtgttcctggaagaaaacagggaagcagcatcttttaaagcctgttctttaaggtgtctcgttagagcccaaagtggaatccggaaggcagccagagctgaggctgccccaagactcagacttgctaagaattacgccgccgacttcaaacccagagagcatctttcttttaggcgaaaacgcatatatttattttttgtaagttataccattctttcacattagataaactaagttttgggggatccttttgtaatgacttacactggaaatgcgaacatttgcagtaaaaaaatatatatatatctatatattttatttctttctaaagaatggttccctttcctttggggcctcggcgagggttccagccatgtcctctgcagggtcaggatgtggcatcttcctgtttctgttctttccttttgacaacaagtcgcctctagtgggagctgttgccagaaagggcaagttgtagagatcactagtcagatggggtttagtgggaaggcgggacagccgcaaggtggacggagcccaggttttggggttggacagaccctggcttgagtcctgctcttgtcatttgctgttcttgtgaccctggggaagtcactcagcctctgtgcctcacttgctttgtctgtaaaatgaggctgatcgtacttaccctgtgagcagtgatgtgtgcggtactcgtagcctcggtcaggttctaagacacaggcgaggcagaaatcacatgtggccagaacgatccttgaaaatcctgc

SEQ ID NO: 82443 - DNA, 1036 bp, Homo sapiens
agttgttagataattccaccaacgaaatctcccgtcctttccagctgtgatggtgaattctaaagtagaattcatctttggagcttctccctgtaggcatgcaccttgcgttgcacctgccagatgtcgcgcggagtcctccaggcctctagaaggcagagatggtctcgtttccttgccgagcatgcgccttagttctctcttctggggctgtgaccgtggggtcgaagcgcgcgtgcgcggcggcggctggcggcggcggtggggcggggcctgggctgtcagccggcctaggaggaggaaggagcctgcggcgtgcagtgtgaggggcgggacccggctgccggcggtgggtctagctgggggaggtcgggccatgctggtgggccagggcgcggggccgctggggcccgcggtggtcaccgccgcggtggtgctgctgctgagcggcgtggggccggcgcacggctcggaggacatcgtggtgggctgcggtggcttcgtcaagtcggacgtggagatcaactactctctcatcgaggtgagcgcccgccccgccgcccggcgccgagtcgccgggccggtggttcagcctctctgggccgcgctggcctcgtctctgacaccgggcggtgtggagtccttggagcccttacctcttccgaggctatgctgtccgcgggctccctgcagcccctccccagtcgcgctggaggggaggttcttatcatggggtcgtctaaggactgaggggtgccagacctcaggttcttcaaaaccccgactccagatccccggaacacagaccccagatcctcaaaacccagaccctaaattccctggagcccagactccatttctttaaaacttagacctgagatctcctcgaatcagaccccctgaaactcagatttccccaaacccacattccagaacctagagaccacatgtcttatcccccaaactccacagcccagaaccccccgaagttctaatccactgctcctccaaaccccgcggcatgattttaaagagc

SEQ ID NO: 82444 - DNA, 1020 bp, Homo sapiens
ttgtatttttagtagggacagggtttcaccttgttggccaggctggtctcaaattcctgaccttaagtgatctgcccacctcaccctcctgaagtgctgggagtactggcatgagccaccgtgcccagccaggaatttgcatgttaataagcaccttactaatggcaaagtttgcaaatttgttttagacccggaaacttacacgagcaacctagaggcagccactaaaataaacagaaaagcattgaaaaataaggcattgtaataggctgtaggtggtttctaatctgaaaaacattgagtcacatgatttgggagagagtttgttgatttccctctgtccccagtaatgccccgtgttaaaagctggcatataataggtcctcagtgaatgtatactgactgagtgcattcaggtgtaacatgtgtagttaattcccaaaggcaatgttatgatttctgttttccttccttcctttccagataaagctgtacaccaagcatgggactttgaaataccagacagactgtgcccctaataatggttactttatgatccctttgtatgataaggtaagaggggactgcttgtcacttatgatgggaagtcactagtgtgcctcaccaggctgcattaaccatgtcctttcctacactagcaaatgctcatctgttttgtaaattattagtggaatatgataatcctagccacatttggagggagacaacttacaaactgccttgacgaatacagtggctctctctgtgtttaggaccatttggcaatgtctagagacgtttttgttgtgacatctgtggctgtgcgctacagtcacccagtgagtagtggccaggcgtggagctaaatgtgctacagtgctgcctacgacagcccagatgtcagtagtgccagggctgagaaactctgatttcatggaacccgttacttgcaagcagcttaaagtattgttaaaaaaattgtacaagtaatacatgaattcatgaactttgtgaaaaaga

SEQ ID NO: 82445 - DNA, 1002 bp, Homo sapiens
gagctcctttaacctttctgtgccttaatttacccctcagtaaattgcagctattactgcctgtctcttaagataattgtgaggattaaaggcactcagctcagtgcctggtcggtgatgagcattcaggaaataaaattatttggtgctcactgaattttcactggaactctgagatataacttagctgaaaggcgttgtaaaattattttatactctaaacacgaattccctctggggcaggaaaccaggaggctagggggataggggtgagagggagacttttcccagaatactttttcgtacctttggatttggaaacacaacgagtgtattaagtgttcaaaagtaaaatgaaacctgaataataaaaatacgttctacttaggttcactgtaccccaaaactaagcttgcctttgtgtcttgtgccccggtttcctcccctgcttcgttcctcagagccgacgaccgtggagctccatgtggatggagtcagtgacatctgcacaaagggtggggacatcaactttgtcttcactgggttctctgtgaatggcaaggtttgtctttggaacttgattatttttcctgttcactctataatgtatactaaatccttttttaaaaaaatgcaggatattttaacctggggactttgatcccacaagggacccatggataagtggcaagtgagcctgtgaactctgtacttcatccgtgtagaacacagcaggtgtatttaggaatgagattgaggttgctggtcatcccctctgctcccagagcataggctgttggtgtttttatttttttattttttattttgagacagggtcttcctctattgcccaggctggagtgcagtggtgcaatcttgactcactgcagcctccacctcccaggttcaagtgattctcctgcctcaccctcccgctccttcaccctcccgagtagctaggattacaagtgtgtgccaccatgcctggctaatttttgtatt

SEQ ID NO: 82446 - DNA, 1044 bp, Homo sapiens
ggaggggacacgtgagaccttgcagaggtggaatccacaggactgatcgatgctggaggagcggggcgggtcatccaaagtgatgccggggtgtgcatgggagactggaggaagacgtggttcaccaaaatgggggcatctggaggggaggagatggcacaggggtaagggtggggggcttctagaagcttgagtcagtgaccttttaacgagggaagtaagtctctagacttttcttttctgttgtttgacactcagcagtgtgttgggaacacaacagagaagacagatgtgggtaaagtgagagggagcccggctggcacacaggaccggggcactgagtgttgggaggtgggcggcaggagcagacatggtaggtggtggccggcgcagcagaaggaggctttgtggctctggcacaggagcaccttcgagcaccttcttgttctttgttttctagcccgtgttccacgtcatgggattctccgtcaccgggagggtcttgaacggacccgaaggagatggtgttccagaagcagtagtcaccctgaataaccaaatcaaaggtgggctgacacagcagccccaggctgatggccagcgctctttttggatcacagagagaaatggagaggaactgatgactatatgagaacatggcagcttttggtccaagtattctggtgtacatgtaaggatacactgttgtttttggcttatcttctgtttgtgtgtttttgttttacagttaaaacaaaagctgatggctcattccgccttgagaacataaccacagggacatacaccatccatgctcagaaagagcacctctactttgaaacggtcaccatcaaaattgcaccaaacacacctcagctggctgacattgttgcaacagggtaagcttatcgtgtggatttggaagcaccagtaaatatgctggcagccagtgtagaaccaaatgacctgtgatctgtgtgtctttgccgagcttaagaacttaagaaagattagtactttttttttttttttgagagacagagt

SEQ ID NO: 82447 - DNA, 1015 bp, Homo sapiens
tcctcttactgtgaccgacaggcctgtgatggatgtggcctttgtacagttcttggcatcagtttctgggaaagtctcttgtttgggtaagatatcactggaaagtaagaacacatagtttcaaagaagtcagccggtaggagtgggatttgggaaactttttgttttgcctttgttgtttgctactgatcacctgcgtgcgagggaggcttcttggagtcaggtgggtacatgttaacttgaaagaagcgctccgtctgcctccggccactgcctcttaggagctcagcagtagcaagaagctattacatagggttaggattcgaacctgtgctgaagccttataaggggtcacatggagccctcccttcttttccctgcagacacctgtggtgacttgctggtgactctacagtccctgagccgccagggtgagaagcggagcctccagctctccggcaaggtcaacgccatgactttcacctttgacaacgtgctccctggaaaatacaaaagtaagaattggaatgcaacatcctgtggccctcacacacttcttgtctttgtaaactttctaaaactcaggtctcaaattgtatcacgaccatgtacctttccttgttttaagtcgtctttgcctcgtgaccttgactgcattatttagcgttggacaagcatggaggagtccaggccctgagctgaccgccaccttgtctgcacagcccactggcggcttctgttaagggagggtgccccgacgtatggcattttatttctaaagcccagagaaaggagtgtgaaatagttccactgatgtgttctactaacttagcagtactggtgctgagtactggccatggcaaggtacttgacctccctgaaactcagttttcccatctgtaaaatagacataatagaacctttctgcagaatataagactaaaagaagtaaagtttataaagcccgttgtgcagagagccagctaagtagctggtgcccacaaatgttacttcc

SEQ ID NO: 82448 - DNA, 1026 bp, Homo sapiens
ttccagtttttctttctttttttttgaaatttagcctcgctctgtcacccaggccggagtgtggtggcgcgaccttggctcactgcaacctctccgccttctgggtgcaggagattctcttgcctcagcttcccgagtagctgggattacaggcatgcaccaccatgcctggataacttttgtatttttagtagagatggggttttgctatgttggtcagactggtcttgaactcctggcttcaagccatccactgccgtcggcctcccagagtgctgggattataggcatgagccaccacgctcgactccaggttttctttagcagtaatttattccaaatactgctagttataaatatatgtatgtgtatatttctatctttatgtctacatacacacctgctttttaaaattagttaattcatgatcattgtttctggtggcgtgcagggaggtggtgtgctccacgcccatgtatccgtttttggtgtttgcttttgcagtaagcatcatgcatgaggattggtgctggaagaacaagagcctggaggtggaagtgctggaggatgacgtgtctgcagttgagttcaggcagacgggctacatgctgagatgttccctgtctcacgccatcactctggtatgtacggcttatggagtctcttatttggaaaagcgcttgccttgtggatgtcaagaaagactaacatcccaggaatattgtaaacgtaggcaagtcagatttccttttctgcctctgcactcacccacctgttacgcaacgcataatcaggaagcatttatactctctcagtggaaggacccctgtatttaggaggtttccttgtcctggccctacactaaatctgactggtgattcggggtgacctttggtacagtgtagagcacactggctttatattattagtaataatagctttgggtaaattcatttactgcttctcagcctcagttttcaccgaaaattgagatcttaatacctacttctcagggttatggcaggg

SEQ ID NO: 82449 - DNA, 1006 bp, Homo sapiens
ggctgcggggggccaggccatgttaaggtccatagtctttgtcccatgatgcaattgacatgttttacatagaggaatgacatttttcttcctgaaggtccccctattggccgagtggagaacagacagaagaggcctgagagtgggaggtggtggaggcagggggaggcaatgggggccccagactagtggctgcggagatggagagcgacggactggtcggagagtcgttgagggactgagttgatgagacatggcactaaagtgaccactgggttagggcgggagaaatgtcagggctggccctggtttctggtgatggggagccaggtttttagctgggggtggatttgccgaaggtctgttgctgtcttttactatcatttactgtctccctgcttggaaagtatgaattactgataggactagcaatctaccttcttaccagtagtaactgcatgttacctcctttcagcttgattacattcatttttgtaacttcacaagggtgtttgtgttgcttgcttgtgccggaggttgtatggaatgcatcttccagctagacagagccactcggattcccctgggaatcgtgtactcagcagacccaaaacccgactgctgacagttgccctccatgagcccctctgtggtcttttctgattcagatatggcagctcccgctttctccttgtttcttgattcttatttcccttgaaccctaggcccagccaattccccaacaaagccttggctttacaatcaaaatacacccatcatctagtccctttttaccacttggccctcagccttggtctgacccccctctggggtcactgtagcagcttcccagctggccttcccttcttaccacgtggccctcagccctggtctgaccccctccgggatcactgcagcagcttcccagctgggctttgcttcttaccacgtggccctcagccctagtctgaccccctctgggatcattgcagcagcttcccagctg

SEQ ID NO: 82450 - DNA, 1083 bp, Homo sapiens
aaaagtgattgtggtttttgccattgagaataatggcagaaaccgcaatcacttttgcaccaacctgtatataaatggaatcaaacaggatatactgttgttttttttttttttttggtctgacttctttcacgtagcataatttggagagctgttgactttagcatgtttgtgtaccttctgggaagtagttaaagctgtcatccataactgttccattttgaaggacacagaatgttcttactgaggcgtttgctgcctagctcccttccaccggtcctttctgggaagaagcgtgctgcgattgtacagagtgggtctggagatcgttgagaatgaatatttataaactataggccaaaggaaaagagtgacagattacatcgcataaaaatttaaaattctatattgctgaatacatttggaaccaaactgaaagatattcaaactcggaagaaatgtttgtatcataaataatatccccattttacaaggagctcctaaaattggtaagaaaaagacaacccactagaaaaaaaatgaacaaagattatgaaaaggaaattcatggaagtaacgcaggtgactaataaacacagaaacacaaagcctctgtagttactgaggaaatgtgctaaggaagttacagtcgaaacactgttttgcagggattagatttgctgtaattaagacaatctctattttttggtaagtgtgggttttcccaagcataaataatttatgggactgtaagtggttacagccactttggaatgcaattagatagtatctttctgaatttaaagtgcatgtatccaacaattctacttctaggaatggattgttcaggaaataaaactaagtgcctagagatacatatttggggatattccaattgtctcttgtgtaccacaagagtaggtgctgtggtttgtcaaaccctgccttagaatgctatgcagtagttaagaaacaggcagatttctattggctggcagaagagaaccaggataaattgttgaggaagagagcaagttgcagaactgtacatataacatgccatttttatttcacctcctccac

SEQ ID NO: 82451 - DNA, 2311 bp, Homo sapiens
agacccgtctctataaaaaatacagaaatgtagttgggcatggtggtgtgcgcctatagtcccatctcctcaggaggttaaagctgaaggattgcttgagcttgggaggcgaaggttgtagtgagcccaggttgtgccactgcactccagcctgggtgacagagcaagaccctgtctcaaaaaaaaaaaaaaaaaaagttctagaaggctacacaccaaacttacaaaacttacaacagtagttacctgtggggaggaagattaggtcccctgtcctcctttgagtaacaataaaagaaaaaaaccttgaaaaaatgacctcttgacttgtggaactgttattttcatagttagtaggagtttaaccttgctctggtctcaccttctcatccccagataaaagctgaggatgaccagcccctcccgggagtcctcttatccctgagtggtggcctgtttcgttccaacctcttgacccaggacaacggcattctgacattctcaaacctggtaacgtgttctgcaatttaccacctgcctgtcttccctgagagagagccaggatgcagcatgcgagacttatgtgttgcttgacaacgtgagaagagaaggccaatgtggagtggtttcagtttcttgggggcccacggtcattagagtattgctcttactcgaacttaatgctgctgattcatgttcccttccacacgcgcttcttgttttctgatcacccgcttgtcactaagacagtgtaattaatttccctggccacaacggctgctctcttaggcgtcttctcgttttgccacagaatcatgtttatgatgctgagtcttgtttggtggttagcttgcgtttcttctgaaaagacattccacttggtgggaagagagcagcagtttttctttcaagatgcagtcggaggccctgactggtggggattcaggaagtgtgtgttagttggtcatcttgtcagtcatggtgacaaagtggctgtggtggggctactggagaccgggcagtgggggcatctgaagacaccactttgcagtgatgcagactgctccttacttgctgtgtcctatcaggcaagttactttgcctctctgagcctcagtttctttattcattaaattcaaatatgagccaggtatggtggcccacgcctgtaatcccaccgctttgggagggtgaggcagtaggatcgcttgagcttgggagtttgagaccagcaacataggaagaccccatctctacaaaaaataaaaaaattagctgggcatggtggtgcatgcctgtggtcccaggtactcaggaggccgaggtgggagatttgcttgagcccagaaggttgagactacggtgtgctgtgatcgtgcactccatcctgggggacagagtcaggccctgtctcagaaaaaaaaaaaaaaaagaaaagaaaaattaaatatgacttctacctctctgagtcattgcaggcaggtgataccatcagctgccgttgttagagttgtgattgccactacctgactgtgagtggtgattatagagagagggttactatttttggctgccagggaagccatggcgctcccctggtgtaattctggtccatcgtgacattcgcccctcacttttaagccatgcctagatgtggctgctgaggctcagtgtgattatcttggcagagccctggccagtattacttcaaacccatgatgaaggagttccggtttgagccatcctcacagatgatcgaggtgcaggaaggccagaacctgaagatcaccatcacggggtaccgaaccgcttacaggtaagtgccctggccaccccactctcttccagggctgggctggtgaatcacattcaggcctctgttgcctggaaacgcatcccaggcttcacactgattttacttgggagggaagggagatgagatatgagggcaaaggagttttgactgctgcccttctctcctaggagctcaacctggtggttcagtctcaaatttcctattttggaattggcttgagagagcctattgagttgctaaaagcttttatttattttttattttttgagacggagtttcattcttcttgcccaggctggagtacaatggcgcagccttggctcactgcaacctctgcctcccgggttccagcaattctcttgtcctggcctcccaagtagctgggactgccaccatgcatggctaatttttctatttttagtagagacaagatttcactttgttggccaggttggtctcggactcctgatctcagatgatctgcctgcctcggtc

SEQ ID NO: 82452 - DNA, 1050 bp, Homo sapiens
cacacagatacacacatatgtgtattttttgtagacttatacagaatcactttagaggaagagtaattggaaagattgggtttagaaaaatggaccattttctactgaatatatggaatgaaagaggaagtgagttatttccatgttattgaaagctccattatttcaaataaagcctagaaagaataaaataaagctttagccttcttaaattacaattttccagagcatccctcaaaatgtatgagaaaagaaattgatggcagcttatccctccggcaggaaggtgtggtttgaaagtgggccggccacaccgagttgcctgggtcattgaggcacagttctcccctgaactattttgccccataattgttggtaaacgggaaacacttgggtccttcagataaccatgagaatatctcattcgtgcctgttcttgccatactagttgctatggcacagtgtcttccttaaacggagagcccgaacaaggggttgccatggaagcggtgggccagaacgactgcagcatttacggagaagacaccgtgacagacgaagagggcaagttcagattacgtggattgctggtgagacttggaatgtgttttctttggggacttttttttcatcctgtgtccagaagtatcttgtggtggccccaagactgctaggagtgggttgggcgagagggctgggggtggggctctggagccctcccagttcttacctttaattggtagagtttgccttttttctagccaacaggtcagatcaaggatctgtggcacaatggagttggaaaaccatgggtttggtagggcttttccctagcagtatgtggccatggcttacgccagggctcaagccaaacgcctatggagccagaagagcagtatgaacgggggagaggaggctgtgcgaaatgatagggagtggtgagggctgtggagtgggcacggcctgtggaaagggacagcctgtcacttggttccagcttattgtagccatgggggaagacagagtcagggttgccagatccttgaaatt

SEQ ID NO: 82453 - DNA, 1023 bp, Homo sapiens
gaagtcagaaattcccacttcccagaaataatacccaacacaagcatttgggaatgcttatggtggacattccagatatccatcaatgtgtatatacgggtagaggggaggggtggatggagaggaaaaacatcttagaagagtaagagcacatagtatgcttggaattttgaaataagaaaccaaatttgatttattttggggtaggagaaaatgaaactgagttgggatggaaggagtcgcaaaatttcagatgtttcaacactaggggtgttcttaaaggaactctggactcttaaggttaacaggccacagattaggaaatgaggggagagaaatgctcctgtcttaatgatctcgtgcagccaaaccaggcttggaccaggcacgatacgacaagccccctttctagagaactgactcctgagtttttttgcagccgggatgtgtgtaccacgttcagctcaaggcagaaggcaacgaccacattgagcgggcgctcccccaccatagggtgattgaggtaaggcattcagtgctgccgctgcacctgggtgtgggtgcctccctaatcagaagtcctcccgtctcctctggctgtctgcctttcatctgtggcggggggaactttcatcctaattaagggtcctcttagaatagtgtcatcttcacaagcagaatcttatgtgggtttttagtgaacagcgttgctgtcatgcatccagaaaggaaattggaactgttgtatcctccccgcgacttgccctgtaagctctgatcattattctgcaagttaaggaacttaaggcctaagcagcatttcaaatcaagggacaataatagcacatgggcttaatgggtggcagggccacgcagttatcttaggttcagatgacctttttcctgctcccattttgtgggcagagtcttttgatactcaagatcatgacctagctaaattaatccctaaagaggacatccttcgagtcacagaatgtggcctgggaatcatttgaagtaagg

SEQ ID NO: 82454 - DNA, 1077 bp, Homo sapiens
aggcaagagcatccttctcctctttttttttaagagaagctggaaaatctggcttcatatatgaaatttcttaatttttaacatgttggcaagtaattcaaacgtagaaaaaaaatactgtgctttcgaaatgaaatgtgtctatgggccagggatatgcccctgctctaacaggcaagagcatccttctcctttttttttaagagaagctggaaaatctggcttcatatatgaaatttcctaatttttaacatgttggcaagtaattcaaacgtagaaaaaaaatactgtgctttcgaaatgaaatgtgtctatgggccagggatagccatcttctgtcggtttgtgaccttggacgtagggtactcaatgacaaacttagcttccttaatgtaagaagcaaagtttgccatgaagcagctctcaggccatcggacagctggcatagaagttcctccaccagctttctcattactggcattccctctttctctctctaggttgggaataatgacatcgatgatgtaaacatcatagttttccggcagattaatcaatttgatttaagtggaaatgtgatcacttcctctgaataccttcctacgttatgggtaagtccagacttttaagctccaagtattgtgttccctttggctttgagacaagtacgaatgggatgtttttggttttgtgcctgtctcgtgccttaggtgtgacaggtggaggtgctccagagtgccgcctgctgagggttgaggttgagatttaagaaccttggaccacaacacgtatttgggagagtgattgccagttgtgggagagaatgtggtccagtttcagataactgtctgccatcagttaatcttccaaagaattatagtagaagcctgatcaatgatcaatacaatatggaatctaacgtggaaagccaattctaaagaaagcgccttgtaacttaaaattttctctggagtggaggtcgtattaaacgttcttgcattggtttaaagaaatgcctgaggctagataatttataacaaaagaggtttcattggctcctcgttctgtaggttgtac

SEQ ID NO: 82455 - DNA, 1360 bp, Homo sapiens
gaaatccagaggcctcaggagatggcgggcatgtcagggagagcgagtcctcacagctgcaggagtgatagcagagggatgtccagggtcacagaaatcacatttcccggtcgggagggcccgtgaaggcctcaagtccagacttaggtctcctttcaaggctgtaaacttctgtaacatctcctaatccttaaacctggaacacctctagggacatattaggcccggagagaggccagcccatccctggggactcattagtaagaggcctgcctcgtttgaactgaaacccacccattagcacgtggcagctgctgatcatgtctgaagaaggtgtgttgagaagtgaggctccgctgttcatctggcaaaagcctcctctttgtacccctctctctcacactttctctcttttctagctcattcctttgctgctgcagttgacaagccggctacagggagtcggcgcgctcggccaggcagcctctgacaatagcggcccagaagatgcaaagagacaagccaagaaacagaagacaaggcggacgtgaggaggaaggggacagttgcagtctcacttgggacaggccacagccaggggtccggccactacccgcccgtgggataaaagccaaaagcatgcgtcagctaacttcagcctgtgctgctgggcccgcaccccatgtcccttgtcactgtggcatcctgcacccatcctcacccctccgtagagcccctcgtgcaatgcaatgaatggaccctcctgtcactctgctgaacagaatttattttctgagtcaaatataatttattattatttttgtcaaagaagtatttaagctgtgctgtggtgtgagaatgtcattcttgatcttcagccttcgtttgcaagaagagttccagttgatgtggtgtttggttccatggcggggtaccctagggattcatctgttttcttcacttccctttgcatctgagatcctgctggaaaccacggcaacctgtatccactattaggaggtaaaaatcaataaaatggcccattcatttgtgttgtagctcatcatagatgtatttcttggatgacatgcacgtaacccccgggagtcttcagttgagccaaatgtagagcaagtcagagtcctgagtgaagctggctggggcaggaaaaacacgagctcagccaacatggtccccagcagcttttggcgtcagtgatagagaaatcggagatagtggaggttgtggcaagttgaagtgtgcccaccacgtctaagggaagcttagggactcagctctggctcacccctgctgtgcagaaatgtgcgttcatttttctagagaagccagaaaaacaaag

SEQ ID NO: 82456 - DNA, 1103 bp, Homo sapiens
ttcatgttccttgcaatgccctgtagccaaaggatgttcactctctgaagcttctcaaatttttttttaatgataagggtcagcaaatgctttctgcaaaaggcctgatagtaaattattctgggttttgttggccatctgtctgttaccaccactcaactctcccattacagtctgaaagcagccatagacagcgtgcaaatgaatggatgtgactgtgttttaataaaattttatttataaaatatgtggtgggccagatttggcccatgggttgtggttgcaaatctctgctctatgatatccccagctgaagtgttaaagggaaataccagagcaataaatgctcttctacatgaaacagaagccattagccaaatgcttaatgtgaagaagtagccagaggaaagagctgtggtgtgtgaagtaatgaggatgattaggcaaaaaccagctttacttttccatcccagctaactcagtttctttttatttataattttctaaaagagggaaaatagagatggaaatttttctacctaaacagtgggattaagagaaaaaattctgtaatgtagttttggttaccatggcattcctggtacaacttgccagaacatccaaataaaaggacaagcttttatctctccctgcaactcaattaattttaatctataagatgagaattatccacttagcttccaagattagcttgctttattagggtatcaaaaaataagcagaaagaaaagaaaatgtgcttgaagatgacttgctttcatttgagaaaatcagtccacagttaattagggcaaaacttagaggctgcagggaggttagcagagtgagatttaatcattgtcagataagtgtacagtcaagaaaacaccatgaaacattctctctgtgaggtgcatagttacctacatcttttggaattgtttatgatggggatgtgtattagttatctgttgctacacgataatcacacccaaacttatcagcttaacacaaaacacatttgttgtctcacaatttccatgatcaaaaatgtaggcacaatttagttaggtgttctgtgtcaagagtctttggataaggct

SEQ ID NO: 82457 - DNA, 1033 bp, Homo sapiens
gcacttacttcagggatgttctaaccacattgactcattaacccaaaaacaacaaatgacctttcattattattccattttagggatatgaaaactgtgaggcacagaaaggttaaaaaaaactttccaaaggccatactcatatcatcttctctttattcccttttcatcagaatctcccaaaatatttgttacatttgtacccaggaatatgcttttaagtatatatctagggctgagcttttcaacctcagaactcttgccattgtggctggatgattctctgttgggacatgctgtcccatgcatgggtaggatgcttagcagcacctctggttgagaaaccctcatcagtgatatcgacgaatttgtatttttaatgaattgcacttttctgaggagcagccaggtttggaaaccactgtgttctgtgggaaaacactgtgttctgtgtacttgaaggagtaagaagaggtagaacattatcccctttacagctgtctctgggcagcctaacaatttacagttctggggaagggcagagcaggagggtggggaatgctcatccacttaccatgagccctgagagtgcttggccccaagatgggcaccccttcctgctctgctccctccaagccagcatggtggcttcttcctccagccctccccacacctagcagcagagagcacaaatatgagtgccactgaatggttaagcgaatcactctgaggtcactagagccaccgtgtagagacggtatgctacttcccaaaccactaacacaggaaggcagggacacaatgccaggctcataacccagccaaggtgcccttgatgtggagcgggatgctgtttgtttgtgtttgatctcctctgtgccgggctgtgtgggcattggctttactggggcagacatcacttttattgttcaggtaaggaaacgaaggcatggaggggtgttccaagtggggtttttttccagcagtccctgctgccttcctggtttttgtgcctgtatgaatgcagagtaca

SEQ ID NO: 82458 - DNA, 1105 bp, Homo sapiens
aaatccacccagttgtccattcagtatatatgcatgatgggcctactaggtgctgggcatgtttaattttcaacctaggcgcattcagagaaagctgccattcagtgaggttaaatgacatccttggacacacagctgactcagtcatggagctgggatctgtccccagatctttctgtttctgcccaagcattgctttctaaagcactgtcctgcttctcgaaggtctagcttctattataaccccagagatgtttttttatctttctgctctcttctctgttcctcccatttgaaacaatagttaacgctttcctttgaagtaaaaattccgaagcagagaaggctggtgataaaggagctgtcacatcagcaccatttacctgtttgggtttattcagcagaagaggcgactgcgtttctggcagatggagacccgtgtgactgccttttaaaatactgtcacagctgtatgcgcaagcggattagctgtgattacactgctagtgctgagattgatggggataaatttgggataacaatgctggcaacgatgtcactcgtttgtattggacttcatattttttaaagctctctcaatcagtagccccgtggttatcgaggacttggtatccgtccattcattgatgcattcattgctcaaagtgcatttgaaggagtcagtttgaacacacatcactttgattcatttgtttattcaacaaatattaatatagctcctactgtatgccagtgttgaacaaatccagctgggctctgtcctcgtggaacttacattctaatgtaagcaaggtcagtgctttcagctggtgatacaagagtgaagtattataaacagagtgatgtaataaaggtggggagagagcgggaggcaggtactactttaggttaagtggtcagaaaaggtctctctaaagaggtggtatttgaaaggacacctgatgacaaagccaagccagcaatactgggagaaatttcccaggcaagcaaatgcaaaggtcctgaggttgctgtgcatttagctttgggctgacttgctgtttgccaagcccagtgccaggcactggagattcccaaacatgtg

SEQ ID NO: 82459 - DNA, 1033 bp, Homo sapiens
cagggagaccttagcttactgtacccaccccgttgcatcaagcggttggggtaactcatcgtggccccaagaggcttaagtaccacccaggcctgaggcaagaaacattaaaaaaaaaagaagtgcaattcatttgggaggaggaagggttcacagaacagatatctagcccactaataaccatgtctcaagcaatctctccagcactaagtaatcctaccctcagttcctccctttgggtaaatgtaggagagagatgggcagaggagaacctgctatgggcagcaggctagagtgccctccccagggtactttcctcataggattgttagaaacatgaaagatagtggaacacaggacctaatccggaattgggcattttttaacaaggaaattttttgatgataatggtagtgatgacaatgataattaataatcctgtatagttattaattctggacaaaaacatggtctggccttgtgtggtcactttccttattctctccttctttcttcctcttatattttatgtctctattccttgtactaatacagaaatgcagattgggcagggggcacctgcctttgaggaagtctgatcgtgatgagagtgaggaaggtagttgccttgagctgagccttctttgcctgtagttgggcccccatattccctccctgctgcaaggctgtttgaagacagccctagtgtttactggccttctctaccccaatgaggtgaaacaacatattccatttctcaagtccatttctccacttactttgaaaaatcaagtgcatttctccagttactttttgaatgcaactgcaatctacctgaaatttcaagtgggaaacttccttccaattcccagcctcaccaaccctcaccccatccccatgctcaagtggcctgcctctgaccctcccctggtggccccaggcaatatcagaaagtgatttggacatctgggcaggtcagcttcctaggaaatcatcatggaacagaagccaacgcagagagcaaagtcttcat

SEQ ID NO: 82460 - DNA, 1052 bp, Homo sapiens
ctctgtgtctcttggcctttctcatcatcttcctctacttcactgatctcatttccatggtgcctcccacgaattcctttgcccactcttctttgccagcctcatagccagaggcactttatgcatcaagcactgctggttcctcttgctgttgttttcatgaagttgccctacacaaaaacatatgaattttgcagatgaatggtttcatcctgggcaatgctgataggttttcagtttccatctgccgccccatctgtagcttccaaaaccactacttctcccatcccagaaagaatgagcaaacttaggagtcttctcaaaggggcggtagtgcccaagtcaggcacttctaagaggcactgaaaacttgggggatacttaagggtccagccagcccgacgtagccactgtgagctgctctgtgatttgacgtcacctccctgtgtcccctgcacaaccctcactgtggggggtgggggggtgtgggcagattcttcctctcttagatattaaagatgcactggtgtttactggtcactagccttgtttaggccctggacgcagacatcctggtttcagattctgccccaccaccaactgggcaagttgcttcaactttctgcatctcaaattctctaccttaaaataaacacaatattagtgcctatttcggagggttcttaggaagtttcaatgaaatcttgcatgataaggacctaccacagcgtctaatgacagaaagtggttgataaatgcccaaattactccatggctataagtaactgtgggacttgagttactttcccttttctctttgatagagttaaaagagtagcaaagtatttcttgaactcacatctctgtcaaaagagggaaaagtgggccaagcacggtggcacacaactgtaatcccaggactttgggaggccaaggcaggtggatcacttgaggttaggggttcgagaccagcctggccaacatgatgaaaccccgactcaactaaaaatacaaaaattagccaggcatggttgtgcatacctgtaacccca

SEQ ID NO: 82461 - DNA, 1057 bp, Homo sapiens
gactcaaaagcagaagcaccagcctgagttggcgaagaagccaccgagtagacagaaggagcttttgaaaaggaagctggaacagcaggagaaaggaaaaggacatacattccctgggaaaggccccggtgaggtgctgcctcccggggacagagccgcagccaacagcagccacgggaaggatgtgtccagaccgcctcatgccaggaaaactgggggcagctcccccgagaccaagtatgaccagccccctaagtgtgacatctcaggcaaggaggccatctctgccctgtcccgtgctaagtccaagcactgccgccaggagattggggagacttactgccgccacaagttagggctgctgatgcctgagaaggtgactcggttctgccccctcgagggtaagttccaaccccgctggctcagagagggatctcctggccacttcctcctcctgcccagccccattctgctcaccttctcagaccttctgagaaaggccaccctgttttccaaaccccagatgagcacacgagatctgatgtgttctagtactccctgagtgttgaagtcttgtatcagaaaaattttgcaaaatcagattaccttttgtaggtgctttaacccattgcctttatggcaaaggatgaaattatagtgaaatcgggagctgatgtgatgctggcaggagccaagggagctgtattgatatggtttcgtttctctttcagtagaatattgggattagaattgatatgaatattattgtaattgattatgatttgagaggtttctaattggttgcattaacttcagaggctctgtaactttccgttttccttcatcaaaagtttctttccctcttctcttctctttcttcctcatatgtttcctgtttccctccttctttccttctcattcctttattttctttctccctttttcctcccttccttcctcattttcttcctggtttgtttctccctttccttttcttccctcttctcattcccttccttattttcctctcttcccccttccttctttcctatttcct

SEQ ID NO: 82462 - DNA, 1012 bp, Homo sapiens
ttcttttggctggacagaccctctccagtgtcctgaccctcccagggtggattgatttatcactgatgaccttgacacatggctgaggcctggcctgtctgaggcaactgcattttgaatctctggacagaatagaaataaaagccccttaattatatccccttattcccattctccctgtaggttcatagtttgggctggatccttccagcctaatccacacttttcagctgaggatactgagtcttggagaggttaacagatgaggctgtttcttgggtcctaaccacagtcgctccatgtctgggcagaaccactcccaatgctatcatggattcctatgaacttttttttttttttaatggtttggatgttttcccctctaatgaaaggaaaccttttcttgcctaagttacacagacagcattatagcagcatcaatgctgttgaaggaaagaattcacccacagtcccacggatctggctagaaaccaagctgtgtgcatgggtctaagcagtccctgtccacatgcatagatcatctccacatatttctaagcacagggaacattcccttccaaggagcccaacactccataaaagtcagcaggaaaggggggccttgtctggtaggtcgctggctgccaaggctggcttgtgtgggaggccttttttggtggtgttacagctttactggatgtcctgtctgtccccttctctctccctcctccagccccagcagccaggggcctggaggttggcggagggctgagcagcccagcttcctgcttcctggcctcacaagcaggcctctgtgaagttgccagggctccaggggcaggggctgaggctcagaactgcagatttttgtctagttctggtgttggcaggcagcccaggccagtcccgagaacatcaccagaccagaaacctgagagcagatgaggcagacaggcacacctttgagctgggatagagactatccaggagccaacaaggctggggatctgtg

SEQ ID NO: 82463 - DNA, 1011 bp, Homo sapiens
atggacctgggtcagagttgagccagagaaaagcccggaacacagttttttttccattttaaattgtgattttctcaattcctggcctcagtctcctgagagggaagaaaaaaaaaagatttgagttaattgatggttctggttagttgggctcagttaatcagggttctgcctctaattgcctgtgccgtcacctcttcctgggtttgcaaacactctgcccttgttacccactgctcatgccctctctggattctgcttgagctacacacggaaaggcggaggttgcagaattcggagctcctgcggacagacaggtggaagagtgacaatggaatgatggagtatctactggatgactataaatggccagtctaggaatgaacttgaggtttagttatctgaaggccagagtccttggctcctgtctcttccaaaactgaccagtgtccacctgtggggaggtgtgttgcaagctgacctctagagagggactttggaatatcattctgtggaaattgtaatagtcccactttgctcaggaagccgtgtgtgtgtgtgtgtgtgtgtgtgtgtgtgtgtgtgtgtgtgtatgtgtgtgatggactctggctctgtcacccaggctggagcgcagtggcacgatcttggctcactgcaacctccgcttcccgggtccaagtgattcttctgcctcagcctcccgagtagctgggattacaggagcacaccaccacgcccggctaatttttgtatttttagtagagtcagggtttccccatgctggccaggctggtctcaaactcctgacctcaagtgatctgcccgcttcagccttccaaagtgctgggattataggcatgagccactacacccagcctggtgtgtgttttgatcgcctccacttcaccccatggttgaagtagattcccaccctatggggataacacccaaagctggacagaccagatggacagcagtttatgtgtcacgtacagtcagccccaggga

SEQ ID NO: 82464 - DNA, 1048 bp, Homo sapiens
ctttcttttccaagggcttttaaaaaaatggtcactggcttgtgcaggccagggagccctactgcacttcatctgagaaagcgggtgagcattttttctaggactgcttgacacgatcagggtttctggcccctgaagaggcagccactggcagggagcaaggccagtcggacacacatacgaaagtccctgtgtttggggatgtcagctcggctggggtagaagccatggtggcccttccctgtgggattcggacgggctggacttgccccaaccagtgtagaagttgactttctgcaaggtatgtgtgtctctttgatggcctggggtgagcctaggaggaggaggttttctctctcacacacatgcatgcacacccacacctgcatctgtacacgcatccatatccacatccatacccacacccgcaaccacacagtagtgaaggacggggccccagagtcaacatcttctcactggcctttgcctgcctgctgctttttggcttctttcctctccatctcccctgaccgtggacagctgcattcagaactcaccatcatggaggaaatgggatattttatttccctgacagaaaacagaatcagatgacagtattgggaaacactggggaaccgccgtgggggcttggatctgttgtttttcttgttaactaggagttacaaaaacactattgttgcagaccttgctttgaaagtatttccaaagtgtgttagtccatgttaaatccatggcacggaactgaatgtgcttcggtgatttaatcaggtaggtatcagtttcctctctgccttccacgctctgccctccatccacctccgcacgtttctccatgctgtgcacacacctgggacacctttcctcttcttcctttacaaagtcttgccagccagccaggcaaagcgtaggtctcaacttctctgttgcagccttttccaaagtgtcacatgcaaactggtgactcacaagatgattttaagctataactccacagactttatagaaattaatagctctctgtttattt

SEQ ID NO: 82465 - DNA, 1039 bp, Homo sapiens
tgggcacctgtagtcccagctactttggaagctgagacgggagcattgcttgaactaactgcactccagcctgggcaacagagcgagactccgtcccaaaaaaaagggtgaatgtgagcaggccacgaatgaccaggataaggggacacgaaagaccattcccgacagagaacagagatgaaaatattgagccttgtcagaaaatcacaagaaatacaatattcatggagcacaaggctcctcttcctttataaagtctttccagccagcccggcaaagcgtaggtttcaacttctcctttgttgcagccttttccaaagtgtcagatgtaaaagagaggagcaggccttggcaggggatgggactgataaggcaggcacaggcccaggtactgtagaccacatcagggagcttcagatgtatcgtgtaggtaatggggagccactgaagatgtttgaggagcagaagagcatggtccaagatcagtttgagatgatcactctggctgcttcgtggggaatggattgcagaagtgagcctagaggcaaggaatcagaaaaggggacattcagttcaggggagttatgataaaggcctgaactgggacagggaaagtgggaaaggaaaggaggggacagatttgagggccattaaaatgtagaacgggggccgggtgcggtggctcacgcctataatcccagcactttgggaggccgaggtgggtgaggtcaggagttcaagaccagcctggccaacatggcgaaaccccgtttctactaaaaatacaaaaattagccggacgtggtggcgcatgcctgtaatcacagctactcgggaggctgagaagaatcacttgaaccctggagacagaagctggagtgagccgagatggcgtcactgcgctccagcctgggtgacagagcaagactctgtctcacaaaaaaaaaaaaaaagaaaaagaaaaaatgtggaacagacaaagtaggactcaggaaaaaataagatcgggaatgtgtgaatagggcaagtttggagagaa

SEQ ID NO: 82466 - DNA, 1029 bp, Homo sapiens
ctgtacccctagcaaggccacagctgctgtggggctgccctctcccgtggctgcagctactgtctccgtggtccaggaacaccactccctccccttcaggccccagggtggtgacagctcctggctgtggccagccctggtgcatagcacctcccttgttagttttccttataaagaatctctttgtacagtctcttcagtttggagagtaacatctctttccttcagggaccctgaccgggcccccgcctcgctggctcagcactgccaatgggacttgccatggggagtcactgtcatcttgtgtcatgttttgattaaaggagagggtcttccagtggaggagaggtcccagaatggagaccatgggacagtgaagctcttgaaactgaatgcccaacggtggattgtacgagctctttttttagagagaagatcatagctgtcattctatttgtgaaaactgtcccccaaaactgagccaaaaataaacattctaaacagtctcatgctaaataaagcaccagagaagccacatgtgtgagaagagatgccccaggcagggtcagcttggagtattctcattcattcatactcctctgtctgtcccaagttggtaaaggcattcttcagtggggagggactaaggcctagggcatggtggggtggggagaggcgggggacaggccttcagctccttccggtagcccccagagcagacagacagacagagaagacaggttatttctgcctgcaagcaaggccttcacaaaatcactttttcttggttctcggtcacacctccaggaaatgttaactgtcctagtatttgaatctaatttcttagaaatgccgccacctctggtttgtacctctgagagccaacagggagggccagcgcgtagctgcttctccagaccaggtggtcctgcaggagggagtagcagtggggctaccccggctcccccctcaatgtgatcttccccgctgccttcaactgcctttctgaaaaagagtatcttattaata

SEQ ID NO: 82467 - DNA, 1052 bp, Homo sapiens
ggcctcagcccattgtgaggtgaatgatgggatcctgttcagctgcctgcaggcaggtcagacaagggggtcaggtccctttctggcaggaagtagtgcctcaaatgttacccatatgccatgaacaagatggcagatgtggccaagcttggaagaattaactctgcagaggttaggtgacagatgtaccctgagccctgggtcagttcccgcttttctcccagtgcacttggcttctaaggacagcatcgcctgctccatcttgagcccagctgtcacaggttagcctgcctgttagatttcactgagagctgtgtccttgcacaatgcatcagccgctttgcttgtccaagacctggcctgcattagaacacggctgtgcaggggccctttccttcacgcatccctctctccctcgtgtgaattgcaacggtcctcagccatcgcttggttaatctgtccctgtgcagctgttctgagttgggggagatggattgattggctgctgaggactcctctaatgctctttaccattagcacagcagagctttgcatctgttggcatcagcaggactctctgcttaacggccagattaatagaatgaggaagccgaggaaggtttaaatccctggtgtcagcttcccggctcggcaggctgcccctggggaggcaccaaggaagccctgacttgcagtgatgaatgctcctctggtctccagatggtgactgccagcgaatcaggtgacctagaaatgaaaaaaaaataaaaaaggagttcagtgagtggctaggtggcattattcttatcctcattcttactaacatttaccatttgccaagaactgacttctctcattttatcctcaaatgccatggttacacaggtgtttgtgtgatacccgatttccacatgaggtacctaagggtcagagaggctaagtaacttgcccagggtcacacaggaagcagatagtgttgatgcacattagactcagggttgcatgacatcagaatcttatcttctcaactgctttcctattttgcaagaaaa

SEQ ID NO: 82468 - DNA, 1026 bp, Homo sapiens
tggagttgggggcgagggccggaggacaggggtgcagaagtgattaaactgctcctgttttgccatggggatgacaccgcttttcttttagtggcaggttaaggggatgaaaatctgaattggcgtatctttaaacaagttattacttcagctgtgagataatttgttgagaaaatgccattatttttccaatataggtccttcggactgtgcaaccggggcatgatgctggcagctgcggttgcatgtagatgctaaagcatcatggagcgggagaatgaacttcaggttaaagcctgtttattcttaaataaattgagttttctgttttccacagtgtaatgaggagggagcagggcttccctcctgctctcagtgctggaggcctggagttgtccacaccccttcccttgatgcttaggatccttccaacagcaccagaacctctggggactctcattctgcccagaaaggccagggagaacccaggtctttaccctttgtggggaggagcctcgaggatggccttgagcatctcagcctccgttgccatgcttcccagtgactttgaggatgtcatctgttatgggttgaattatgtcccctctcctgcccccagattcatatgttgaagtcccgatttccagtacattggaagttgaccttgtttggaaagacggtcattgcagatgtaatttgcaaagatgcagtcatactagaagcgggggggtccctaagctaatatgactggtgtccttataaaaagggggcattttaattagccaggtgtggcggcatgcacctgtaatcccagctactcaggaggctgaggcaggagaatcacctgaacctgggaggtagaggttgcaatgagccgagatcgagccactgcactccagcctgggtgacagagcaagactctgccaaaaacaaaacaaaacaaaacaaaacaaaaaaacagtgggggggggcggggacatttggacatagccatgcacacagggaggacactttgtgaaggcgaag

SEQ ID NO: 82469 - DNA, 1050 bp, Homo sapiens
tttatacccattgttttaaactgtgtacacttcgtctttttcatattcacttaatagtgctttgtaaacccttttttttttgtttttgtttttgagacaaggtctccgttgcccaggctggagtacagtggggcaatgacggctcactgcagccttgacctcaccggctcaagggacccttgtgcctcagtctcctggttggctgggactacaggtgtgcaccaccatgcctggctaactttttgtgtgtgtgtgtgtgtgttttttttttttgtagaaacagggctttgctatgttgtccaggctggtctccaactcctgggctcaagctattcacctgcctcagcctcccgaagtgttgggattacaggcgtgagccaccacgctcagcctagaaacacttttaaagcttttctgtcatctctctgctgatcctgctaattagcgcataattcaccactgcgttgatgcaccttatttaatgtcaccattgctcaattgttgaacatttagatttttgttgatattctaaataaataatgttgtaaatatctttgggcctatggcttttattttattttctaattatttctgtaataattttttaagcaggagctgactggccaagaaacattccataaatgtttagtgctcctaaatgttgtggaagttgatataataataataataataataataataaccatagccactaacccttcattgaacaactaggccaggcattatctgagtgcttagcatacattttaaaatttacccctcccagctccttgaggtggggatgatgttattcccattttacagatataggaacagagacaaagagaggttaaattacctgcccgggaacatagaaaaggatgttgaagaagccatccctttcctcaaaaaactcagttgcagaacactacacatagttacatcggtaagctcaaagttgccctggccagttcttgtgccatttccacaacttcagcttgcaaatgctaaatatgtgcccataagtatatctctctgtataaatttagg

SEQ ID NO: 82470 - DNA, 1050 bp, Homo sapiens
aaaataaatttctttctctccctctttgtgggccctccatctactggctgataaccacccacattggaaagggccatgtactttactgagttcaccagttcaaatgttaatctcgtccagaaacaccttcacagatgcacccagaagtcatgtttaatttgggcaccccgtggcccaatcaagttaacacacagaagtaaccatcctcgctgccacttttgtttgacatgaggccctacaacttaatgtagccatttctggaagatggtgattggaacaaaagaacttaagaattcgccatccttggaggtgagagcaacatacttgccgttgagttaacctgcggcagaattattttgggccagtgattttattgctgtcgcatttctcatcagcagttcaacaggtttcttggctgtctttctcttaccttactctgtttgtggcaaggaaagaaagaccatttttaatgatttcttgaattaagcagttagagacttaagcctgcttggacagagggggtttcaaagtgaatttcggattatctccagttaaggatggcgtttgatcctcacaacttgaaggtaattactttcaggggatgtatgttgctcctttccccctgcagaggtagagtgagaaatgctgcttttcaaagacgggtgcttcttaaagaaattgggctcccatcccctttaggtttgaggtccctgagtcttttgagcagttggggtttttaggccacaggtccctgtggaagcttcccaatggccctgcatcctcctgatccctatggggaggcatttcatccattgaccctgcaggtagctgattgagtctgaaatagcagcctcccagcccagcagggaccagagtaaaggaacatttgctgtaatttctttcctcctccctctctgaaagattgttaatcaggaaccttttggaaacaaaaaataaaaggaaagcaagaaaaaagagacctagtttggtgaacccagtggaaaactaccacacggccgaaagcttcccgaaacccctggcggcaagggg

SEQ ID NO: 82471 - DNA, 1048 bp, Homo sapiens
ctgaagaccagccagacaggggaggcgccctcttccaggtgctgggcctgccccgtccccgcagcccataggggaagtgtccacagctgcaggcctggcagacacccaatcttctcctaccctctccaggggctgctgttctccatgcccgtggaattgctgagatcctgcagacagcagtgagaagctggctactgtcgtcagagcctttccccaggatggggctgcagatttggccccagccctcctttggcctgctcagctggcctggggcagcaggagagagtggaagagaggcatgaacttgctttcatcagagggagcccagggcatgctctgtgggttcagaggaacttccttgggcgtgtgggtgagaccaggcatggcatgacacttatatgccacttccttctccaccaaaacgtccctctttgtctcagttggtggaatgaagtgcaatgcagtagagaagcacggggacttggcgccaaggtgccggagttcgcagcctggctctgccacccagcagctgtgtgactgaagtctttgtgcctcagctccttcatctgtaaaatggggatgatgatgaacccacttcaaagggttgtcaggagaaataaatgagttaatacatgcacctcatttagcacagtgtctgggcctgtattaagcaccataacatgctgctgctgctgcttcctcctcctcttcctcttcctctgccctcctcctcctccaccctcctccccttccccctcttcctcctcccccctcttcctcctcccccctccacctcccctcaccctcatcttccattattattattactgttgattcttgtaggaggaggaggaattggatgagggagatttgcctggtcaactctgcctcttcctctccctccttcctctggagctgtgtggggactagattgtgttgctggctgtgtggcctgcggtcagtcacatagcttctctgtatgcattttcccacctaaaatgaatacagcaattgtaataatgataataatgataatatgcttcatttt

SEQ ID NO: 82472 - DNA, 1017 bp, Homo sapiens
ccaacaaccttcccagagtccctctgcagttattatcactccacctccaatgaaagaacatttgtcctttgcatgcaacggctttttcgattccccacctgcccctgcagaatgatgatgtccccaactcggaacttctctccctcatctccatgtcaaaacttacctgtctttggtcctgtcctaaggtgtttgattttgagggtggtggtgtcttacactcccctcagcttggtaacactgatctagagagatggcagatgggggctgcctgacctggcagcagtgtctgtctgtgatggcgggctgtgctgtgctggaatgtcttagtctgtttacgacgcaagacaaagtgatctcgactttcaggagtcaggatacctggattccagaacctgttctgtgtcttgcttggtgtggctttgggctgcctgcctttcaggttctctgtttccccgtctttaaaatggtctgagggattctgggtcccttgtgctctgaacttttaggtctcttgtggttacctgtgccctgattgcacatgtctcttcttccagccgtgtgtgtgacccacgtgtcctttcccacttccatgtgtacgtggctgttttggtgtgattgtctgcagaaaagagtcctttcctcccagtacctcccacttctacctaacaataaactctagaatccttctcacctttttttttttgtttgtttgtttgtttgtttgttttgagacggagtctcgctctgttgcccagattggagtgcagtggcgcaatctcagctcactgcaacctctgcctcctgggttcaagcgattctcctgcctcagcctcctgagtagctgggattacaggcgcctgccaccatgcctggctaatttttgtatttttagtagaggtggggtttcaccatgttggccaggctggtcttgaactcctgacctcaagtgatctgcctgcctccacctcccaaagtgctggattacaggtgtgagccaccactcccggtccttct

SEQ ID NO: 82473 - DNA, 2018 bp, Homo sapiens
cagggcaaggagtaagtagtatgattcagagccctgggagccctgaggtctctgccatcccagaactgtccatgaggcctgggctgctctgctcatggggcccaagctcttcttcttgtagctcatgaaacaaccctggaaatgatccaggggagcagatgggcagatgctgtggggcctgggaggcaggtcgtgtgatgttgaggaagaagacagtggtctgacatcatcggtggtatggcactttgcctctctggagctcagtctccttgtctgaagcacaggggccatgatggcacctacctggcagggcttgatggtgaggcacagctctgggtcatggtcagtgctctgctctgccacctgatgcagccacatcgtaggagatgtttgctagagccaggaggactttcaaatccatggcccgtgggtgggtttgattttgtccacacggtgtgttagaataaataggccctggaatttaaagattaggatatgccgtgagacagcgtagatttttggaattcttttaaaagtcataagatccggcaatacagggtccacggtgcttgcttggtgttaaacagccaagctgaggaatggtgatactgcagacccactgggtccctaagagtccccctaagatctctcctgtcacctgtggcacctggctggcccctcttggctgttgagtttgcagcccatttggaagacctccgtgttcactatgaagacataaaaatgagcatctgtggttaccctattcccatgtggcttattcactgcacttatttgcctctcactgcctgtgccttgccctggcatgatggagtctccctccccgcctagctggtggtggagacccagaatatgcaaattcttataagcatgaggccatcctgaaggcaaatgtccccgacagaaatagaatcatgcattccgcaatttgataaacctgtttcccctctgcagggagtgtgagtgacagcctcctttgagtcatctgcccctcactctgtgtttcccgtgaccttgtcccccaataacacgcattgggaagttgggagtctttagagacaagggggaggtggaaaagtagaacattcctgagcaccttggcttggtcccagcgctgtcagggacggaccgtgactttcatctctgtgtctttttggcacttcatcagatgatgctaataagcctgcctccctccctgggttgtgaggattaaatttgataaacagatgagaaagtgctttgaagctcagaaagccccatgtgaatggaagacggggctcatgtcttcaagcagcacaatgtgggagtgttcagacggggttgtctgcgttccttcctcacagcgtcttgtaacccgtgggggacagggagagaatgaatgagtgaaatccactggaaatttcccacctactcatccattcattcatcagatactggttggggtctgctgtgtgccaggccttatgcacagcagggggaaagacagatgtgaccctgccctcatgctctttatggtttgggggcaggatgacctcccaataaaaacaaacaagaacattgcaaaaaatcagattgttacaaatgcagcgaaggaaaccattagggagctgaacgaaaagaaagagctgtggataagcatttgttttggatgggtggatttattttacttattcaggggtaaggatttattttggatcatgccttttgccatagtagtcctaaacgagccccaggaatccaaaatatggtatagacaccaatcgtgatgcaccagtggttggaggtgctacaagggcagatattctgtaaaaactctttataaaaagttactattcgtatctgtacaacatttattcacttcttaaatttatttgttaatttattgagacagggactccttacgtcaccccggctagaatgcagtggtttgatctcagctcactgcaaccttgacctcgcaggctcaagcagtcctcccacctcagccccctgagtaggtg

SEQ ID NO: 82474 - DNA, 1108 bp, Homo sapiens
attactcagataactcaggactcttttagacatcagcagtgactttgaaagatcggttcactggctttagatcacctctgcttctaacagccttggaggtatagcttttcttcctatccagatgttctgagaccacagaaaacagggtatgttattgatggttcgttttttttttcacactttcaatggagttttgttttgtttgagcgacgcattacactttgtatacagaaatatgcatcattgaataatatttatcttactgcaaatgttgccatctgtttatcatggaaagtgttaaaatagataaataaaagtagaaataatatacgtaggtatagatatgtttgtaatatgaattctaatatatctatgtattcactttccttccggtcttttcatactttagacgttctcttcagtttatcaattcattttttaaaaatcttccagaagggtgggtggtcaaaggcttgctatttttcacctaggaagccagccatggcgtaagttcttatttactggtgactgttcaagtttgattcatggttttaatagaagaggaaatttggtggcttgagttaaagcagagatttgacatcatcgcgtcattgtgtatgtgtgtgtgtatcctcagaaagcaaagatatccttaggcatatctctgacataagagtctgccccccacaccccgctccagagctgtttatgatccataaggtcataaatccatctatatgagtgtttcagtgcagaagaacttaacacacacacctgttggactgcacaggtgaggttgagagtctctatcttttgaccagtgctaccttaagagctgccacttatgatctctctctttccttttcctttgcatttccccatttctgcggacccagatccccatctaccagaaacaaagagaaaatgccttggggaaaataaaaaataactaaaaaacaaactcgatcttaacaaaacctgcattctaaggaaggggtgtgggaacaggagaaaacgtcccaacaagtatgtgcgaggccccggcaccaatgaaagaggcctctgttgagtaccctcaggcctgacatacctgggttcacctcctggc

SEQ ID NO: 82475 - DNA, 1012 bp, Homo sapiens
cttggtgactcgctccctgcctgagtgagtggatctccccggatcctcagccgctgttcctgggcggttgtcgcagcagcatctctctggtttttgccgagctgggtgcagacagttgagccctctgttcgtcctggcctgcgatgagggctgagctgggcgtcccaagtccccgaccatgcccctgaatcaatactcagtccggggtgtctggtcttactttgggtcttctgtttctcttctctggatgtttgagccttccgtcttcaccttctctgtctctaaccttgccgtctcccatgccctctgtgactttatctcctccccatctccagtttcagggcatggctccttctcctagctggttgtctctgtctttctgtcttgttgcggccggttcaggtcaccagctgtgtgtccgaccacaccgtcagggcttccactcctatgggattactttgcccttcgtgggtgtgaacagtcagggctctgaaactgttttttccgcagatctggggccatctgggtggctgggtggggaactgacttgtcttcctaccctgtccctaacttctccagggatacctttcccaccttctctgggctgccttgcccagcctactgagctaggagcaggagcacatggggcaggaggccggagtccccatttcagagccaaggtctcagttctccaggggcgtgagttctgccttagggcatagccaatgtgttgtgtgtctgtctgtttcttcatcacactacttgtctgcaaggatttgcctagccgttaaaggatattagacaccagggggatggtttcaggatcctgaagactgaatgcatatttctatcatttgtcactttggaagtcctcactgaagactgccttagtacacagcgtgatgctttctgagctgctaaacttcttcggagtctgtgcgaccctttctgccggagtgcagctcttcatgcctgagaactgagccagtcccaagacgtgatgtgatggcat

SEQ ID NO: 82476 - DNA, 1043 bp, Homo sapiens
tggtctcaaactcctgacctcaggtgatccgcctgcctccacctcccatagtgctgggattacaggtgtacgctgtgcacccagccgctgttagcgtttatgtcagggatggccttttacagggatgccgaattggaaggacgcactctctaagccttgtggcatcttgctgtccctgtgggtgaattgaagtcagcttctcccagagagagcgtgcatctgcttccgacacttacctaggaggattcctattatttaagttctgagatttttttggaccgccacggtggtgtgaatttagagtcctaacgggtgtgtgcccagctcccgcgattcagattctcaggggagagtcatttctcttccacccgccctgtgcctgaggttgagatgtgcttccttccttcctgtccttctcttcatgatggacttctttctcctctacctttgcggtgacggggaggcccttccatcccagctgtatgtgtgggcttcttgttagagatggggatcttgggtagttttttctttatcgatggtttgcaaaataatggtgaatctttttttatttttatttttatttatttatttttttgagacagagtctcgctctgtggcctaagctggagtgcagtagcgcagtctctctcaccacaacctccacctcctgggttcgagcaattctcctgcctcagcctccccagtagctgggattacaggcgtgtgccacctgacccagctaatttttatatttttatttttatgtacatttactttttttttttttttttttttttttttttaagatggagtctccctctgtcgcccaggctggagtgcagtggcgcgattgcagcttactgcaacctccgcctcctgggttcaagtgattctcctgcctcagcctcaggagtagctgggattacaagcatgtgccatgacgcccagctaatttttgtatttttagtagagacagggtttcaccatgttggccaggctggtctcaaactcctgacctcaagtggtctgcctgcctcagcctc

SEQ ID NO: 82477 - DNA, 1042 bp, Homo sapiens
acccacccatccatctacccatccatccatccatccatccatccatccatccacgcattcatccaaccacccatctatccatccacccacccatccgtccatgggttcattcatccatccatctaccaatccactcatccatccaataaatatttttgagcacctgtgctaaatgcatatacacacacacatatctatgcacacacatacatacacactgatatatatcacacacatgcatacacacacacggagaataacaggtaccgccttttgctgagtgtcaaggttgcttttatctctccagctggtactacagatttctgcacctgtctgtagcatccattactagcatcccattcccaatattattattcactcctttacttccgaatataaagcagatgtcatctggggccctttttgccccttctgatttcaataaaattttccccaacgtcctgtcttcctcctcctcctctatcccattcctgaggcatctcaagtcttcccttggatttctgtcaactcctgacttttctgcctctagagctttggctcctagtaggatatttctgacctgcagcatatcatattctttgtttttaaaatttattattgttggccaggtgcagtggctcatgcctgtaatcccatcactttgggagaccgaggcaggtggatcacctgaggtcaggagtttgagattaacctggccaacatggtgaaatcccgtttctactgaaaatacaaaaattagctggatgtggtggcatgctcctgtaatcccagctactcgggaggctgaggcaggagaattgcttgaacccaggagatggaggttgcagtgagtggagatctcgccactactccagcgtggatgacagagcaagactccatctcaaaacaaacaaacaaacaaacaaaaaccaaaaaaaaaacaaaacaaaacaagaaaaggcagctcagagaggttaagtgtctagcttgaggccatacagctaactggatcagaactgagatttgaacccatatatgtctg

SEQ ID NO: 82478 - DNA, 1383 bp, Homo sapiens
gttctgcccatcgcgacctcccaaagtgctgggattacaggcatgagccaccatgcctggccctcctgtatacattagattatctctagattactcataaaaatgaatacaatgtaaatgccgtgtaagtagttgctatactgcattgtttagggaatcatgacaagaaaaggagtctgtatgtgtttagtacagatggtttttgttgtcgattaaaaatatatatatattttatagagacggggccttgctatgttgctcaggctggtcttgatcttctggcctcaagtgatcctcctgcctcagcctgccaaagtgctgggattacaggcatgagccactgtgcccagccttcctgaatatttttttaattctcggttggttgaatccatagatgcggaactcacagaggcagagggccaactgtagccttcctacagatatttttatcttgttaaagtaataaccctaacctgacccacacctcacaggtctgttgtgaagtgacataagccagcacataagtggaaaagcttggtgaatgatttaaaggaatcttctggcctggtgcgggggctcacgcctgtaatcccagcactttgggaggccggagtgggtggatcacctgaggtcaggagtttcggaccagcctggtcaacgtggtgaaaccccgtctctactaaaaaaaatacaaaaatcagccgggcatggtgacgggcgcctgtaatcccagctactcgggaggctgaggcagaagaatcgcttgaacccaggaggcggaggttgcagtgagccaagatcgtgccactgcactctagcctggggcacaagagtgaaactccgtcttaaaaaataaaaaaaggaatcttctggcctgtgtttcagttgaacaaagtgaggtctagagaggggagaagtgagcagttccaggtcgcacgggcggtcaggggtgaaaggggagtggggacgtgaactccaggcgggtgctctttcgcgcctcctggtcgctccctccccttccctccccttccctccccttccctccccttccctcctcttccctcctcttccctcccccgctctccctgatgtgcctgccttccctacctaacagctctgagttctgcctacctgaattagcccaatgttttcaccctttgaaagaagattctaagccgaaaccagcccccagttccccgtgggctttgcccactccttgccaagcactctgagtgctaccctttctctttctgaatagggtgagatacttgacgctgccctgaatcgaagtcaaataggggctcctctctgcagtaccacagagctccctgtaggtggcagggtaggactgcaaatgtcctggaatattggtccctgagcgca

SEQ ID NO: 82479 - DNA, 1076 bp, Homo sapiens
tatttttagtagagatggggtttatccatgctggtcaggctggtctcgaactcctgacctcaggtgatccgcccacctcggcctcccaaagtgctgggattataggcgtgagccactgtgcccggctcataatttttatttataacaaaaagtaaagtgaacctcctgtagacagagtatagttggatcttgttttttcaaccgattcacctactctatgtcttctaattggggaatttaattcatttatacttaaagtaattattgatagataattgatagataatttatttactatctattattgatagataaattatttacttagtagaagtataactttgagcctgttatttaccttttctaaatgagttttcatttctgtgaaatgggcacaattaaagaggccgcctcctgggactggggtcaggattagttgagatagtctgtgtaaggctaggatggtgcttgacagccagtgttaattattattttttgatcctgtgggatagggcaacccagatactccggtgggaaacacttgcaaccagagaaccttgactcaaaatcttggtcttacttggtttgaaggatcccattgcatttgcattgctgccccttctgagaggttattcacactgataaaccccattttgcaacttacacgtgcaggattcagctaattggacagcagtggacactgaacctaaggtgaaaaatccaacaaatagagaggaccaactgaaaaattcagttgctttcttttgaagaatctgaatacgagacacagagaaaggattagtagtcagtattgagggcagaaacagaaacacagagaaggaaagttataagaggacgctttgagtcagcagaagctatgggtgaataggagccatgaattgacaggaattatgagtcagcagaaacttgagtcgtggcaagagccacaagtcagcagaaactatgagatagagagtagcatggagatagcagaggaataggccaagacccggagatgctgcgtcaccatcttggtggagcctagagggcagagctaggatggtcccctgaattac

SEQ ID NO: 82480 - DNA, 1609 bp, Homo sapiens
gatcacttattcatgacattgactggtcatgagccactcctccgccagcccttggaggatccaagtgattcacaaatggacacaaggaatatgattagtcctctgtgagtgattctgaggggccgtggtatagagagagagaggggaaggaggatgggaaaatgcgggcagttccctccccaacccattctgacagtttgctggttagagaaaaatccccatgtcagagaatttttttctttgtttatttcctgtgaaatagaatgtgggtctggcattggggaggactctaataattcatattttctgcttatttggctcctggctgaacaggaatttacattacttaatgtctgggtttttcctggggaatcaaaataagttttctattcaattattaagcaaatttcacagccaaataatcctcttatttttacaagtggtattttccctggcagagggttttctggcttctctgggtagttgatccgtctcctctcttctgtttcctctgtccttgtctggctatgaaggaagctaaagcccctcattcatggattaggggcttctcaatggcagttggcagactttggctttgcaagctagagatgaatctttttcttctttctttttttttttttttcgagatggagtctcgctctgttgcgcaggctggtgtgcagtggtgcgatctccactcactacaacctctgccttccaggttcaagctattctcctgcctcagccttccaagaagctgggactacagacatgcaccaccacacctaatttaaaaaatattttagtaaatggctaatttaaaaaatatttttagtaaatgggaggttttaccatgtcggccaggctggtctcgaactcgtgacctcaggtgatctgcctgccttggcctcccaaagtgctgggattacaggtgtgagccactgtgcctggcctagagataaatcttaatgtccgccagccatggggtaagagtccactccctctttctgctcttcagtctattgactttgggcacaggcacagctgcagctctagtaggggttgggcctggagtcagtggagacaaaatgtgaaggtaacaggacagtgcacagggcccagtgtgctctgcctgggctgctcagggaagaaaaatcacacacacacaaataacaaccctttttttgtcagaagtacagtgaaagatctctacgtcttggccagcatttgttatctttttgcttctttgaaaatagccatcctgggccagatgcagtggctcacgcctgtaatcccagcactttgggaggctgaggcgggtggatcacctgaggttaggagtttgagagcagcctggtgaacatgatgaaacctcttctctactaaaaatacaaaaattagctgggcgtggtggcacgcgcccataatcccagctactcgggaggctgaggaacaagaatagcttgaaccctggaggtagaggttgcagtgagctgagattgtgccattgcactccagtctgggtgacagagtgagactctgtctcaaaaaataaataaataaataaattaaaaataaataaataaataaaggaaacggagtcattgtg

SEQ ID NO: 82481 - DNA, 1051 bp, Homo sapiens
tgatggcagcccttggcgagcttttacttgggaggatcattgttgccatgtcccagtagccacgagatgagataattgcaggccctttgctctttctgccttccatcattctgtcagatttgtttggaaaaatttgtctggggctgtaggacattgtttcttggaaatatgtaacggtacttcattggtgggagcagcgttcttagttcagtgcctggacagcgtgttccttagatattctaataatttgtagagcttcaggatttgagaccctatgattttatttcagccttattatgtaagaaagggttggctgtagtctctcttgtcgagacttgatctctaggctatgtaaaatctgatcatcctggacagctctccagccaacagggagcacgccagtggcctgacactgccatgtattgccttgttccatctctttgcatgcctttgctttttctcctaggcaggcgtagtcttacttaggtgtattttttgaaaagtatgtcaagcattgtgcacagaataagtacccatctgaatgctgggttggttggtttggaggactgtttatttatgaatgtcatcttgtgttactcagtttttctgttattggtaaagtgaagaatgtttttgttgttgttgttattttatagtgtggggtgatcagccccagatttgacgtgcaactcaaagacctggaaaaatggcagaataatctgcttccatcccgccagtttgggtaagttggcctttccttaattaaaagaagttaatgctaagaatttctgtggtgcagtttgacttaagggtttttttctttttttctgtttaaaacaaagcagtggtaatttgtctactcttaaccattttgacctaatagctcaagtgttatccatatttcttttctctctctttaaaaagagacagggttggccaggcacagtggctcacgcctgtgatcctagcattttgggaggctgaggcaggcggatcacctgaggttgggagttcgagaccaccctgaccaacatggagaaccccgtgtcta

SEQ ID NO: 82482 - DNA, 2726 bp, Homo sapiens
gccgcagcgtctggatctccctttagtgctgaggcagcgccttggccccgggcggcgggcaacatcggggctggtgggccgtgcagcttctcactgctgcggccgcgctgggagcttgggaggctgaggccacccagcaggtaaaagctgcatcgtgccggggttggcagtttgctgggtgccaacttggatcttctgggccgcagagtttttctttagacacttttgaacttaaggaatttaagttctactctttactattggcactttggtctttcaaaacttcagtgtagtgtgcggttcttgcccattagaagagagtccagtctgacaagcatgtaaaatgtttctgtttgccactgtggctcttgctgttggacgcaattttaaatggcacgaagatggatgtttaatagttagatgtgttcattgtaggtgagagtgaactgatttaaagtacaatgttaatagtatggaatctgctgattttcagcaatttggaaaatgttgccgatgatactctgcttctgttctgaatcactgatcgactatacccgatgttttccttccggtagctggcagtttctgccagttctcacgttgtcttgtgtcaagtggattttgtcccacattttattatctccagacgttggtgtgtggcacgattcgaagaagagtggttagtgaatgaatgagtttcaaaatgtgcaggctgacgtcccgataacctgttttcaacaaccgtagtaaataggaattttcctgggtggtgggaaatggagaagcagcctgcttagacttgagaaaacttcgccaaggtggggccagaaaggaaaggatacttccgcagtgtaatggttggtgtctgttgatgttggcaatgccagtaaaacctcctgttttgtcttccttgaacagccacaatggtgcgcatgaatgtcctggcagatgctctcaagagtatcaacaatgccgaaaagagaggcaaacgccaggtgcttattaggccgtgctccaaagtcatcgtccggtttctcactgtgatgatgaagcatggtaagtctgctgccgctgtgttttatgttttcatgtgagactctctaagaaatcagtcctgtagaaattaattatgggggaccaaagtatgtctgtcatacctgagaacgaatgcaattgacctgtgggctgtggaggaggggatagtctgaaactgctgaagagtcacttagagtaggactgctggaaaaaggagctctgctaggtgtttgggagctaaatgaatctaagtcattgaaaggactcctgagctcatttcgagaccagcctggccaacatggcaaaaccccgtctctactaaaaaaacaaaaaacaaaaacaaaaatcagccggtcgtggtggcaggcgcctgtagtcccagctctttggaggctgaggcagggagaattgtttgaacccagcaggtggaggttgcagtgagccgagatcggccactgcactccagcctgggcgacagtgcaagactccatctcaaaaaaaaaaaaaagaaagaaaggactcttgagatcttctcagagctctttgagaggaaagattggattattgcacttctttggcacaaagtagtctttgggaatgggaagcagtgaaggaagggtcaaggggaaaatagtttctttcagaattgcaaggtggattgttttgggtattgtctcccaattcttatatgttaggttgtaaaaattagttctgatacagagcaactgtcttccccccaactttttggagaagcagtcactgaggtgatgggagagtgaagaattgagtaggctagagcacagaggtttagctctcaagttgatgtcttttatttaatccagtcagttatcttttgtaggttacattggcgaatttgaaatcattgatgaccacagagctgggaaaattgttgtgaacctcacaggcaggctaaacaaggtaagaacgagtgatctacacatttcaaagctttaagaattttttactgtggcgttaaatgttgtaattgcctttggaaatactgagtagtggtgccatacttgatttatccagttactttaaaaaggtttaaaaattgacacatggaacttcatttgctctcctgggttgattgtgctaggattatgtcagttgacctagtgtttttatggggtataagctgtctcaggagagatggggggtgaaaccaacgctggtactggtatttggatgttaacgctacccacctcactggcttgaacttgggtggctcaaggccattgagccttttgtccaaggtgctgtgtccttcctctcagtgatgtgttgggttttttgaatggaatctttatctttgagtaaatggggctttctaaatagcaatatgaatactttttctgtttttgctggcataggtctttggggtctatgctgcttttcagtttgacttgtcaacaccttaaccaagtaaaactgactttgtggtttaagtgattgcgtgtgttttgggggcaggtgtcttaagctggttgaggtgtccactgtgcttcctgtcaggtttgtagctttcagatttgcaaggaggcagatcctctagttcaggcttgtccaacctgccttattttgttgtattgttttagacttgtagcagcctgaaaccatggtacttagtttctgtctctagtgataaatggaaaagagggatgaggaag

SEQ ID NO: 82483 - DNA, 2544 bp, Homo sapiens
gtggcggcaggcacctgtaatcccagctactctacttggtagggtgaggcaggagaatcgcttgaacctgggaggtggaggttgcagtgaaccgagattgtgccattgcactccagcctgggcaaaaagagtgagacttgtcgctgggtgtggtggctcacgcccgtaatcccagcactctgggaggctgaagcaggcggatcacctgagattgggagttcgagaccagcctgactaacatggagaaaccccatctctactaaaaatacaaaattagtcaggcgtagtggcgcatgcctgtaatcccagctacttgggtagctgaggcaggagaatcgcttgaacctgggaggcggaggttgcggtgagccaagattgcgccattgcactccagcctgggcaacaaaagtgaaactttgtctcaaaaaaaaaaaaaaaaagtaataacctttagcaggttaattgctgcctccttaatgttgggtttttttttattttaagtgacttccttactattgcttcctggactaaaccaacatggaatcattttgaagtacattggaatggccaagagggagataaacaaacttctcaaacaaaaagaaaagaaaaacgaatgattcatctgctttaatcagtgtgattaatgcagcacccattgccccgggaaccgtttctgctgtactatctggatactaaaatgttacggaagtagctctttgttctccctcactctgcccttagttaatagaaattcagactcgccaagtaaggcttcgtgcatagtgtcttcatgtcgcgtatagttgagcgcgttcttagcagttggcttcatggacaactcattagtgttttgacttttcttacccagcgttaattgaattcttgcttttagacaacttcctttttgtagtggtgaaccttgccctttagtacagttcaagtgaatctggataattgttcatctttgctttagcttagataccatgtagtggtctgtggctacaggaagctggttctgtctgcttccacagtctgcttaaaaaactgtctgacttcgtgaatatagagaccaagtttaccacttctgatgaagagaccaattaagattcattcctcattctgtttctttccagtgggagaagagtccccatgaaataagatgaaactgattccatgcactagtacatgtaggcttctcccttgtgcaaagcttagcaatttgtaggaaactttgatctttttgtccaagaaaaggaatgtctgacaggcttaagctttcgtccccttgcacttagactcgaagttagtaaatccttaaaggctttttaatagcagacttccaaaagattgcatttaggatttctagcatgcttttaatttcagattttcagctgacattagctatagtatacagtaggttaagactcatgtctatgactttcactctaagactggcaaaaggacagcagtcttctatgtttagtcaatattcatttcagtagaagataatcttatctaatttttgagaccagaataagccttttaaggtaaacctcaaaattatcattttatggtaatactgaccattttagtcccctaggtttgacatgggagatagtgactacactggtgtctgacttttttcctagagatttctccctgaaaaatacaagggctgttggtgagagcagacttgaggtgatgatagttggcctctggtctacaaagatttcataactccttggaaagcttcttataatcattcttaacttcttggtagctagaaatttagagtagttgaaatctttaggaatgaacttctgagggccaaaaaatgtgactgacgggaacaattcttaaactgattaactagctgtaatatagttttgtgaatttattgcactgatgttgtaccttgtggtatatctgtccctattaaataagtgttgttttctcctctttaatattgctgtgaacagtggtgcccattgtagcatatgtttgatttttttttattatttcataagaaaactacgttaattttaccttactttcattgtaaataagcctgtcttcctatctggattttttgtgtgcatacatattctactgattaactacttttgcagttttaatcctgtattatttcttctactttgttttgtgtaaaaggggaaaaaataaaaaaagctggaatcttcatgtctcactttctttataacttagccaatataatatttatgattggatttatgaatctgattaatgaagtaccctgtgtggtccttagatgtctataaggtaccctacctgtaatcccaccactttgggagacctgggcaggaggttcactggagtccatgagtttgaggttgcattgagctgagtgtacccctgcactctagcctgggcaacagagcaggaccctgtctaggaaaaattttaaaaaagaacaaaaataaaaggtttaagttttatttagcaaatatccaggtaccatgctagagggaagaggaaatgcaacgaatgagcaggggcatt

SEQ ID NO: 82484 - DNA, 1942 bp, Homo sapiens
gcccagttgggggtgttatgtgttaaatgccagtagttagtatcttactaaggagtgttcaaatacagttgttcggtgggattctggtaggtatagtgcagcatttactaggatctaaagaatatttaggaatagcaaaatcaaatttatactgatttctttatggcccatagaagtcatgagtcttttactaccattaaataaatgtggcttcagagccagagatgatcctttctttatcacacgcacacacacacacactctctctctcacacacatagtttatgtaaatacttactcctgtgctataaaaggtgtcttaatggtggaaggattttttcacctacataagataatggtgaaacattgtttttatttttattttctttagaagatagctcttaaattgaacagggtgtcatgtttttgtctactgtaacgatttgtttatagcaaaaggcaaatttcttttctaggaccactgaacaacagcaaagattccatgaaatttgcagcaatctagtaaaaactcgacgcagagctgtgggttggtggaaacgcctcttcacactaaaggaagaaaaacctaagatggtactttttttgctttgacttaagtacagtaaaattttaagatttgagtcaattcgcctttttgtcttaatagctataatttgaaaattattcattggttaattcctaagtacattcataaatgtttacctgtattaattagactgaatcattttaaagttaaaaattacatttttgcatttaattttttattctaataaaacaaaattcttctgtttcatttttcttactgaaataatagtaaaagacatatacttagaaagcatctgtttaggccgggcacagtggctaatgcctataatcccagctacatggaaggctgaggatcacttgagccctggaggtcgaggctgcagtgagctgtgtttgcgcagtgagctgtttgcaccactgcactccagcctttgtgacagaatgagactctgtctcaaaaaaaaaaaaaaaaaaggaaagcatctgttcatctgttctcttatctgtaagcttcacgtcgtgaggctgttccgtgaagttattaactgaaaagatcgtataatttatatcataaaatatttacatacagaattgcagtaattctaggaagaaatgtatccaaattctataaagtagatccaatggaataggtttttaaatctaagaatttttaaagaaaagtgataataaaagctaaattatttcccgaactttgaaacacattcttctttaattgacaaataaaaattacatatatttatggtgtcacatgaagttttgatattaaattcttgttttcattgctagtacttcatgaccatgatcgtttcccttgctgcggttgcttgggtgggacaacaagtccacaacctgcttctcacctacctgataggtaagtctttgaggaaaaactacaggcacatcctggccagtgaaatttaactgtaacttcgtcagtaaacagctgaatacttcctaagttttagacaccgaaaaggaactgtgggaatatggaaagattattatggtctcatagaaagtgaaaacaatgcaataaccaaggtagaaagtaatgtgcaagaggtaaaaataagcaatgattattttctgaggtggaagaggggatgagagcagaagtttctggggatacatcccagtggaagtaattgatttcatgttgcttcctcccattactgagtttaataatgtaggaacctgccttctttaaaatgtaataactggctggtcacggtggctcagcctgtaatcccagcactttgggaggctgaggcaggtggatcacttgaggccgggagtttgagaccagcctagccaacatggcgaaaccctgtctctactaaaaatacaaaaatta

SEQ ID NO: 82485 - DNA, 2022 bp, Homo sapiens
aagtgaccattaaaggatatttaggctgggcctggtggctcacacctgtaatcccagcactttgggaagacgaggtgagtggatcacttgaggtccagagtttgagaccagcctggccaacatggtgaaaccctgtctctacaaaaaattagtcgggcgtggtggcgggcgcctatagtcccaactactcaggagtatgaggtaggagaatcgcttgaacccaggaggcggaggctgcagtgagccgagatctccccactgcactccagcctgggtgacagagcgagactccgtctcaaaaaaaaaaacacaaaaaacaaaaaaacccattgtattttcatctttgaaattgcagtttttcagaaaccaactagtttaaaattggcaatttggttaagaggttattttttgtatttggagctttaaaataattgaagtctatgaaccacaaaaatgttgagagtggtaaaatgatcactttaaatgtcggtggtatttaggctgcagagactgcaagtctggaagaacagctgcaaggatggggagaagtgatgctgatggctgataaagtcctccgatgggaaagagcctggtttccacctgccatcatgggtgtggtttctttggtgtttctgtaagtgagctattagattactatgggttgtgcttcttattaataaagactttttaatatatagcttctgtttgtgggagtgccttaagtcttctgtaatatataacccataaagaacccataaagaatgtttctcataagcacttctagtttccagaatttgtagtacttctgtaaacttggtaacctaaagcacttgagtaaatcagtgactcgcaaactttttgtcctccagacacttaaactctttttttgttattatactttaagttctgggaaacatgtgtagaatgtacaggtttgttacataggtatatatacatgtgccatggtggtttgctgcacccatcaacccttcatctacattaggtatttctcctaatgctatccctcccctagtcccccacctccctaaactcttaaaaaagtgctgagaactccaaagagcttttgtccattgatatatacttaaccactgcagctatgatatcagcatgtcacaaagcctctggaaagccacttgtgagaaaattagaagaaaaatggcaaatatctctgagaggcggtgaatagttaagtgaatagttaagttagacatgtttagttaggaataataatgactatgtttttctaacctttattaatttttttaacaggattatctactatctagatccatctgttctgtccggcgtttcctgttttgttatgtttttgtgcttggctgactaccttgttcccattctagcgcctagaatttttggctccaataaatggtaggtagcataatgatttggcagtctcatttttgtgtagttactgaacttggtggctgtgattagtatgctgtaaataagcagagataattgtctaaccatcagacacctaagcattagatttattgcttttatgtgaagaatattgtaactgatttgaatataaactatgaattttctgtactccatagttcttttatggtaaatgcacatatacatttttacatttccattgatatttaggatagtataataacttcacaaattatttttgaatgaatacagaaaaggaaactggcagattttcattcacattcatttagcaattatttattaaatgcctactgtggcaggccctgtaaagtactgtgaaatattttgacttttaagattgatcttgtgttaaggctgagatactgagacactgaggcagtggaatggcagttaacaaagtgaataccaagtgtttccgaagaggttcaagctgtatacacatgggttgctgattttatttataccattctcttttttttttttttttttgagatggaggctcgctctgttgcccaggctggagtgcagtacgctcttggctcactgcatgctccacct

SEQ ID NO: 82486 - DNA, 2055 bp, Homo sapiens
tccccgccctccgcctgaggcaacggagcatctctcttcgagtagcccattttccagagagtctcctcggctgcgaaagccagacgaagagggacccaaagccaccgcagcggcaagagccggagaaccactgagggacagcgccccctgcagaggcggttgaaccgcttcccacagcgctgggcggggcgtcgcgcagtccctgggcgctgattgggcactccgtgtcccctccccctcggcccggcgctgcctctgtctcctttgacctcgatttcaagccatgcgctgagcttcggttggcccggcttccttgaggcgtaagctcggtctgtccaatgaggagcgagcgtcgcgggggccgtcgggaagggcggccgacccatataagcagcctgcggggcgttccctcgggttgtggttggtgtgcgggtttcggttggaggactcgttggggaggtggcctgcgcttgtagagactgcatccccgagacgatggcggagggagataatcgcagcaccaacctgctggtgagtcctggctgcctgtcccccgggagccgagcgaggcctccagacgtccgtgggctcaaacaccgcggcctcgtccctgtcacccgccgcgggcccggcccttctctccctgggcaggcgacgatgcctggccctcgggcttcttgggtgactcctgggtgtcgaacccttacctttcctggggacggtgcgcgacggggcgaggagggcgcgtgattcatcaccgcgagtaggagtcgaggaggaagtgggaggcagaggggctgcgacactagcctggggtgcgggtgggggcagaaggcctcctggggcctgtccagcgctttcgcggctcaggccccagccgtattcggctttccccgtctttgatcttaacctggatgtgcctgccttcttttccccctaaaacttggacaagggtggagggtcaaagggctactgcccagaatttatcttagagctggtacaacttaaaacgacagggaggctgcgagctcaccgtggggaaccgggagcggggtccagctgaacagacaatgggatgtcttggcgtttgtctggaatttggaagtctggcgggggtggggtcacaggactactggaaacagctttagagtaataagcagggatccgaaggaactgcagtgagatggtatcataggcggacacatttttatttgttatgaatttaagcgcaccttgtgggcaaaaaacaagagaaatatccttgcatattctcagttgcccttccctggtgactgtaggtcacataccagcaatgaaaaacggaaccaaagaatttacttaggggcttttgaacttccaagaccccagacgctggccaatgacgtgacttcagggcagttttgattgtgcgtgattttatatttgcttttagaaatgcatggtttgttcctttaaacacacgctccttctagcatagttagttctcagcgtggatctttttaagaggattaattgaagcacagagaagtagctcaagccctgttgaaatgacaaatcctgggctagagctcctgcttcccaactctccttccagcagagcaatataactctaaggaaagcaacgcctttggtcgtggatttcttggatgcagatcagttaacctctgtatctgtttcctccttggtaaaatggggacagtaataacacctttttttaagggttgttaggaagattaattgaagtataaatatgaatgctcagcagagtgcccacacatagtagtctctttcactagtattaagcatggaatataaagtcagaaatattgagatcacactagtgctcagcgtggcacagatagcgagcgtctttgttaagattaagtgccttgttctgtcatttgcatgatttccagtgaatgacttttacaaagagacaaggtctcagcccaggctggtcccgatctcctgggctcaagcaatcccccccgacccgccaagtgctgggtttacaggcgtgatccactgcatccagcctgataacatagagacact

SEQ ID NO: 82487 - DNA, 1064 bp, Homo sapiens
gggaagaactagcaagtgtcccaattttttccaaacgttggggaggggaaaattcactgtatcatgaaaccctaagggtttgttgcacttcctgctttttaggcctggataacagtatcaccatccttatttacagaagggtaaaactgactcttaatgagaaaagctttataagttcaagggctgtaaaatatgaactacttagggtcgtttgccttccatgggaacttggctagacttagaaaaagctgtttgttgtgctaatgtaaaagtgtcatacaatttagaagatttttgaagatggtaaacttagaagaattctatgttctgaaatgcacacttttagaatgtttttctttgaaaacaggctaatagttttttctttttttgacaaagtttcagctcctctttaaagttattgtgtcatttttctggtttaaatttcccttatatttccacctgtaatgtcagtggcaacaacatcatacttcacttacttgttaatttactttttacccttattctaagagcaagttgagttgaactgaatcttccttgtcttagtaacaatgtataaatagtggcttttctgtacaaaaggttgtaatgcctcctgatggatataattttgtgattgtatttaaaagttgaataaatcacaccagcttcctgaaaatgttcataatgcatcttttggaaaacaaatacatgcctactttgtgcatatttgcattaacatggcaaagattgtatgaaatacctgtttttcagaaaataaaggttcagtctcaaaagatacagcatttaagttctgaatttattggtcaaaatagattttggaaaacttgaaaccttttggaacctgggtagcttgaaaaaacaaaacgacagggtctccctatgttgcccaggctgatctcgaactcctgggctcaagttacactcccacttcagcctcccaaagtgctgggattacaagcctgagccactaagccgagccaagcctagtcttttttttctgaatagcactaatacctcaaaaaagacccctaaattctcagaaa

SEQ ID NO: 82488 - DNA, 3571 bp, Homo sapiens
cagcaaggaattttttttttcttttaaacactattatattcttgtataggacctagacttgaactcttcttgggcaagaatttttttttttttaagaaaccgttttgtcaagtttgtcaaaaaccatgagagattttctgagtttgggatatttttacttaagaaacgttctggtaggttaatggattgtgtgcttttcatatctttataactgtcttagctctctttttaaagtatacttggttattgtgctttttattctgatagttattacattttatatgaaaattaaggggcttacaggagcagggtaagtatagagtcctttgcacttaacttttggcataatttgtctgctgattgtaattcagcagacaattgaaaagctttaaatgactttacatactatcctgcctatttttacaggttgactatgtcattaaggaagcaactaatctagataacttggctcagctgtatgaaggttggacagcctgggtgtgaatggcaagacagtagatgagtctggttaagcgaggtcagacatccaccagaatcaactcagcctcaggcatccaaagccacaccacagtcggtggtgatgcaactgggggcttactctgaggaaacctaggaaatctcggtgcactaggaagtgaatcccgcaggacagctgcactcagggatacgcccaacaccatggcctgcaaccccagggtcaagggtgaaggaaagcaagctcaccgcctgaacacggagattgtctttctgccacagaacagcagcagacgtgtcgggaggttagctgcggaaagaaatcgggatgccgcggagcacagagtgatttggaactccattccacctgaccctgtgtgtacaatccaggaaaaaaacaaaccccactcagaaacagagaaaactggggtcgcgaagaaatcacagccaaggaagatttgatgcattcagattctcgtgtaacacttgttgcttggcaacagtactggttgggttgaccagtaagtagaaaaaggctaaaggctatgcgatatgaatttcagaaatggactgaaaatggagagctatgtaacagatacactacagtagaagaacttacttctgaaatgaagggaaaaaaaccaccccatcgttccctactcctccccaccacttacccgttccccctttacctaatctagtagattagccatctttcaaattcacttttatttcagtccttatatttcatatacttccgtctcgatgctgttaacaacttctgataacatggaaaattcaaggattgtttaaaggtctgatgatcacacacaaaatgtaattccggttatttaagtcatttctgtgattctatcatgtacagtttccagaattgtcactgtgcattcaaaagtaatgaatctaacagacatttgatttaatgtacactcccttttgcttatagtgtgcattttttttggaggtcattcaaattttccctcttctgtgatagctgtagtttctttcatagaaagtagctaatccagtgtaatcttttacctttttaaaaaccaagatagagtatctattagagttttacattgttgatgatagattaacaataaagtgatgttctggtggaggtagactgaaatttttttaattcatgtttttcatttgatacttttaatttacacttagtaaattaaaagttgtttaatttacttggcattttaggacatgtacatgaaacagtgaaaatgagatccaccaacatcttttattaagttcagttattagtctgtgaagtgctttactttttgcacaattttaatagcttgctattcagtaatacattatagtgaattcatgatcaaggtttccttaaatttagcattgcatttcagtactgactgtgtaagctaaattgctgatccaaaataaaaacccagactagaatagggttcttaaaatcaagtatcaatacaaaatagaacacaattaaaatcttaattgttggctgggcacagtggctcacgcctgtaatcccagcactttgggaggccgaggcgggcggatcatgaggttaggagagcgagaccatcctggctaacacggtgaaaccccgtctttactaaaaatacaaaaaaaattagccgggcgtggtggcgggcgcctgtagtcccagctactcgggaggctgaggcaggagaatggcgtgaacccaggaggcggagcttgcagtgagccgagattgtgccactgcactccagcctgggcaacagagctagactctgtgtcaaaaataaatgactagataaaaaaaaaaattgtttgagtacattttccctgcattttagagattaggacagtggtcactttctagttgccgtcttcacagacaaacttgaaaggtattaaggaaaaaattccacatagctctgggccttttttgtattctgattgccacgttaatctgtaatcgttaagtacccatgaaagaatgtgtttcagtatcagtgcttttttggtactttaacaagtattgtaggcacggtggatttttttgaaatacccatgtgtccaatagcaagttaaggaacctagcgcatcaaattttgttttcttcattcatttggaaccttattttcgcaaaaaacctagctggaataataatgccatattgtattttgcacactgctttattttctagaggctctgggagcaaattacattcatcacattacctctgctctctcaagattaaagtctttcagcaacattctttattgtcatcataaggaaaaacttttatcgcaatgatagtcagttcacattagtttagcactatagatagtattcagaaattgctttctctttggtaaagaagataaataggtgaattttattgcctgtgttttcaggcttcagaggtacctggcaccttactcaagcaaaaacaaaaaacagctttacttcaaaagcatgtgcctctggtaaattatccatcacttttgttttaaagtggtccctccaagaataatgtggcatacacagtgggtttggttgtaaggcagatgtaatagatgacttcaaaagcctgctccttactgcactctggacaaggccctggtctgtatagtttggcttcctctgttaagtcattctacaaggtgacttgccatttgaactttcgtaagagacctcagcagttagactgagaaaagttagagtgctgtagttatgaagtcatacatttttgataaaatacctgtggaaaaccagggatcctctcctgtttctctctcttgcctccccctttccctccattcctctgtcgcctccccctctcctccactttctttaagaatcagggggtacagaataacctacaaacaacctcttcaaagtacccttggaaattgaagttcaatcttaagttttttgctgtctttaatttactagaattgcctaatttttagttgatttctctacagagcttagcttgtgtagttatttctcttttactgttgctttggtgtgtcttgaagtttgattgattatttttggtcattga

SEQ ID NO: 82489 - DNA, 1153 bp, Homo sapiens
tattgaatttaataaattcctgacctcaactgatccgcccacttcagcctccccaaagtgctgggattacaggcgtgagccatcatgcctggctgttatttatggtttttgatgccacaagcctagtaaacataattgtacaaattcatacctgaatgtctggctgtttttaggctacatttttaggaagacaattgctgtgtccaaggataaggatttatagttgattatttaattggggtatcaaccactaccacctatcccgtgcttgctccactctgccccctccatgttctgtttacatgtaaattgagccaccaactctttctctgtagcagtccggagtaacactggccagaagactcagcctgatgtcatgtcacagaatgctagaaagctgatccaaaaaaatcttgctacatcagctgatactccaccaagcaccgttccaggaactggcaagagtgttgcttgtagtcctaaaaaggcagtcagagaccctaaaactgggaaaggtaattagttagaataaagatgccttaaatttttatataaaatgacggtttgacttacgtatgtttttgttgcttcatagcggtgcaagagagaaactcctatgcagtgagtgtgtggaagagagtgaaagccaagttagagggccgagatgttgatccgaataggaggatgtcagttgctgaacaggtgaccgtgttttaaacttgggctacacattttaatgctgctggaaaagtagaggtgtataaagatccctctcatcgatttccttaatagttcatcaaggaacttaaatgtgttttcaggattcagaagattttgagtaacacagctctggcgtcgtcaagtagtcaccattttactctgacccttccctatgagcactttcctttcccctagccctgttttaacccaaatataagtccgatcctcctccaccagactacagttagtttccatttaaagaagactgttgaaggtttcaaatgaaatgccaaggaccctttgggttgcaggtgtagtatgagtggagcatccctaattagaaactcatatgctccaaatccgaagcattttgagagttgacatgatgccataagtgaaaagttccatgcctgacctggtgatggatcccagt

SEQ ID NO: 82490 - DNA, 2118 bp, Homo sapiens
acaggggagaccttgtctcaaagggaaaaaacaaaaaaactaaccacaatattaatcatacctttaaaatgagcttaatactgccagataagttaggcaagaatagaagcagaaggggaacattctgacagaagtgtcttctgaattgtggctgtaacacaaattgcagctgaatataacagctttattgtggagtaaatattctatgtaaaaacagtaatgtagaagataaatttacctaattgtttgtcagtgcttttggccatctcagacctaacagtgtcagtataaatgtacatttatttacagcctttataaggttttggtctatttcccaaacattttcaggaccaattctggtcctgaattctcaaaatgaggaagtagtattttttcatgttattaattgccacctccctttcccaccttcctcccatctcctcttgtggttccatttctgtctttacaggtcacatttctctgcagcaatatcattcattttgaaagtttacgaacaagaactgcagaagccttaaacctggatgcggcgttatttgaactaatcaagcgatgtcagcagatgtgttcgtttgcatcacagtttaacagttcagtgtctgagttagagcttcgtttattacagagagtggtgagtcttggtggaaagaaacttgattaaataaggctagtgttatactattaaaatcaatttaatatatacattccgattacattcgttgagcatatactgtatgtaagaggttgttaggggggcggggggacagtgatgattaaattattttcttagcgcccccccccccgccccgaaacatattatatgtttaaaaatataaaaaatgaggaagtgtaaaggatcctcatagctacaaccaaaatactatgaaagtttagaagggaggagaaagacgatatgtagcaaatgattccaatgcactgaaaatagagcaggagaaagagggcttatggaagatgaatgctggaaaggttagtgaaggccagaaatagcaagttggtaagtttgacgtttatattttgtcagaaagcttaaagctgtatgttaggaagttcacatttcatctcgaagagttatttagaatttagggacctggattgccagtcatctttgtgattccgaatgtatttctcaggtcttaaactttaagcatttaaagcctgcatgattatgcagaaaagtaaaaatcttcatctatatttcatagattattgagattattgttaagtaacttgtaggtaattaattcatgacttagcaatggaggttctctttgtgtcagcttgagttactaatatcttttgatgatgttaatgaagaaagaactcattatttcagctgatactcgaagtcaaacaaatgcttgttctatttaggacactggtcttgaacatcctattggcagctctgaatggcttttgtcagcacacaaacagttgacccaggatatgtctactcagagggcaattcagacagagaaagagcagcagatagaaacggtctgtgaaacaattcagaatctggttgataatataaagactgtgctcactggtcataaccgacagcttggagatgtcaaacatctcttgaaagctatggctaaggtaagactaataccatgaacacacatttactctccctctgttataaaatttacaagtagttttatttataggaaaaacagtgacattttgtaaataacaatttatctcatcacatcttccaatttgtttgtaactgagttaacttgtgttttcatcaactattttttaaagccagtagtagtagtttgaatttcatacacagagaagctaaggcttaattagattcctttattgtgatataacttgtaataaaaccaagatatgaacctagtctgagcattcagatatccagcttgtctttctctttcttagctataccaacaaacccatacagtttgcctccaaaatgaatgaaatgttgtctcttccctccagtgttgtacatagtctagtaagtaagaaaactaagcctccagaaaaggctattacttcatcattacaaacagtaaataatttaattttagaatttacttttacttt

SEQ ID NO: 82491 - DNA, 1100 bp, Homo sapiens
ttctttggaagctgaggtgggaggatggcttgagctcaggaggcgggggttgcagtgagccaagatagtagctgggcgtgctggctcacacctgtaatcccagcactttgggaggccgaggcgggtggatcatgaggtcaggagttcaagaccagcctggccaagatggtaaaactccgtctttactaaaactacaaaaattagccaggcacgatggcaggtgcctgtagtcccagctactcgggaggctgaggcaggagaatcgcttgaacccaggtgacagaggttgcagtgagctgagattgcaccactgcaactccagcctgggtgacagagtgagactccgtctcaaaagaaaaaaaaaagaatttggtgtagcatattttttattttttaaagatcattttattttaaaatgaaagtgaaacttccttctgtacgttttaagataataaactgaaagccagttcttgcctctctctccatacatgtttggccttaaatgttcaaagtgaaatcaaggttaattccaaaaggtgattgttaaaacttttgttttctaaattacatgtgtccaccctggttcttttgaatctttattgtgttatataaaatactccacaaataggaagtagagaatgtcatataccttcaccaagattctgctggcttttataggagaagctagctgcacttgaatcaagtattgaacagcgactcaagtgggcaggtggtgccaaccctgcattggcccctgtactacaagattttgaagcaacgatagctgaaagaagaaatcttgtccttaaagagagccaaagagcaagtcaggtattgtgacttacatgcaccatctttgtattcacttttacaggattagatgagtagctggaagttatatgtggggtaactaggggagcttgagagcccacgttctggctcacagccctgggaggagggacggatgggcctttcaggacatgccttaagttgaacccacagcaggttatttccttggcctttactgcctctcatttaaatattaattaaataaattcagcctctgttgaaaaataaagaggtcttaaattcatatctgt

SEQ ID NO: 82492 - DNA, 1946 bp, Homo sapiens
cacttcttcttaatgccagaaggctttctagactctcacagcatgcagctgtgagatgtactgactttgtatgttcccaccaaaggcattacttttcagcgaaggttttaactccttttgtttttctgtagactactacatgctcagtacggtgaattaatccaaccgagaaatggttcagttgatgaaacacccaaaatgtcagctggccagatgcttttggtagcattcgatggcatgtttgctcaagttgaaactgctttcagcttattagttgaaaaggtaaatgtggacttggatttaaaaataatgcaagtgccataaagtagttgttcagttgtgtcaagagtggagaaatgaactttgttttctttcatttacatagttgaacaagatggaaattcccatagcttggcgaaagattgacatcataagggaagccaggagtactcaagttaatttttttgatgatgataatcaccggcaggtgctagaagagattttctttctaaaaagactacagactattaaggagttcttcaggctctgtggtaccttttctaaaacattgtcaggtaatattctacctgtaaacatactagctttagctatgtagcactatggaagggggcaggatagagtaggcttaatttaattatacattcatgacaccttaaatactataaataagcagcatattacctgatttttttcatgaaatacaagaaatttttcctttttgtaggatcaagttcacttgaagatcagaatactgtgaatgggcctgtacagattgtcaatgtgaaaaccctttttagaaactcttgtttcagtgaagaccaaatggccaaacctatcaaggcattcacagctgactttgtgaggcagctcttgatagggctacccaaccaagccctcggactcacactgtgcagttttatcagtgctctgggtgtagacatcattgctcaagtagaggcaaaggactttggtgccgaaagcaaagtttctgttgatgatctctgtaagaaagcggtggaacataacatccagatagggaagttctctcagctggttatgaacagggcaactgtgttagcaagttcttacgacactgcctggaagaagcatgacttggtgcgaaggctagaaaccagtatttcttcttgtaagacaagcctgcagcgggttcagctgcatattgccatgtttcaggtaagtgtttttgtttataatgtgtttttcctcaaggtaggaaacttgaaaaatgggggaaattaatttaaaacaatacacagaaatttttttaaaacttcctgaactcacagcaacccaatgcaaacacaccatagcattttggcactttctttccaatgatacttcgtttctcttctgtatagttgagatcatttatcctttatggtttgtgtccttagaatttctttccatcaaggctgtatgataagcatgatctgtattaaatattgcttttttttttttttgagatggagttttgctcttcttgcccagactggagtgcaatggcgcgatctcggctcaccgcaacctccgcctcctgggttcaagcgattctccctcctcagcctccctagtagctgggattacaggcatgtgccaccacgcctggctaattttgtatttttagtagagatggggtttctccatgttggtcaggctggtctcgaactcccgagcctaggtgatccacccgccttggcctcccaaagtgctgggattataggcgtgagccaccatgcctggcataaatatagtttttaatgttgaattcattcatatgtaggtatgcttcctgtatttatttctaaagtagtttctctttccttgatgccttattgatgtgataaacagctttgggaataaatctgtctttattttggaaatggtttttagaagcctagttttgg

SEQ ID NO: 82493 - DNA, 1058 bp, Homo sapiens
agactttttttttttgaagggaaatagaagccacttataaccaaaccaaaaagagaataacaatgctaatatcactacagaaatatgattcctaaaaattaataacattatataacatactttagggcagttctttttgttcttaaggtacatcatcctaggaatgtttaattatatgacaactttttaaagtcatttgaaatagttcctgaaaaatttcacatgactatgaaatagaatttgaaaagaaaatatttaaaagtagaaataaaaagtaaacaaaagatgtacttacatgaatgagttgatggcatagttacataagtttgctcttaatgtatggctctaagtctccaaatgtgtaacttagctaaactcaaaaaacattaaaagtttttttctcatatatttataggaattgaattcgaatttccggcaaatcatatttccagaagcacttcgatgtttaatgaaaggggaatacacgttagaaagtatgctgcatgaactggacggtcttattgagcagaccaccgatggcgttcccctgcagactctagtggaatctcttcaggcctacttaagaaacgcagctatgggactggaagaagaaacacatgctcattacatcgatgttgccaggcaagtgaatgctggctgtgccgtttccttgtaaaagagatgggacagccagagaaagggattctgagctctttaacgtaagtttacttttagtttttagagcaggtataattacttataaatgctcatacacgtatctttttaaaacttttttattttgaaataattatacatcacgagaagttgcttaaaaaaaaagtgcaggcaggtattgtgcatgcttcatccttccttcagtgttagtatctatagtaacactatgaaaccgacaatgatatagtccacaccgcttactcagatttcactagttatacatgcacttatttgtgtgtgtgtgtgtgtgtgtgtgtgtgtgtgcaagtgtatagttcggtcacatacatacatatatccttttagtgcttgtagttatgtac

SEQ ID NO: 82494 - DNA, 1198 bp, Homo sapiens
caggtgatcctcccacttcagcctcccaagtagctgggaccacgggcgtgtgtcaccacgcctgaacaatttttatatttttttgtagagatggagtttcgccgtgttgcccaggctggtctcgaactcctgagctcaagcgatcctcctgccttggcctcccaaagtgctaggattacaggtatgagccgtggtgcctggcctcaaatgttgattctgtcacagtcatcaacaagtccttttaggaaattgcttaagctcttgagacatttttatctgtaaaatgtaaataatgatttctactcttcaagttttgtttgaggattaaatgcaatattcttttgtatgttgggggtggttgtgttataaacaagcacctcttccttatttttatagatatgaaatgcaatatgctccccagccacccccaacagtgtgtcagttcatcactgccactgaaatgaccctgcagcgatacgcagcagacatcaacagcagacttattagacaagtggaacgcttgaaacaggaagctgtcactgtgccagtttgtgaagatcagttgaaagaaattgaacgttgcattaaagttttccttcatgagaatggagaagaaggatctttgagtctagcaagtgttattatttctgccctttgtacccttacaaggtaagttagccaacttcatattggaccatttcctgtgtcttatttttaatcccaaacctaaaatgttcttttactttccttagtcttgccaagtgttacagctgcttacttgcttttcagattttagttatcttggttgtgttttgagacagggtctcactcttgacactgaggctggagtgcagtggcacgatctcggctcacagcaacctcagcctccttaatagctgggactacaggtgtgtgccaccacacctggctaatttttgtattttttggtagagatggggttttgccatattgatcaggctggtctcgaactcctggcctgaagtcatctacctgcctcggcctcccaaaatgctggaattacaggcatggccttgacccggccagttaccttgttttgtttatacatttaagtttcactgtacagatatttatctcttgtaggcgtaacctgatgatggaaggtgcagcgtcaagtgctggagaacagctggttgatctgacttctcgggatggagcc

SEQ ID NO: 82495 - DNA, 1136 bp, Homo sapiens
tcatttgtacaatggcagctacttcatctacctcactaagtattaaataagatgattaactgaaagaaccttatacacagcaggtgctcagtaaaagggtagttgaatatgaaagtgtcaagcattgtgtgaggctctcagattacaaagatctgtcaagcatcagtctctaaccttcaaggaacctaaaacttggcagatgtggcagttttaattaaaatgtcatgagcatggttgagggaatcacagggtcaggaaaaacagagaagtaagggacatttgaggagggccctcaaggtgaacaaggagcgtaccagacagtccatgtgtgagcacattccagggtaggaaagtatgtggaagaaaacagcaataaatcttttgattttgtttgtgtccccctgattaggtattctgagcacacccaactacagactcagcaaagagctgttcaggaagcaatccaggtgaagctgaatgaatttgaacaatggataacacattatcaggctgcattcaataatttagaagcaacacagcttgcaagcttgcttcaagagataagcacacaaatggaccttggtatgggttgacttattttagattcacatgtgaaactatgagttttatagtcatgtgtgtttgtgtggggtcctggtttgtgcttgcttttagtgacagctgacttgaccctgttttactgtgtttaataatgtcttttaccaaaaggtcctccaagttacgtgccagcaacagcctttctgcagaatgctggtcaggcccacttgattagccagtgcgagcagctggagggggaggttggtgctctcctgcagcagaggcgctccgtgctccgtggctgtctggagcaactgcatcactatgcaaccgtggccctgcagtatccgaaggccatatttcagaaacatcgaattgaacagtggaagacctggatggaagagctcatctgtaacaccacagtagagcgttgtcaagagctctataggaagtaagttgatagtgcttaattttcttttatttttgagacggagtcttgttctgtcacccaggctggagtgtggtggcatgatcttggctcactgcaacctccgtctctgaggttcaagcaattcctc

SEQ ID NO: 82496 - DNA, 1756 bp, Homo sapiens
agcaaccttgaggaatgctttttatttgttgatttattttaaaataagggagtaggttaatggtgctttgtaaattttatagtatcacgtccatgttggagggaaatttcttaatggtgtttcacttgctgcccccatttcctttcctttagtcttatgcaagatctactgcagtcatgtctatggttggatacataattggccttggagacagacatctggataatgttcttatagatatgacgactggagaagttgttcacatagattacaatgtttgctttgaaaaaggtaatataaaagtagactttacatttatgagggccaaatgttttttggtgaaagggcaaaaatataatgatttgtcttttcaaggtaaaagccttagagttcctgagaaagtaccttttcgaatgacacaaaacattgaaacagcactgggtgtaactggagtagaaggtgtatttaggctttcatgtgagcaggtatgctgttttctcttctcccttttagtgtatttgttaaatgagcaaaacctgtggaatgaaaaccacactttagtgatgaaacttgtggcagaccttattttaaaaactctcctgaaaacaggttttacacattatgcggcgtggcagagagaccctgctgacgctgctggaggcctttgtgtacgaccctctggtggactggacagcaggaggcgaggctgggtttgctggtgctgtctatggtggaggtggccagcaggccgagagcaagcagagcaagagagagatggagcgagagatcacccgcagcctgttttcttctagagtagctgagattaaggtgaagcccagtgacggaataagtcattgtcttctttttattaatagagtaaacatgctcatcaaaatgttgaggcaaattgtttctctaatttttttggcaaaactaatgtataatattgaaatggcagttaaatatggcagtttgatgttaactttttattaggtaattcttccacacaaacatgcacagttacattccacactcctaagaggtgggttcatgatttgaaaaaattatatttcttaattattgaaatgtgtttaccagtgatgactgtaaatgttctttaattggatagcttcccttccctatctggtagccagggatgccagtcttgttctgggtgacattggcaactattaatacatggtattatgagattgagcctgtcagtttatgcctgtgtaaacttgaacgcattagttgtttttgtacagtggaggcaacgcatcacccctttcgggttttgtagagatttaagtaggatgtgcaaaatgttcttctgacactgttgtgtctcaaaattggccctgtaagagtcttcttaatcgtaatatctttttacaggtgaactggtttaagaatagagatgagatgctggttgtgcttcccaagttggacggtagcttagatgaatacctaagcttgcaagagcaactgacagatgtggaaaaactgcagggcaaactactggaggaaatagagtttctagaaggagctgaaggggtggatcatccttctcatactctgcaacacaggtttaaaacagtgttgaattcttctaaatatgtgccattaattagaattttcatattcatgtaaacatcaatatggattagaattattgtaacaaatcacataaatgataaaagctgtctcagtgactgcaacttcaaagtgttagtaaacaaaaattcactgaaat

SEQ ID NO: 82497 - DNA, 1050 bp, Homo sapiens
gaagtatgtgcataaattatgaactataattttaaaactgaattctgtattataaagaagaaagtaacttgagtgtttagttttgaattgaacctcaagaaaattaaacagtagaccaatttttcaataaagtgaatgggcctaattaaaaggtatatatcataagaaagatccatagtccagaataattagctattttgtattaatacatgaaatttagttgagtaatgagagaatgctactgaaaaatcatttttaaaaattctactttacatacaaaaggcactctttttccttatataaaattgatcttttcttttttaaaaaaattgttttttcttaaggcccaagattcctaccaaactcctcagaatcctggaattgtaccccgtcctagtgaactttattacagtaaaattggccctgctttgaaaacagttgggcttagcctggatgtgtcccgtcgggattggcctcttcatgtaatgaaggcagtattggaagagttaatggaggccacacccccgaatctccttgccaaagagctctggtcatcttgcacaacacctgatgaatggtggagagttacgcaggtatgtgctttgttttagactatactcagtagtagtatttcttttgcctgctaccttcttgcctatcttgtttgtcctccttcccttccttcctctgtccctccagacttggtagtttgagacgtatatttgagtttaatattacagttataaaggcatgaacatgactgtgtccgagggcaggatggggaaagagttatggaggaaatgaaaaggagatcctaagcaaattaacacaggaacagaaaactgaataccgcatgttctcacttataagtgggagctaaacattgagcacacatggacacaaagaagggaacaacagacactggggcctacttgagggtggggggcaggaggagggtgaggtaggaaaaaatacctgttggatactatgttcattacctgggtgacagaataatgtgtacatcaaaccccagtgacatacaatttactc

SEQ ID NO: 82498 - DNA, 1822 bp, Homo sapiens
atctcggctctctgcaacctctgccccctgggctcaggtgatcctcttctcctgccctagcttcccaagtatctgggactacaggcacgagccactgtgcctgactaacttttgtattctttgtagagatggggttttgccatgttgctcaggctggtcttgaacttctgaactcaagtgatctgcctacctcggcctcccaaagtgctgggattacaggcatgagctgccgccgtgacctaaaatttacttttatgccatattgaatgtggaagaaaataagtgttctaatgtaatgtaaatttgtttctcccatcttatgaatatagataatgctaagtttgcaacagagagcacagaaacgtgcaagttacatcttgcgtcttgaagaaatcagtccatggttggctgccatgactaacactgaaattgctcttcctggggaagtctcagccagagacactgtcacaatccatagtgtgggcggaaccatcacaatcttaccgactaaaaccaagccaaagaaacttctctttcttggatcagatgggaagagctatccttatcttttcaaaggtaggatttaagacttcctccatttttcagaagagtattagtcttactaatgctttgtgtgagtgtgggtgtgtatagtaggagattatttcaggcgaatttctgtatgtcattattagcctgcagtgccctatatcttatgtgcttttgaacggcagtgattggatgccgtgcagaaagattttccacccccactttgtgtatgaacttgtacaagcaggacaagtgaggtacagctaataatgctaatatctactgccaatatcttgtcccaaaatagaattctttaatgctctcagtgtgcctcatggactgtcagtttttgactgccactgctagttgaaaaagaggagtggtatgctcccaaccctgtttaatcacctatcctagctattttaattttgttttcataggactggaggatttacatctggatgagagaataatgcagttcctatctattgtgaataccatgtttgctacaattaatcgccaagaaacaccccggttccatgctcgacactattctgtaacaccactaggaacaagatcaggactaatccagtgggtagatggagccacacccttatttggtctttacaaacgatggcaacaacgggaagctgccttacaagcacaaaaggttgattaaatcatctacacagtgtattagtctattctctgttattatgtgaaatacttgtagacttactggaccatttttgcatgtttataagcagttaaagaaggaaaagacttgaggtccctaggagagtatttttgaggtactttttttttttttttttttttgagacacagtcttgctctgtcgcccatgctggagtgcagtggtgtggttttgggtcactgcaacttctgcctcccaggttcaagcaattctgctacaggctcccgagtagcgggaactatggggggcgcacaaccacacctgggtaatttttgtatttttagtagagatgggattttgccatgttgctcaggttggtctcgaactcctggcctcaggtgatccacccgcctcagcctcccaaaatgctgggattacaggcatgagccaccgcatctggccttgaggtaccttttataaaaataaagttgtttgcttttttttggttttgttttttaaagggacagggtcttgctctgttgtccaggctagagtgcagtggtatgatcatagctcattgcagccttgaactcctgggctcaagtattcctcccacct

SEQ ID NO: 82499 - DNA, 1274 bp, Homo sapiens
ccatttaaagaggtacagaataatcccaagcatgctactgaaatggcacatcacagttcccatgagatacgaaatttcaataagtggacttcttacttggaatgtaagagattttataagcctataggaggcagcctgtggccagttgcttataaggaacatagaaaaaagtgtttctgtttaagaatttggaaatcagtgggcaaagggggatggacggcaaaggtgcccaatctttcatgtatggaaggctcacaccagtgaacaacagatgaagaaattagccaaggaaggggctgtgaccctgagctaaatattggttgcctgctttatttacctcattaaagataagaaatttaactttgtgcctatgtagtttttcacaaggagagcattcagtatttctaacagataaaatagtcgcttataacaacataaagttttacaagtagttctggaatcaattccacatatgctgcgtgggatgattagtgtattcacatatttgagaatccttatcttttatattttggttttcttaattctatattctcttaggtctttatcttttctagcaaataacaccattagttgggggagcttattactttgtagctccagcttttccttctccctccctcttttctctgtctcttacctttattgctcctaactgatttccttactgaatttgagcagtgagaaagctattaaaagatacatgtagaaacaaaaagtacagccaactttagcaaatgcaaggtgctaaattcagagcaaatagctagaagtacaagaaagaaaactaacatgaaggatgaagtttattatgtgttcttgccaaaactcgagtttccgtgtgtgtgtgtgagagaaggatgaagtttattatgtgttcttgccaaaactcgagtttccgtgtgtgtgtgtgtgtgtgtgtgtgtgtgtgtgtgtgtgtgtgtgtgtaggtgggcggggggggggggtgttgtttgtttgttttgtttgtttttttttgagatggagtctctgttgcccaggctggagtgagtggcacgatcttggctcactgctgcctctgcctcccgggtttaagtgattctcctgcctcagcctcccgtgtagctgggattacaggcacacaccaccatgcttggctaatttttgtacttttagtagagacggagtttcaccatgttggccaggctggtctcgaactcctggcctcaagtgatccaccctcctcggcctcccaaagtgctgggattacaggt

SEQ ID NO: 82500 - DNA, 2762 bp, Homo sapiens
tgttaaattagctgggtatggtagcacacacctgtagtcccagctattcaggaggctgaggcacaagaatcacttgaacccaggagacaggttgcagtgagccgagattgtgccactgtactccaacctgggcaacagagctagaccctgtttccaaaaaaaaaaaaaaaaggattataccaagttttgaactctggcttgaagaatacattatttgttaaacactcattatctttctcctttgtatcttccattagcttataatattaataaatatgaaagctcaacctataaaaaggcagaatatccacaatctttaatcagttctatgcctggaaggcaaatgagttcaatgagtgctcttgagtcaaatagattatcagtgttttccctaacctagcatatgcacatgggagaaatgttcaaaatattccttgttctcctatttcattacaggaaataaattttccactgcaattccaactttacttggcaatattcaaggagaagaattgctggtttctgaatgtgagggaggaagtcctcctgcatctcaggatagcaataaggatgaacctaaaagtggattaaatgaagaccaagccatgatgcaggattgttacagcaaaattgtagataagctgtcctctgcaaaccccaccatggtattacaggtacaaagaaactcacatgttgtagaagaattttttatagaataataaaaattgcttttgccaatctgtattgacaatcactggtcagggttctccaattgtataatgagcaccaattgcacacacttaacttacaaagtccagtgtttgaagagctgtgctgtgcataggcttgtagatgagctatttgggtgtgctgtgtatgcaggttcagatgctcgtggctgaactgcgcagggtcactgtgctctgggatgagctctggctgggagttttgctgcaacaacacatgtatgtcctgagacgaattcagcagcttgaagatgaggtgaagagagtccagaacaacaacaccttacgcaagtatgtttccatacacttgtcctgagacagtgaagctgccactttgtttcaaagtataaataacataaaatttactattttaatttttaagtgtacaattcagtggcattaaatacattcaccatattgtacaaccatcaccacggtccatttccagaacttattcattatattaagcagaagaagctctgtactcattaaaaattatctcttcatttccccctcacctcagttcctggccacctctattctacttgccatctctattatgaatttgcctattttagctacctcatagaagtagaaacataaactatccatctttttgtgtttggctttttatacttagaataatggcccgaaggtttattatgttgtaacgtgatataatttcatttttttatcgctgaataatactgtatgattataccgttttgtccatccgtttatggacagctgggttgcttctacattttagctctgtgaacagtgctgctgtgaacattggtgtatgagtatctgtttgactctctgctttctattattttttgtgaatttcatgtatattttgtggatgatccagtggatttgctgaatcgtatggcaatatggcaattctacgtctgacttactgaggagccaacaaacttttccacagtggctgcaccattttacaatcctcctagccatgcatgagggttccagtttctcctaatccttggcaacacttcttttcttttctttttttgataatagctgttgtgatggatgcgaagtggtatctcactgtggttttgatttgcattttcctaatgactagtgatgttgagcttcctttcatgtgtttattggccatttgcctatctttggagaaatgtcattacaagtcctttgcccattttttaattgggttttttgtttttttattgttgaattgtaggagttctctatgtattctgggtactaacccttatcagatacatgatttgcaaatatttgctgccattctgtgggttgtcttttcattctcttcatagtgtatagtattttttgatttacaaaagttttaattttgatgtagctcaatttaatttgtctgtgcttttggtgccatatccaaggaatcattgccaagtctggggtcatgaaacctttcccttatgttttcttctaagagttttgtagttctagcttttaagtttaggtctttgatccattttgagttattgcttcattcttttgcatgttgatatcacattttccttgtatcatttagttcattgaaaagaggagctgcctcttttatgagctgcatttttttaaaaaacaaaaaattcttggctggacacggtgactcatacctgtaattctggcactttgggaggctgaggcgggcggatcacgaggtcaggagatcgagaccatcctggccaacatggtgaaaccccatctctactaaaatacaaaaaattagctgggcgtggtgtcgcgcgtgtgtagtcgcagctactcaggaggctgaggcagaggaattgcttgaacccgggaggtggaggttgcagtgagccaagattgtaccactccactccagtctggtgacagagcaaaactctgtctccaaaaaaaaacaaaaccaaaaattctttgttagtaatttactttgtgaatatgttattgctttatttagacttattccttggtactgtttacttaacaattgatata

SEQ ID NO: 82501 - DNA, 1499 bp, Homo sapiens
caggatgaagatataacacttcagataactgagagtgaagacaacgaagaagatgacatggttgatgttatctggcgtcagttgatatcaagctgcccatggctttcagaacttgatgaaagtgcaactgaaggagttattaaagtgtggaggaaagttgtagatagaatattcagcctgtacaaactctcttgcagtgcatactttactttccttaaactcaacgctggtcaagtatgtagcacagtgttctaagaaaatttattttggaaactttttcttattaaacaaaagtagtgttctgagttattttcttatttattcccctcatctttcactcttagattcctttagatgaggatgaccctaggctgcatttaagtcacagagtggaacagagcactgatgacatgattgtgatggccacattgcgcctgctgcggttgctcgtgaagcatgctggtgagcttcggcagtatctggagcacggcttggagacaacacccactgcaccatggagaggtgagacctgcataaaatgtttcaggaaaaatagtttctcactaggatatataagatttcaaaaagtggtttccttatgtttattatttgaatgtgtaaaaagaatagccagattaacttcctaggacaccctgcactgcttgttacatcactaggacttttcctcccacctttccaagaaatgggaagctgaaaggcaggagctttttatatacaaaatgagttttggagagggtggtgaaaaattttcaaaaggttttatataccctctgtaaaaattgtctgtgcctgccttgtttgtaggcattcacagaagatacatttctccgtaacatttttgagctgccctggactttgattacagctctgtatctaaaccaaccttaaccagacttgcgaatcaagaactattgtgtatggttctttattatcacagggagaaatttgaactcttaaaatccgtactaatgccgacacacatcacgttttatctgtttgatctacgatgctgatagtttcttcatagttttaaataactttaaagtgtctttctctcttcttgtcctgaaggaattattccgcaacttttctcacgcttaaaccaccctgaagtgtatgtgcgccaaagtatttgtaaccttctctgccgtgtggctcaagattccccacatctcatattgtatcctgcaatagtgggtaccatatcgcttagtagtgaatcccaggcttcaggtatggaatattcaaatattgctactttgagtataaatgactgtgccaataattttagtgaggtcaaagtttttaagctttatgttccagagttgttagagtttgtagggtttttttttttttttttttttttttttttttttttttgagatggagtctcactctgtcacccaggctggagtgcagtggcaccatctcagctcactgcagtctctgcctcccaggtttaagcagttctctgcctc

SEQ ID NO: 82502 - DNA, 1004 bp, Homo sapiens
atgattaaagtgaatctgatcatgaggaaatagccagtccgattcataatgcaagacattctacagcacagctgacacctgactgtttacaatgttcagtgtcatgaaagatattgatgtcttccacaggagataatataatcttacttgggaagctaatgaattcatttcaacataccaaccttttagagaacataattcatatttgtgccttctcaagttatgtacagtaatattttggaacttttgattgcttgcagataaaaacctaaaatgctaatggaaatgtcgttaggaatttatgaatgtaacattgttgagttcttttattataattatttttttgtccattttggcagtgcatattggagttggagaacctgacttcattttgggacagttgtatcacctgtcttcagtacaggcacctgaagtagccaaatcttgggcagcgttggccagctgggcttataggtggggcagaaaggtggttgacaatgccaggtatgtttaaatgtgtagtttatttatgcattgcataaatagatatttaaatgtctgctgatatggtaaagtttgggtagctgaaatactgatgacttgtttatttttatagtcagggagaaggtgttcgtctgctgcctagagaaaaatctgaagttcagaatctacttccagacactataactgaggaagagaaagagagaatatatggtattcttggacaggctgtgtgtcggccggcggggattcaggcaaggaaaacatggtgcttggggcaagattgctactccaaatcattgattttgagaaaattgatcatatatatttgataaaatactgaatggggcttaccaattgttgttgtaaataaaaacttctgcattttaagatgaaagtgagttatatttttctaagaagaatatacttttgagaaaataaggcatttccttagagtcctgttaaaaataggtgagttggcctggcacggtggctcacacctg

SEQ ID NO: 82503 - DNA, 3517 bp, Homo sapiens
tgtagtcccagcactttgagatgctgacggggggtggatcacgaggtcaggagattgagaccatcctggataacacggtgaaaccccatctctactaaaaatacaaaaaaattagctgggcgtgggggcgggtgcctgtagtcccagctacttgggaggctgaggcaggagaatggcatgaaccagggaggcggatcttgcattgagccaagatcacgccactgcactccagcctgggcaacagagtgagactctatttcaaaaaaaaaaaaaaaaaaaaaaaaatcacctgggtgtggtggcatgtgcctatagtcccagctgcttaggaggctgaggtgggcggatagcatgagcctgggaaatgaaggctgcagcgagctatgatcatgccactgcactccagcctgggtgacagagtgacacccggtctcaaaaaataagaaggaacagcaaataacgagggcacctgatttaatcctaggaatcagaaaaagacttgtggggaagtaacatttaagctgagagttaagataaagatgaggaagaaggcaggctgacttggttagaaaaaacgtgtgcaggccagagaaaataatgattcttagttgactcagttcacctaagagagagtaggaagaggtggagcgctggatgagattgagattggaattgaatgctggaaggcatcagtaacaagctgaattcaggagtttgggatttgtcagaatgtcagtgagaagtcatcagaggcttttaagcagggaagtgaaatgttcagatttacccttgtgtaatgtcacttcaattgcaagttggaaaatggattagaagagtataagaatggggtcaaagggacctaagttatgctgaagtctctgctaaagagggtaactagggtggcagtagggaaagaaaaaagcaaatgggccatgagggttgaaagtaaagtctgtgatggtggccaagtactttcacaggcagccggctcatcctgtgcccttccttgagaaggggaaaatggaaaaagggagtaaaagatttggagggtggtggaaaatgagctccatttggcatgactgacattagaggaagcactcttgaaataaatagagtgtagatgaccagttggcaggtgggattcagatatcaggtctgggtgaagattcagcagttgtcagcatttctgtggtaattgaagacacaggaaaagatgatgatgtccagggagagtatgcagtgggaaaagtagagagcctaggactgagtccaaggagcactggtgtttaatggatgagtgatggaagagaaagagactgaggattcttcagcaagataggaagaaaaccaggagaatggtggaagggcagagagtacttacagaagaagtgcggggggatggtttagccttccctgcttccttgctttccctacccgttggcccaggctttttgccaaagattcagaaactaaaaagaaatttcttgaaatgaatgacttgactttacttcattgtatacatttaatttagcaaaacctgttcattgtatctcaagcactgtgctagctgctagggatttgaggatgagttatctttgtttcaggaggtggtgcagaagagggatagttggggaataattttttggccatgtttccatgcagtctggtttagacaaattaggaactaataaaacgttttcctctcttcagaacaaacagtcccaattagaagccatctcatggaattaggtctaacagcagcaaaatttgctagaaaacgagggaatgtgtcccttgcaacaagactgctggcacagtgcagtgaagttcagctgggaaagaccaccactgcacaggatttagtccaacattttaaaaaactatcaacccaaggtcaagtggatgaaaaatgggggcccgaacttgatattgaaaaaaccaaattgctttatacagcaggttagtaaaattaattatggttaatacatgagtataataaaaatcatgtatatgaatgttactgtgtatgtatggtataaggtagtaatagcaaagttgatcatttccagctgttgcagaacatttgcatcctgaataataagttgcttattactgacttacctttataattctgtgctttcaaaagaattttgttgcaatgtattacagtaagaagtatttccggagatcattggtcactgaatttacatgtttttttaactttattattttgggccaggtgcttatgcttacaatctgagcactttgggaggccaagatgggaggattgtttgagcttaggagtttgacaccagcctgggcaacagagtgaaatctcagctatactgaaattcaaagaaattaggggggtgtggtggaacatgcctgtagttccggctgcttgaggggctgaggcaggagaattgcttgagcctgggaagttgaggctacagtgagccctgattgtgctactgcactccagcctaggtgacagagtgaaaccctgcctcaaaaaaaaaaaaaaaaaaaaaagtttagtattttggctaggcatagtggctcatgcctgcaatctcagcactttgggaggctaagacagtaggagcctcctatgcttgagcataggagtttgaaaccatcaacatggtggtgtcatcaccatgttgatatttgtttcctaatccaagtgcctccctccatcatttgcttttaaaggttctaagttctgactttgtggttttctgtaggccagtcaacacatgcaatggaaatgttgagttcttgtgccatatctttctgcaagtctgtgaaagctgaatatgcagttgctaaatcaattctgacactggctaaatggatccaggcagaatggaaagagatttcaggacagctgaaacaggtttacagagctcagcaccaacagaacttcacaggtctttctactttgtctaaaaacatactcactctaatagaactgccatctgttaatacgatggaagaagagtatcctcggatcgagagtgaatctacaggtagagttgctttattagctttagaatattaattttagaagctatatttttttctgttttaaagtttataatgttatgctggctataattttccataaaaagtatatctgtggaagttgagtttattttattgttgggaaataactaaaacatatttaggatcgaatgccattttgggagtcactgaactctgcccccaggtatttgcttttatggacttagatgtttttgctggcaataagatcctgcccctcatatcaaaaaatttcacctcacaatagaaggagcaacaaagatttaaaatagttacctgtgttcctattgattggtggaacacagaaactatataaagattcaagtttcccattctggtgctagtgctagtaacacaaagataccttacaaatagggtagttgattctgtccatgtttgagtgcctgttgtggaaggcataattcccctgtttttaaaatttgagagaaaa

SEQ ID NO: 82504 - DNA, 1054 bp, Homo sapiens
agccaaactatattgcagtcttggacttaagacttgctatatatctgcaaacatatcaacagcctgttttatgttgagtaattttggtttttctctggcaggactgtcttattccactcttcagtgaagctttacgttcatgtaaacagcatgacgtgaggccatggatgcaggcattaaggtatactatgtaccagaatcagttgttggagaaaattaaaggtaagtggtttttttttcttgtaagagaaaattaaaggtgttctttttttaaattttgctttattgaggtttatattacacattctaagtgtatggtttgatgagttctaacatgtcttcacttgtgtgaccaccaatacgatcgagatacagaacaccgtcttaccccagaaggttcccttgggatcatctcctcatttgcccctgtcagcagttactgatttgctttctgtcactatggattagacttgtctttactaaagtttcatgtacgtgaaatcataacaacatgttctcttgtgtttggcttctcttgctcaacatgatatttttaaggttcacccatattgcatgtatcaggaatacaatcctttttattattgagtagagttctattgtatgtatataccccagtttatttctcccttcatcctttgctagattttggggttttttcacattgcgctattcagtataaacctgctctcaacattcatgtgcaagtctttgagtggacgtatatttgtgtttctctcgagtgaatgcaccttgttgggtcacgtagcttaacttaaaaaaattttaatcactgtggtgcatatgtagtgattattagtgattatctcataattttatttacattttcttgattaatgatgctgagtgtatttcatttgtattttagtttgcaaatgtttgttcaaattcttcacccatttttaatgaagacataagacttatttttgtgttctgaacctaagttctttgtcacgtaaaatgcgctatgaatattgagttttaaatactccaaatgaatggctagagaattact

SEQ ID NO: 82505 - DNA, 1035 bp, Homo sapiens
ctgagttcaagtgattctcctgcctcagcctcctgagtagctgggattacaggtgtctgccaccgtgcccaggtaattttttgtatttttagtagagacggggtttcaccatcttggccaggctggtcttgaactcctgacctcgtgatccacccaccttggcctcccaaagtgctgggattacaggcgtgagccaccacgcctggcctcgacttactgatttttggcctttgaaggcaactgctttttaggggtctgaggtacagtaattttgtatgaagtatgatttttatatagctctcagtaatgcttatagtgtttaactgccttaaatattaaaggagctgttcattggtgattagtttttaataatgccaaacataaatcaaaatttataataaaagcacatgaacttaatgacgttttatttaactttggtagacatgaaaaaactgcttcctaacatgttaagtccggatccgagggaacttcagaaatccattgaagttcaattgttaagaagttctgtttgtttggcaactgctttaaacccgatagaacaagatcagaagtggcagtctataactgagtaagtttactcttacggaggtaaatgtacattgtgtatatcatgtgataaacatacatggggtgaagagggctggaaggagagttactagattactaaatactagtgctaatagcttcattttagttgtagaagtcatatgatatatgaatgctgcttgccaacataaactgaggttgaaatgaaataaaatgtaaaaatccccaaaagcaaatgtcttgacttgctaatatcattttattatagagcaggctgctcctcttactgccccctaactttggatgtcagtttgatagcatcttatcaattgctttattctttgagtggttatgaattgtaatttttattaattggcagtaaatattttgtttcagaaatgtggtaaagtacttgaagcaaacatcccgcatcgctattggacctctgagactttctactttaacagt

SEQ ID NO: 82506 - DNA, 1015 bp, Homo sapiens
tgccagcagtgaaagaagccaggactgagatacaagattgtgatgctgggagagctgtgcaagggctcatgctgtaggtgaggagtgaggctgcacagggagctcactggcagcttggagagaactgggtgtcaaagttgtcctgcagaggtctactgtcagtgtgttaggatctgaagagaacaggctgcaacacatgaaaacaggaaggagacacaggggcgagtcagctccactgaaagtctgtagctgtgactttctggtttgccactccaatttgagtactaattaagtggtagtcacatcttcaacataaaaaccaaaataatggcatcctcgtggaaggaattttgtcagaaaaatgctgtgtactttgctgtcttcctaggatttgttctgtttttgtttgtttttttttaatggttccacaggctgcataggaatacaagctaaccaatattttaattacagatcattaagcagctttgagtctggaaaatttgttgaatgtaccgagcagttagaattgttaccaggagaaaatatcaatctacttgctggaggatcaaaagaaaaaataggtatttgagaaaatagttttaaagttattttagtggacaagttgctcaaaatgtttggcttagtatattttactggaaaatctggaagttattttacatttttgtgggggcagaatcccatgtgaagcaacaaatttagggctgccctatttatgtttgatttgggaaatgaaaagcacttaaaattaagtcaaataaaaaaaatgaccaccttaatactttgagatttatctagccattttgtttgataaaggacaaagtagtgtttcagctaaatatttttcttgattttcatcttgatgtggctcattaatttatcacaaatagaacactttataaaatgttattaaaaagtttaatgagtattctggattgagcaagatttgctaatgcaggtctagatttgtccccttaaatagtagattgacttaccg

SEQ ID NO: 82507 - DNA, 1673 bp, Homo sapiens
ttcatgtcgttttctccactcttcaccaaaacagcagcgtacataggcacatggttttatgatctgtttttcccactcaatattaaaaaaaaaatttgccatgttaggctgggttcggtggcttacatctgtattcccagcactttgggaggctgaggcaggtggatcacctgaggtcaggagtttgagactagcctaacatggtgaaaccctgtctctactaaaaatacaaaaaatattagcgaggtgtggtggcacatacgtgtaatcccagctacttgggaggctgagccaggagaattggttgaacctgggaggcggaggttgctgtgagcccaggttgtgccactgccctccagcctgggcaacaagagcgaaactctgtctccaaaaaaaaaaaaaaaattgccatgttaaatattctacagtgttatttttaataaagatttgtatttatgagtgtaccataatttaatatttcttactgttgggcattaaggttgtttctgatatttttttttactaaatgtaccgtagcacttaatatctttgcttatatttctgattactttcttggaatccattctcataaactgatttactagaagaaaggctgccaaaccataagtcttatgatatattctattgctaagctactctacagaaaaggtggctgcagtttatacccttaataatagagtacccccttcccttcatctttgtggatactgagagtcactgagaaacaagaatgctgccaccaccgtcagcaaaaatagttattgtactttacatttctatatttattaatgactaatagtagaagttgccccatatagtgaccttttgtgattttttaaaacatggatcatgtcttcgtggcctctcaatttttcctgtgttaatctgtgaaattttatgaaatactaagattgttgatgctatccaatttcttgatttataatttgtttttaatgtttaatgttgtatttcagcattatgcatctagatctgttacttgtgcatcttttcttggattttatccttctacaaagcctttccacacactgacatcagctacttatcaatattttccactagttcttttatactgtcttacatttttttaaaaacatttaaccacttttaaatttagtttcatagttgtgaggaagacatcaaacctccccccaccatagtcgactcactgttttagctcagtttattcttgcaccattttttgtgggaggggggaaatgagatatgtgtgtttaaaataagactcctttggggctgggcgcggtggttcacgcctgaaatcccagtacttggggagactgaggtgagcggattgcttgagtccaggagtttgagatcaccctggccaacatagcaaaaccttgttttagccaggtgtggtggtgggcgcctatagtcccagctacttgggaggctgaggttggaggattgcatgagcctgggagggcaaggctgtagcgagccatgatcatgccactgctctccagcctgggtgacagtaagactctgtctcaaaaaataagtaagtaaaggccaggcgcggtggctcatgcccataatcccagcattttgggaggccgaggcaggtggatcacctgaggtcaagagttcaagaccagcctggccaacacggt

SEQ ID NO: 82508 - DNA, 6412 bp, Homo sapiens
ctaatttttgtaattttagtagagatggggtcccgctgtgttgcccaggctggtttcaaactcctgggctcaagtgatctgcccaccttaccctcccaaagtgctaggattacaggtgtgagccacaacacctgacctgtggctgttttcttactgtagcgatagacgaggagttgctgcattgcatagagatggtatattgcacgcaaaggctttactgacttcataaaaaagtgtttgtcccaggtttagtgtactagatcccttgcagtctgtaattttaatttaaaaatgtccagatacccctattttgaaggataaactctgtatgcttgtgcttattttggagaagccataaacttactttgttttgtacatgatcagatgtgggcgctatctccaactgtctttgcacttctgagtaagaatctgatgattgtgcacagtgacctggctgttcacttccctgccattcagtatgctgtgctctacacattgtattctcattgtaccaggtactgtatttacaaatttttcttaagaaccccacaaaacatttttttttttaatggatagattttaaagatgtatgttgatttaactttggacttgcttgctttctttgattaaagatgaaaagataatctgtgctttgtctttcaggcatgatcactttatctctagtagcctcagttcttcctctccttctttgtttgatggagctgtgattagcactgtaactacggctacaaagaaacatttctcaattatattaaatcttctgggaatattacttaagaaagataaccttaaccaggacacgaggtaacagatattatatagtattaactattcctaactttgttaatttgcctttataatttgagaataagaaatgtggattacaaaaaatttttaaaaatgtggattatagaggtgaggtagagcagcttctttattgtcaaacaccttataatttggttttattatttaatctaggctttcttattctttctgaaaagaaatacatgaaaaacctcactcccccaccccccagtgtttcatagaagaatatatatagatttttaatattctttgcttttttttttgagacggagttttgctcactgcaacctctgcctcctaggttcaagcaattctcctgcctcagcctcccaagtagccgcgattacaggtgcccgccaccacacccagctaatttttgtatttttagtagagatggtgtttcaccatgttgttggccaggctggtcttgaactcctgacctcaggtaagccaccacacccggcctctttgctattatcatgctgcgttgggaggttttcttaaaaggcacacaacaattttgacagtaatttctatagtttcatttttttatttttattttttattgtttgagatgtttgaaaaaccaagagaagaccaatgtaagaagactaggcttttaatgttttttggtttttgttttttttaatgtacagtcaactgtatattttgtgtttcaggaaactgttaatgacttgggctttggaagcagctgttttaatgaagaagtctgaaacatacgcacctttattctctcttccgtctttccataaattttgcaaaggccttttagccaacagtaagactctgtttttttttttttttctattttgtttatcaatccttaaaagggtctttggtaatgggagatggtcatgaatcgagctgttttcctgacctgaagatgtgtaatcctcattttaatgacagatacacagtcttgattttttttcattcttagtattagaaaaatgttttgaagtgattgtcacatttttaagcttacgtgaatgtttatagtttgcatatacttttacattttctctcagaaaaagttttgtgtgatgacccatcagttacattacgtgggttttgttgaatgtatcattttaacaaatgtgacagtcagtgagaattctggacaagagtagtgcctagtctatagtaggcactcactctttgttgaatgaatgaatggattcagataattatgacaaactgggatataatttcttttggccagctgaaagtaactgtcttttaatgtttaatagctctcgttgaagatgtgaatatctgtctgcaggcatgcagcagtctacatgctctgtcctcttccttgccagatgatcttttacagaggtatgaaattaagatcatgtcttttgacattaaccctaataacctggaaatgttaacacacctgctttgtctatttcgttctttcatagatgtgtcgatgtttgccgtgttcaactagtgcacagtggaactcgtattcgacaagcatttggaaaactgttgaaatcaattcctttagatgttgtcctaaggtataacagttgttttggagcaaagacattctgtgatatttacagcctctactggttgtctactttaggagaagacagatcacctattagagcattaatgacacatcttttatggccctgtttgtcagtgattgaagtgatgtcaaataatcgaattttgcaggtctgcaagaaaattaaaaatttttaatgagctttataggctcacaataattagtatagaataactcatgtagtgccaaaatatgtttcttagtagctcagatatttgaaaaactaaacagtaatcttttattgtttttgatcaagttgatttgggagctttaagagcctaaacttgatccttttgtaatacataagcataatgattgggtttttattttcacatgtttgatatgcctccctcaaatcctcttatgatgtcagcacattacccatctgaggtgaataaaaaaaggatctaaagttgtaatcacatctctgtatccatttgaaagtctcaattttactatatttttacctccagtgagttaataagtaaataatccacttacagtatgtgctaaccttttaagctaaaatattttgcataacaactttattttctgtctacagcaataacaatcacacagaaattcaagaaatttctttagcattaagaagtcacatgagtaaagcaccaagtaatacattccacccccaagatttctctgatgttattagttttattttgtatgggaactctcatagaacagggtaaggcatttctttgactcttttatctgggaaacataattttaagattcttttgactttacatgcagttttgaagagaaaatatgtttgggggtggcagagtatcaagtaacattcttctcatatgggttattttagttttcatcaataggaaaattgctttgaagatagcatctgtagaaacaaaaatgggctttgaaattgagtaatgaaatgtggttaacagttaactgatgtgatgtcattaacactttggggaatggggtgggggtggagatattctagacatgcttagttgaattgagtgagtttcattcctgactggcataagccatttaccctaatcatccttccacactgtacctcaacctgttaactataaaagacctcaaaatgagaggggggacacaatgcttctcaatttcataggttttgccttttttggagtagggaaaattacagttccttattcctattccccttgcattttttttttcattattaaaatgaagttgtcattgtcttttaaatatgaaactgcttttcccaggaaggacaattggttggaaagactgttctatagctgccagagactggataagcgtgaccagtcaacaattccacgcaatctcctgaagacagatgctgtcctttggcagtgggccatatgggaagctgcacaattcactgttctttctaagctgagaaccccactgggcagagctcaagacaccttccagacaattgaaggtaactcactcaagctttgtgatgtgaatactttcaaagccttattaagaaatactggattcttaaatctttgttaaagatttgagagtatatgatttttttgaaaaaagtcaataattttcaggtatgtttgttagaataagctttcattgaataattgcattggaaatatgtttttttttccccaaaacttagggagttgtgtggaaaaaatatatatttctttcccctaaaatgaaagatctttcatgttgggattttttatttttaaatgatgggtagacagaggatacttgataaatgtgaattggtcataaaaaactcacacttattctaggaacttttaagatttttaaaaattcagaatgttgtctttgctttcaggtatcattcgaagtctcgcagctcacacattaaaccctgatcaggatgttagtcagtggacaactgcagacaatgatgaaggccatggtaacaaccaacttagacttgttcttcttctgcagtatctggaaaatctggagaaattaatgtataatgcatacgagggatgtgctaatgcattaacttcacctcccaaggttggtttccatgagatagtgttgttttatagcagtttaatggtcacagctggcagtatgtgcagagctgaaatcacagtagacttgtgtatttggtttatatataggtgagacatccttacctacaaattgaaccagtcctgagcttttctttctcttatcgtaaaggtcattagaacttttttctataccaatcgccaaacttgtcaggactggctaacgcggattcgactctccatcatgagggtaggattgttggcaggccagcctgcagtgacagtgagacatggctttgacttgcttacagagatgaaaacaaccagcctatctcaggtaatgtggtgtgtttgaaattcattttaagtctgttaataagaaaagcatggtttaattcctttggtatgatttaatctatggataaaataagttaaagcttggattcattttcaaaggttttgatcctgtattttgtaaaagcaacaactgccagagttacagtgttagaagttaaaataggccgggcgcggtggctcacgcctgtaatcccagcactttgggaggcagaggtgggcggatcatgaggtcaggagatcgagaccatcctggctaacacagtgaaaccccgcctctactaaaaatacaaaaaattagctgggcgtggtggcaggcgcctgtagtcccagctactcgggaggctgaggcaggagaatggcgtgaacccgggaggcggagcttgcagtgaaccgagatcgcaccactgcactccagcctgggcgacagagcaagactccgcctcagaaaaaaaaaaaaaaaaaaaaaaaagaagttaaaataatgttcatgtttttgtttatgttaaaacaatattcatgttagaacacgttaaaactatatttcttacgtgcaaagtttagaactttaaaggtagttctgaaaatttgtttatgggataaattatttatttatttatttatttatttatttatttatttattttttgagacacagtttcactttgtcgcccaggctggagtgcagttgtgcgatctcggctcactgtaacctctgcctctcaggttcaagcctcttcttgcctcagtccctgggattacaggcacccgccaccatactcggctaagttttgtatttttagtagagacagggtttcaccatgttggccaggctggtctcgaactcctgaccacaagtgatctgcccacctcggccttccaaagtgctgggattacaggcatgagctactgcacttggccaggagaaattgtttttataacgtatgacaaatgcttgagtaattcctggcttgaaagtgggctcacaataaataactggaatccaaaaataacaaaatgtttagcaattcaggtaatgtcaagcagtattcaaacacatgaagttaatcattccttaattcctgtttatttatatttaatttttgctttctttttactccatgtgttgttcctacagaggtcacaggttgaatgtttgggtaactttggggtgggggtgcaaacatccatgtgctgctaaggttctgttagtcaccctttgtggctattttatatgtaacattttaaagaattctgagctaaataatgtgaaaattgtgaaaataattgttaaatacatttggctttaagcaggcacagactgatcagttgtaaattttatagggatttatgttttaatggtattgggtgactaatttttctgaatgcgttttcaggggaatgaattggaagtaaccattatgatggtggtagaagcattatgtgaacttcattgtcctgaagctatacagggaattgctgtctggtcatcatctattgttggaaaaaatcttctgtggattaactcagtggctcaacaggctgaagggaggtaggttggagggaaggaaatggg

SEQ ID NO: 82509 - DNA, 1961 bp, Homo sapiens
ttaaaagactattttttagatatacagaaaattgagcagaaaacaatgagttcccatataccttcttcatcccaacagtttccccctcattaacatattgtgttagtgtggtacatttattacaaaggagcgaatatggatatattattattaactaattttatagtttactttgtgttatgtattctatggactttaacatgtgtaatgacatgtatcccctattaccagtatcatacaggatagtttcacttccctaaaaatcttttatgttccacccactccttcctcgttccctctccccactcctccctccctccatcttaagcccatggcaatccctgatctttttactgtctccgtcgttttgccttttccagaatgccatgtagttggagtcatatagtatgtagccttttcaattggcttctttcacttatcagtgtgcatttaaggtttctccatgtctttttgtaattggagaagctcattttttaaaaattttattcttttagattgttgaacagataaatacgaaactgccatcatcatttgtagaaaaactgtttataccatcatctaaactactattcttgcgttatcataaagaaaaagaggtaagtaatacattgataatgaattttgacaacttgagtcactgaagagttggacctaatgttgcttaccaggctgtataagtgaaattgagtgaaatgtgaaatgtttgatttagaatatagtgattgtatttgttcttttaagtttgtatttcttgagaatcatactgaatactttcatgaatgatgtgccagatactcttttcagactatgcatcttttgctgttattaaatttattataaatttattataaatttaaattttcataagggtaaaacaagttgacacatttataacgttataaattaagaagtactgtatattttgtaaacaaaaatgactggcttttcaaccaccccctagtcaaatccaccacagactttcctggtagatttaagaaacccagtcttaaactgctgtttgcatatgtcttctgatgttgattatttaaaaaaaaaaaaaaacggccatttcggaaatttcatattgacagttttcatttatagtactctgtatttgtgataaaactttatagacttgaaatagcatactgatctgtgtcagttttctgactggtttttaaaaagttaaaatattaagtgctacggacagtgaattgatcgatcttaaatttatttgtatcgtcagcactaatacagatagtgatttattttccatataattttagaagatttattttccatttatcacttccttgaattttttgtttttcaggttgttgctgtagcccatgctgtttatcaagcagtgctcagcttgaagaatattcctgttttggagactgcctataagttaatattgggagaaatgacttgtgccctaaacaacctcctacacagtctacaacttcctgaggcctgttctgaaataaaacatgaggcttttaagaatcatgtgttcaatgtagacaatgcaaaatttgtagttatatttgacctcagtgccctgactacaattggaaatgccaaaaactcactaataggggtgagtctttaattgtaatgactttgttttatccacagttaagccttttctcattacatatttatgtatttcactgtcatgtcaagatgtctgcagaatcactgtgtgtaacaaacagccatatttaagacatgcctggataaataaaattggtaggaatgttttcttggcattatatttaacttttcttcttctttttccttgacaaatcttgataagtttttttatattagttttattttctagaaaatgtcttatgaatttctcctatttgctctagcatgcttatagaaaatgtcagtgtttcttacagctcaaatttgtgtagttgttttaa

SEQ ID NO: 82510 - DNA, 1100 bp, Homo sapiens
cagtagatagaaactttaataagcttaaagtgacttgtctgtttagttttaaaagattgattcccaaaagcccaagagctagcttgtagtatgtgtgggcaggctattcccatgctgtcaataccattactgttgtggtggtgtatttcatgataaagattctgagcttccgccatttagtgacattgggagaaacgaagttgggtatatgggaaatagaggatggcagattccatttcctgtcataatagcactttaggattttttagccaagatcatgtttacatactgtactaaagatatcattattattcaactactgagaactagaatattaagagactgctggcaaggcaagcagttaattttcagttgaaattgcattaaataaaaagtattttcttgctttgtggaagcacgtgaatttttttaaaaagctgcttgttttccccatttacaggttctgtacagagtaatgagatgtgtgacggctgcaaaccaggtgtttttttctgaggctgtgttgacagctgctaatgagtgtgttggtgttttgctcggcagcttggatcctagcatgactatacattgtgacatggtcattacatatggattagaccaactggagaattgccagacttgtggtaccgattatatcatctcagtcttgaatttactcacgctggtatgtgaattattcttttcctttttaatgtgttggtttattcaggcccttaaatcgatatgtaagaaattaagggctttgtctgggcatggtggctcatgcttgtaatcccagcactttgggaggccaaagcagaaggattgcttgcatccaggaattctggcacagcttgggcaatgtagtgagaccccatctgtacaaaaagtcaaaaattagcttggtgtagtggcgtgcacctgtagtcctagctactcgggaggctgagggaggaggatcgattaagcccaggaacttgaggttgaagagagctctgattgtgccactgcactcagccaaggtgacaaaaaaaggccctgtctccaaaaaagaaaaaaaaataagggctttgctttattatattattttcttagagtac

SEQ ID NO: 82511 - DNA, 1131 bp, Homo sapiens
catataactagagcatatgtgctagaatttatttttccctaacagctttctgagttgatttaagagattatttctttaatttgttgtctgttgggtttaatgttggctttttgaaataattaggtaaaacccatttttatatttagagtcatgaatattctcatgggccacagttctctttctaaaagcctaaaaatctattctaaaatgaattgattgaaatattttagagttttttttttttttatttaaaacaatgtactacttattaagaatgctgtgaattcacatctaggacctcagccatgtggcctctggggaatcagtggatgaagatgtccctcctccatcagtgtcattaccaaagctggctgcacttctccgggtatttagtactgtggtgaggagcattggggaacgcttcagcccaattcggggtcctccaattactgaggcatatgtaacagatgtaagtgcttttgggcatttcaagtgtcattcaaaaataaaattgttttacactgtaaatgcttctctttacctggtgaactgttattaatccttcatttgtttagcatgtatgtatgtatgtatatatgtatatattgtctgactgttttcttgaataactagaaaagtagggaatcctgttacatctcatcctcctttcatccaactcccctaccctcccatgacaaaaggccactctgaatttttaaatcttattctttcgtttttaaataatatttattataattttacttttaaattattgggtttccttttagtttttcagcatactacgaatagcacactataggaaaagcctcagaaagtaatcttctctgaacataagatggaactcatatgaaaacttgtatacctttatattctttgatagcctgatatcaaagaacataaacaaattaaaaatgaggtagctagcttgccacacttcagcagcctcaaacattagctgcactgtatgtagcacatccaatgagggttcagtggaaaagacacaagaaatgaaccccaggcattgtactctgctttgaataaggagaaagaagcatgtgtgatatagtcataaaagatttaatcgaactgatgaaaattttactgttagga

SEQ ID NO: 82512 - DNA, 1102 bp, Homo sapiens
attctcctgcctcagcctcccgagtagctggaattacaggtgcccgccaccatgcccagctaatttttgtatttttagtagagacagggtttcaccatgttggccaggctggtctcaaactcctgacctcaggtgatccacccgcatcggcctcccaaagtgctgggattataggcgtgagcccccgtgcccagtcaatattttaaacatttatttcagatgtgtttaagttaccaggagaattactggagagactaaaagaaacgttgcaagcttcgtatttcgcaaagctttacatactcttggtagctggtatttttctaaagacattttttgttatttatttttattttttgttcccggtcttcagagtcttaaagcaaattgatgtggtgttataaaaaaacacaaaacaccaaaagcccctaaagattttcctcttacatatgtacaggagatcttgaatcgtactttggaggacaagccttggctttagccagcttttgtggctgtacgaatatagcataggagctttaagagcgctgctgaagcctctgttactggcacttggcttttctggccccactgtcgtggcttaactctgtgccatctcttatctgaatctctttgtgtttctcccctattcagatcaaccaatcaaggctcccataaagattttagcctcattttgtttttttcatctttgctgcttgtagtcgacaggaattcagtacctttagctgtactgatttgtttactctttcctagaaaagcaaggaagtgtttcgcttctgtgttgttttttctttgcccccacacctagaacgtctttttttcacagcccacgtttaaagctgatttacctctcataagccacacattctagtttgtagagatgcttccccttgttatccttaagatctcattctcttctgttattttgctgcttaattttaggtagatgcatacattggttctagtatcccagtttttgcgaatcttgtccttttcatatatcgtacttcttcaattacacatctgtagaccaggtcttgtaatctccctttgctcttcatgtgcatgctcttggtttggaggactt

SEQ ID NO: 82513 - DNA, 1038 bp, Homo sapiens
taaagagagcatttagggatattgtaaacagatgttattaaggactaatgttaactgatgtcaaaggactaatattaacaaacattgaagaagagaaaacagtatttgtttttagcttaacatcttagtggagtgaaatattttcaatttattttatttatttattaattattattttttttgagatggagtctggctgtattgtccaggctggagtgcagcagtgcaatctcagctcactgcaacctctgcctcctgggttcaagcgattcttgtgtctcagcctcccaggtagttgggatttacaagtcaattttttttttttttaactaaaactacagaatctatttttcttggtctcatattcagttttttatgtagtcagtaaataatgaacctaatttgcttgttttctccctattttgttgaatgttcacggtttgtaactttttatttttaagcttgtaatgaccagcctgcagtctattcttgaaaatgtggatacaccagaattgctttgtaaatgtgttaagtgcattcttttggtggctcgatgttaccctcatattttcagcactaattttagggtgagttcctcattccgcttttcagatcatggggtgagggggatggttgtgtgtgtgaggatctgaggaaacagatggaaaacaatgcctcagctcctttgaatataatcagtgatatttgaggttccagggttaaataccgcatttttctttctgacattcataccttaaaatatttgaagaaaataaactatttcattgttgtcagaaatgtagttcttttattttcctgcccctctcccctttctaagtttctagaatgtcaagtaggtagaacatagatgctccttttaggatcttttgctgtgaaatggtccacaggtgaatggcagtaatatcttaaaatgattggccccctctctctttgtttccatcaaggatacagttgatatattagttggatggcatatagatcatactcagaaaccttcgctcacgcagcaggtatctg

SEQ ID NO: 82514 - DNA, 1113 bp, Homo sapiens
gttatttgccaggtactctgctgggatctggaatatagagatgaacaaaagagtgataggacctatattccctgagcttttattgaccagtggactgtgacttttgatgtaattttatttttgagagagggtcttgctctgtcacccaggctggagtgcaatggggtgatcttggctcactgcaacctccgcctcacgggctccagtgattctcctgcctcagcctcccgagtagctgggactacaggtgcacaccaccttggctggctagtttatgtaattttttgtatgtctgtggagacagggtttcaccatgttgcccaggctggtctcaaactcctgaactcaggtgatctacccgccttccaaagtactgggattacaggcatgagccaccataataatttagttattatttaaataatttttaatttgaaaaatttaaaaatatctttgcttatttatactcaatggacaacaaaatgtttatatattcacagagagatcgatgtcttattctgatgagtctcgactgtcgaatcttcttcggaggatcacccgggaagacgacagagaccgaagattggctactgtaaagcagttgaaagaatttattcagcaaccagaaaataagctggtaagtatagtatgtttggaaatatgaggatttttgtgtttccataataaactaggtaatgctaccttgagtagtttaagaatggggaaagtctgtattatgatgatcgagaacttaatgctctctaatatgtaatttctttttcttcttaaagacaagatcttgctctgtcgcccaggctggagtgcagtggcacaatcatagctcactgcagtctcaaactcctggattcaagctatcctcccactgcagcctcctgagtagctgggacttcaggcatgttccactacacctggctgaggtggaagaatcacttgagcccaggaattcagggttgcagtgagatgtgatcacacctctgcatgtcaacctgggcgacagagggagtccttgtctcttaaaacaacaacagaaatgtaacaaagtataggaagggttaaatttttttcttcactttctttacaccaattaagaac

SEQ ID NO: 82515 - DNA, 1794 bp, Homo sapiens
gggggagaatttagaaagaattattcttattatcaagtcatgtgaggagaacactggaccagagtaaccaattgttctgttttgcctgggacaggagactttcaatggtaaaaccagcaaagtcaccctaatcccagtagttgttcatatttctgaatgggtctttagaacaatagaagagactgaaaagttggcatttcatccattgagaatctcttcccagtgaaagacttcttattagacagctgagtgcttacatataatatatagtacatattacactaaatagtaatggttaaatgtaaaatttgggagaagagaggcttgtataaagaaatatttatttatgttatttaaagttctaatcttaaacttttctctttttatagaactgatagtgcatcagccgacccagataatttaaaatattcttcatccagagatagaggtggttcttcctcttatggactgcaaccttcaaattcagctgtggtgtctcggcaaaggcacgatgataccagagtccacgctgacatacagaatgacgaaaagggtatatatattttcttattgctacaagcatgttttttgaacctacctgtctcaccttcctgccttcttatacccccaactttcttgctttcttctaatatatttaaaatatgaataacaaatgcagtgttatttctgaaaacctcataggacatttatccactttattatttttaaaatttaaaattttttccatacataattcataaatgcagttttcttacaaggaagatacaatactatttttgtttttattttcaaaaatatttagctaaggttgaagttcctcttggctactatctctaaacttcaagaaagttttaaaacaaggtacaaaatttgatttaatttagttttcatttctttgcttattttccaatgaagggatcaaaataaaattaatttaacttcaaaggtgtattaaaagaaatcaaaatgattttcaaggcagacagtacaggaaaaaggtaggagaagcaaaggctggttgagctgcagattgagtaataagatcctgagctatcaggaaattgactgaatgaaacgaacaatcatatttaaataacgtacacattgctgtttgtaggtggctacagtgtcaatggaggatctggggaaaatacttatggtcggaagtcgttggggcaagagctgagggttaacaatgtgaccagccctgagttcaccagtgttcagcatggcagtcgtgctttagccaccaaagacatgaggaaatcacagggtaaggctgggaaaacggggaccaatcacatacaccttccaaagacttgtatctcctcttattctggatgcctcttactaacgccttgcacaggcataagttgattagcctactgtgcaggtaaaaattgtttacattcatttcccactagaaaggttatagtacattttaaaagagaagcctcttaaaacaagattagaagactggataagatcttacagaaaaggtttacccaattatcgtggatattgaatgtatagtgcatagtaggctcttactacagcaagtccttgaactcttgggcctgtggaggatatagatatatatagagagggggtacttttctgtcttttttttttttctcttttaagttcagggtacgtgtgcaggatgtacaggtttgttatgtaggtaaacgtgtgccatggtagttggctgcacagatcatcccatcatctaggtattaaacccaccatccattaagctattcttgctgatgc

SEQ ID NO: 82516 - DNA, 2206 bp, Homo sapiens
caaatctcatttcctggtttatatccattataaattagatctcaccatgagagcaaaatcccttaataaacctaggtaaaagcaatttgaagtaatatgatgcttactccagtgacaccactaggtatggtgtttgcatcaagtcattttggggtgctttatggaaatacttcctagtagggaattccctgacttcacactttccagagatgacactctctctctttttctctctaatacttacaagaatggactgcaaggctacatttagtcaggcgataccatccccagcacatggtggattgttggtgtgaggtctaaggattctggtcatttgaaacgaatggcctcctagatttgtggcatttttctgtatattgagaataggtagctaaaataagtggtaactatatttgcatgtgatttgtatgttacagttaacatttaaattctcttatgtactaaaatttttttggttgccacattaagcctctttatcctgtaaggcacagagtggctttccacctcaatttttgctttaatgtatgaaccctaatgggaccatagttcaactaaaggcacctaactcatgaatgatatttgctccatgtttgaacaacaaatgttttaacccactgtcttcactaatattgtaactactgtcttacagattgacttgatgcaaaacatcacaaaggctccatattatacagtatgcgatttttgaggtatgagctttagaaacttacctctcatgtggcatgtacatcaggctttaacttcagtttgatcgttgtggggaaatttatgcatttctttttttttctctccatgatatttttagaatattaaaggggctgtagaggtatttttggatcattgctaggattcttagacttaacagatagattttcttttttcactaaattgagacactaattctggcagatgatatccctttcagctcttctaactaactagcctaacattcatgcctgcttcttggagttcaaatctgcagtttctattttgtggctttgattgcctcattttaagtgctcatttccgttctttaacagttttctatttattggactgggatgatcttgttggtgctaacagcctgacattgacattttttgaaacctaagtagtcaagattgtataaaaatagaaatttcatataaatgctaaagcattttgtgcttttaggttcagaatgcttacaacctgagttctggttggggatgctttgatcaatttgtattaaaataatttggcaactagggagtttttaggtatttctgagacagtggctctattccagttagtttttttttgttatatttctgaaaacacaaattttttttgggaaaaaaatctcagtgttcataacttaggggatttagaaaccttatttctaaccaacggggaagcggctcctggttttacagtttagtttgaaatcagatgcttcgtagttggaaacacattgttggtagcaacagattacccggtttcttcagtgaagtatttaagttgctctatattgactgtaaaaacttgtcttgattatattcatatactcatgaactgtttgtacattgtcttttagactggaaactgagtttattttgtattatggtcataataacttttaacataccctgcaaactaagcgtttctttataattcattatcttatttaagcctcacaacaaccttgcatgttaggtaggtatcatcctcattttatgcaagagacaaccaaggcttggagatcaagtaatttgtgcaaaggcacacatacttttcagtgctggagctgggatttgagcccagatctttttttaacttgtattctctgctgccttatggtactactgtgtcaccagaaagtgatacaaatatttaactcttaatagtaaaggtagtataggagataagtaaacatgatgaaaacaggaagtgaagatatgtttaaatattggcagactccatttatctttgtgtttccgaattagtcaagtgcttattttattcgctcatctaataagagcttactgtggcatacatataaagttcaaactctgtcagaaaagattataagctctcttatgtttcaatctcctttcagaaagtaatcgtatgctatgatttatatagatgcatgttaaatgtgctatttttaggtacataaggaatg

SEQ ID NO: 82517 - DNA, 2027 bp, Homo sapiens
actatgccagccaagaatttttaaaaaaggagtttcactcagccgacctcattcctcagcagggcacctgtgtgcagggcaaaactgctcaaccctactcagcagccctgtgaaagctgctgaaaggatgagcagattgaggcctgaactgtatcttggatttagcagcctggaggtcataatggattttgccaagagtgatggggcagaaattggaccagtgtgtgttaaggagctagaagaagtgaagaaatgggagagaggagtctagacaactttagtttggctgcagcaagtaaaggcagattgtttgatggagggacatgtgggattgatggagtttttcctttttatatgtttttgtatttttaaatgggatacattgaaagtgttgcatgtttatgggggggatttagttcagtgggaaagtatttgaaaagttacagtaaggtggaagtagatggaatcctaagtaaggtctagaatcaggtgcaggtattttatggtatcttccccaccccaccccgagacggagtttcgctcttattattgcccaggctctggattgcagtggtgcagtcttggctcactgcaacctccacctcctgggttcaagcgattctcctgtgtcagtctcccgtgtagctggaattacaggtgcgcaccaccacacccagctaatttttgtatttttagtagagatgaggtttcaccattttggccaggctggtatccaactcctgacctcaagtgatccaccgccttggcctcctaaagtgcagggattacaggcgtgaaccaccgtgcgcagctggtacctttttttttgttggtgaagtagaatgtgtgtatggggaggggaggtgataggatattttggaatttgaagagaatgggaatgtctggatagtgcatgtatagaatgggaagtaaacactggaggacctgggagtatggtgcttgttgatggatcattgagtttatccaggactggggttttaccagatgggtgtgatgaaaaccttaagagttaagggtataggcaagagtgttgttgaaatgatacacaatgaaatctaagctggttaaagaagtgaggaaggggccgggcatgttgcctcacgcctgtaattccagcactttgggaggccgaggcggctggatcccttgaggtcaggagttcgagaccagcctggccaacatggtgaaaccccgtctctactaaaaatacaaaaattagccgggtgtggtagcaggggcctgtaatctcagctacttgggaggctgaggcaggagaatcacttgaacctggaggtggaggttgcagtgagccagtattgcaccactatactccagcctgggcaacaaagtcagagtctgtctcaaaaaaaaaaaaaaatgaaatgaagaaggaggagaatacttggattgggataaagtagaaagagtcactggaattaaagttaactaaaaaactcataaactttagaatggtattgagaaattgtaatgtgaactgaaaaagtctcatgggattttagagccaagaaggtcttgagtggcagttcctaccttggtaggaatagcttcagtggtgtgttgcaggtggaacccagattaaagtgggttaaaaagtaagtgaaggcaaggaagataaatttttcaacaggtttgtctgcgaagagtccaggctattagattgatagagggagaaaggcagttaaagggtttttttgttttttgttttttgttttgagtcagagtctcacactgttgcctggtctggagtgcaatggcgcgacctcagctcactgcaacctccacctccggggttcaagtggttctcctgcttcagcctcccaactagctgggattacaggcgcccaccaccatacccggctaattttttgtatttttagtagagacggggtttcactatgttgcccaggctggtctcaaactcctgaactcatgatctgcctgcctcaccctcccaaagtgctgggattacaggcgtaagccaccgt

SEQ ID NO: 82518 - DNA, 2081 bp, Homo sapiens
ctccgccacccgggttcaagcgattatcctgcctcagcctcctgagtagataggattacaggcatgtgccaccacacccaggtaatttttttttttgtatttttagtagagacagggtttcaccttgttggccaggctggtcttgaactcctgaccttgtgatccattcacctctgtctcccaaggtgctgggattacaggtgtgagccaccatgcctgccctccttctacattttctagtgtactcccattaggctgtaaacctatttcaagttgaacaataagaaatttcagcatagctctgcatcatcattttttctccatatcttgtattcacaccttaagaatttgttactagttgaaatgataagccagcaaacataatctaatctttgtgactatttgcatagattggagggcaagtacaatgtaaatggaatgtatatagagaaagggtaggttaaaaggtagcttatagcttgcttaccttttactacacagttggaatttaagaactgattcttataagaacaccagttgaacgatgaattgcttttttccctctggtgtagtgtgtatggctgtgtatatacatatttttattttaattttattttttaatgggaggagggaggatgccagaaacattgaaaggttgtattctgccaatgtgatagttttaagtacttgagggggtggagaagaaccacacgcatcttctaagcaaagatgggaaatatcatatcattataagaatgtatatacagtattaagcaattacaagattttgggccgggcatggtggtgctttgggagaccaaggcagggaggtgggtggatcacttgagcccaggagttggagaccagcctgggtaacatagtgagacctcgtttctacaaaaaataaaaaaattggctgggcatggtggcttacacctgtaatcccagcactttgggagtccgaggctgtcagatcaccgagatcagaaattcgagagcagcctgaccaacctggtgaaactccgtctctactaaaaatacaaaaattagctgggcatggtggtgcatgcctgtaatcccagctatttgggaggctgaggcaggagaattgcttgaacccaggaggcagaggttgcagtgagccaagatcacaccactgcactccagcctgggcaacagagcaagactctgtctcaaaaaaaaaaaaaaaatagctgggcatggtggcgtgagtttctagtcccacctacttgggaggctgaggtgggaggattgccttagcccaggaggtcgaggctactgtgagctgtgattgtgccactgtctcaaagaaaaaaaaaaaagattctggtactatttgaaattgtagtactgtaaatctataataaatgattgctgtctcttaaggaacttaatatctagaaacattgttttttttttcttgtaaaagggaattataaaagttacttcttttaaatcacttatgtcaatctgattaaagtgtgtttagtataaaatgtaacaaaagaaaaagatagggtttgtgtagactgtgggtttaaagtggcttaagtgatgattttgaagtttcctaggtgtcttatacttaaggctaaatacaaagacctcagtaaatttctggctactgctgagcatggtgggagcatcgtttcctgttcttactagtatgtttcagcagctagcaaaagctgtcttcatttaatacattttcctacagttaatagtgtgattatcttgaaaggcatcttcctttttcagtatttgatttgtgagaccatatcttctggaattacttgagacctctaattaaattgacgtttaaaattttttatttcattttcttttagagttggaggtcttgctgtgttgtgtggactggcctaggatgatgatgatgatttttttctttagagacacagtctcactgtgttgcccaggctggtctcaaactcctgggctcgagtgatcctcctgtttcagcctcctgagtagctgggattacaggtgtgagctactgcagctggcttggcctaggattatttttatttttatttatttta

SEQ ID NO: 82519 - DNA, 1437 bp, Homo sapiens
ttttttgagacagtcttgctctgtcacttaggctggagtgcagtggcatgattgacagggtttcgccaggttggccaggctggtcttgaactcctgacctcaggtgatctgcccgccttgacctcccaaagtgctggggttacaggccaacatggtgaaaccccgtctctactaaaaatacaaaaattagctggatgcagtggtgggtgcctgtaatcccagctacttgggaggctgaggcaggagaatcgcttgaacccaggaggtgaaggttgcagtgagccaagatcatgccattgcactccagtctgggtgacagagtgagactgtctcaaaaacaaaaacaaaaacctggagggtcagaggagggaaagctatacagttaagtatggagcggtagggtgatggaattggtctgtacaattttcactgtgaatttgggggagaatcccccccaaaatagaagaaaattaggataagaccaggtgcaaattgtcagtgtgtagagaaattgggtacttctgaggagtaatacaaataagaggtgaagctgaagcactgggttgggaaccctattgtaggccttgaatcatagttcaagtgtttttttctttgtttgtttgtttgtttgtttttggagacggagtttttgctcttgttgcccaggctggagcacaatggtgccattttggctcactgcaacctccgcctcccgggttcaagcagttctccttcctcagcctcccaagtagctctagggattacaggcacgcaccaccacacccggctaatcttttgtatttactagagacggggtttcaccatgttggtcaggcttgtcttgaactcatgacctcaggtgatccacccatcccagcctcccaaagtgctgggattacaggcgtgagccaccaccctggcccagttcaagtgtatttggagtgactttagggaatcatattagctgcgggagagtggcacaatttaggaagattaaatctagttgcttcttgaaaaagtgtgtgggctgggcgtggtggctcatgcctgtaatcccagcagtttgggaggctgaagtgggtggatctcctgaggtggggagttcgagactagcctgaccaacatggagaaaccccgtctctactaaaaatacaaaattagtcgagtgtggtggtgcatgcctgtattcccagctactcgggaggctgaggcaggagaattgctggaacctaggaggccaaggttgtggtgaactgaaattgcgccgttgcactccagcttgggcaacaagagcaagactccatctgaaaaaaaaatggagtgtgtgtgttagagtgcgtgcatgcatgtgcaagagaaatcgcagtgggaggcagttaattggaacaatatagagaaggggctgctaaggacctgagtattatgtttatatttaac

SEQ ID NO: 82520 - DNA, 1799 bp, Homo sapiens
accaagtatccgcggagctggaatgactggcaacccaggtgggtgaccggcccgggaccccgccccgacctcccgggctccgcctcgggcgggccgaggcctagggccgcggggctgggaggcgcggcctaggccctccacccctcggagccgggcgcggcttcctgggtctcctccgccccggctgggggaggaaggccgcggggaggcgaggcctaagtgcctcccctccctgcttgttcagcccggggctggagccgagacccggggctcccggcggtggcactggcctggggtcgggaccaggaggtgagaaagaggcgggggtgggggtggggggcattccagttacagcctccccctgaccccgagttgggagatgctgagagtccaggaccctccctgttactcattcactttctcggttccccactctttcagccgccacgtgagagctcttctaacctctgttcctttctgtgacccccacgtgttaatattgaaaaaaacaaaacaaaactccagctaaggcattgctctgactctaggcagaacattcattagtggagcatgagatgagattgtgtgactgttgatgggatcgacccacgctggtcttgggcgatggaagttttccctaagtgcaaggccggttactctggtgaatcgtaattcatacctggacacttgagtgaactctttgggcacccacttagaagtctagagaatttcctcatttatggaggatttgatctcagaccgttttggggcttagtgagatttgaatatattaggaacattaactttttaaataaatgtagtttcctgtctttttgatcaatgggagggcagctgtgcctaatttaggactgatttattctaatctctcttaataaatgcttgtattcagagtctgtttggaatttaacccaatgcttagaactccttaaatatacagaaatatattttaggggtaattgattcatggaactctcctactttggagcacaattgttataattgtccagaaactggccaaataatgtagaacgcgcaagttgttgggaagcccttttgtttcctgatagttacatgtaattccagcagtatttggaaataatttgctaagatgttagaatgtaacatttgaagactcgttagaaaaatcaataaaattatctttggctaataggtggtacacatcttagtctatttaatatgcctttccaaatactgtgtctgttgagaattggtgtatataactagatgactttaataattagtgcctgagtctagaattgagatgtttagtcgtaaaaaaaaaaatattgttcgataaacagcgttgacttgtcttgtaccacttaagagtttgtgagtgctttaaataaaattagttgattaagtatttttttctatgattgacatgcttagttttgcctttttattgaaatgtgtgaaatttgattttctggcatctaacaaattaggtggtaaataaatgacaatggattttctattatttttcagtattgtgatcagtataagtatataagagaatttagtaaccttttagaagaataaagtgcccttcccaaatagtcctacagcttttggaaaagtgtaaattgtagttggtagttctaaataaatagagaagagtcgcagccacgtgctagggccagctgacttcattgctgacaggtatgaagccaaatggcttatgtagttatggaatatgtacatgagctattaataaatattatccatgttgtttctttcaagtgctttatttcttg

SEQ ID NO: 82521 - DNA, 1929 bp, Homo sapiens
ttccccgcctcccggctccgcccgccgcgccgccgctgtcgcacggcatgctgggagcgaggggcggggttggcgcccgccgggcctggggagagaggcgggtcctgtcggcggggcggagccgagagaggcggggtcgatagcaggccgccccgccccccacgtccccaggcccttgggcggcgaagaggtctgggcgtagcggtgacgaatcctaagacaggggatctccactactgcggccacacacttttctcccaaacgcttcccggaaagcaccggagggccgggcagtcaggtgtaaacaggcgtccaatcaaggacctgcggtgtgggtgggggctggtgccctgcggtgcgcgcgcacacaggcgtgcccttggattcacgtgcgccagttttcccactttctacggggtggggtggaaagtgaaaatagtaagatcgagaggtggatatccaccttcccaacctccacctgaaatgtgcccatcgagtcctggcaccttttaccatttcttcacaatgaaaaaaactaaacgatggaagggaagggagtacccacgatcaccaaaccctgtcctctgcaatgtgaaatgtgctttgaagtcctttcaccctgaggcttgcccgccttctgctggtgaaagaagctgggggctaggcgcggtggatcacgcctgtaatcccagcactttcggaggccgaggtgggcggatcgtctgaggtgaggagttcccgaccagcctagccaacatggagaaaccccgcctctactaaaaatacaaaaattagccgggcatggtggagggcgcctgtaatcccagctacttgggaggctgaggcaggggaatcgcttgaacccagcaggccgaggttgcagtgagccgagatcagaccattgcagtccagcctggacaacaagagtgaaactctgtctcaaaaaaataaaagagagagagaaaggagggagggaagaaaaaggaaggaaggaagggaggaaggaaggaaaggaaaggaaaggaaaggaaaaaagaaaagaaagagagaaggccgggcgtggtggatcacgtctgtaatcccagcactttgggaggccgaggcgggcggatcacgaggtcaggagatcgagaccatcctggctaacacggtgaaaccccgtctctactaaaaatacaaaaaattagccgggcgtggtggcgggtgcctgtagtcccagctactcctgaggctgaggcaggagaatggcgtgaacccgggaagcggagctcacagtgagcagagatggctccactgcactccagcgtgggcgacagagcaagactctgtctcaaaaagaaaaaaaaaacaaagcagcagctgggtagaggagacgtacccgaccgtctaccccatgacgtgtcccatgccccagggaaaaaagttccctaaagcatctgatgcataacgtgaatgcacacacgttttttaaaagttgggccaggatgctccttaaacgagtgtctaaaccgtatctgcataaggagtcataacctatcattttatgttgcaaagaaaacgtctttatatatcgcttgtgcaaataaatattgttaccaaaagtacttgaagattacgaggagttgaccccttcacacacatgcatatcccctccaccttgggctccttgcttatggccaccaatccctcactaagggaggatcctgccagttctaaatgatggggactacaaaaattacaaaaattagctggcgtggtagcgcgtgcctgtggtcccaggaactcaggagggtgaggcaggaggatgacttgagtccagcgggtggaggctgcagtgacctatgatcccgccactgcactccagcctgggctgcggagggtagggagggagggagggaggagaagaaaaagaaaaggaggggcaccatg

SEQ ID NO: 82522 - DNA, 1048 bp, Homo sapiens
gcgattcttgtgcctcagcctcttgagcagctgggattacaggcatgcgccaccgtgccaagctaatttttgtatttttagtagagacagcgtttcaccatgttggccaggctggtctccaactcctggcctcaagtgatctgcctgccttggcctcccaaagtgctgggattacaggtgtgagccactgcgcccggccaaagtgtcatattttataaattaggaagctgaagttcagagaaactggtccaaggtcacacagcttttaagtgaccccttggatttgaacccaggtttatttcactccagagcctaagctcttaacccagtaagcaaggccctgaattgggccaaccgttctacctggatgttttggcttttgaagaatgttctgatgctttcacttgaaaacacaggttggccgaaatcatcaaaggagagatggacgtgagaaagctcacaggaacttttttttccctttccaggaaatactgattagcccgtggcttcgcagtgtgtagcatagtacagacactgtggggtgatgggttgggtcatggtgggtacctggcctcacttccgtcactcacaccaggcatgtcccgccggctgccccgaggctgggcaccaagtatcttcggtactcagtgtcctctggctcacaagatgttccggctcctcctgaattcagaagaacttatgtccctgcgcagtaacacagctttttaaactattgagaaatttcatgcctgttaccattatatcctttcttactccccatttgatatttccttcaagtctttcttccctcaatggaaatacttatttttaacatgtaggagaaaatatatgtgcttgtaaaaaacttcaaataaaggaactcctaatttggtgtatattattgtagatacagttatacatgtttaaatccctataaggaatacatacttaaaaaaaacttaaatggccgggcccggtggctcatgcctgtaatcccagcactttgggaggccgaggccggtggatcacgaggtcaggagatcgagac

SEQ ID NO: 82523 - DNA, 1139 bp, Homo sapiens
tgaacaagagacaaagctgctgggtagttaataagataaatgctgattaattatagcttctatgaagacaataaaaacaaggtagagtgacaagcgggctatcagttactgcagatgcggctgtagaaggcttctttgaggaggtgatttttttttatttttttattcaggacggggtctcactctctcgcccaggctggagtgcgattgtgtggtcatagctcacagcagcctcaaactcttggtctcaagccatcctcccaccttagcctcccaagtagctgggactacaggcgtgcatcaccatgcctggctaatttttaaattttttatagacatgaggtctccctatgttgcccaggctggtcttgaactcctgggctcaagtgattgtcccctctcagttccccaaagtgctgggattacaggcatgagccactatgcctggaccctagctgagacttgaataatagagagaggagcccattatctgaggtcctatttaaggatgaaagtaagaggcaaagagcacagtaaagaaatgagccaggcacttcagggggacaggagggaggggacagtgtggccacagggtggtgagtgatgggaagaggcaaggtgatattgtaatagcaaccagagtcatcaagtcacagtgccttgagggctctgtttagagttttattctgagtgggatgggaagctgctgaagggtttgtaagagtctactgtgcatttttttttttttttgagacagagtcttgctctgtcacccagtctggagtgcagtgccgcaatttcagctcactgcaacctccacctcccgggttcaattgattctccttcctcagcctcccaagtagctgggattacaggcacccaccatcacaaccggctaacttttgtatttttagtagagaaggggtttcaccatgatggccagtctttttttttttttttttcctttgagacagggtctcactctgtcgcccaggctggagtgcagtggtgtgatctcagttcactgcaacctccacctcctgggttcaagcaattctcctgcctcagcatcccaagtagatgggattacaggcacctgccaccacgcccggctaattttttgtatttttagtagagac

SEQ ID NO: 82524 - DNA, 2024 bp, Homo sapiens
cccaggaggtggagtttgcagtgagctgagatcacaccattgcactccagcctgggcaaaaagagcaaaactctccctaaaaaaaaaatgtagaatatctcttaagatttccgttatggtaaaaaccatatgcaataaatacctcattgtaagcttacccaaaattgatagatgtcaaccttttaacagaagaacagaagtttaagttattgtttaatgtaatcagttttcattttaatatctttgaaatctttttcaaaggactgtagttttgtaatggacttttcaagccttccttccattgtttttcttccgttcactggctccacacgtttcctggggagtagcctggaatttaaagttgggtgcaggttttagaaagctgttgctgttaacaataattctcccggccatctccactccactactcaaaaatgcctgaatccttgctcagaggagcaaaggtatcttctcgtccctttcttacagccattttcttgcttttccacaaagatattatttaaagtggaatatttttgtaactgggataccaatgagcttttcggtcttttcctgacttggtaaggtttatgggtttctaaatctaataactacagtcataccaccctgaaaatgcctgatctcgtctaaatctaataactggtgtcatggaattttgagtaaccaaagattcattccagtctcacttaaaaaaataaattctgctgggcacagtggctcatgcctgcaatcccagaactttgggagtccaaggagggcagatcacctgaagtcagaagtttgagaccagcctggtcaatgtggcaagaccccgtctctactaaaagtacaaaaattagccaggcatggtggcgtgtgcctgtaatcccagctacttgggaggctgaggcatgagaatcacttgaacctgggaggtgaaggctgcagtgtgcgagaccgtgccactgtactccagcctaggtgacagagggagaccctatctcaaaaaaaaagataggtgaaaagaaaaaaaaagttgtaattgtaaacatttctgcccagtgcctttatatttatataacattttcactgtgaccagacttgatgatattcaagttttctatttgtgtgtgtgtgtgtgtgtgtgtgtgatgaacacaacgaaaacgtactgcgttttttttcctattataaaagtgatactgaaatatgctaattaatatattaattttagttaaatgctgctaatatgcatacctcttacttgaaggtttttaatatgttttgataactttaataacttcaggtgatgtctgtataacttttaaagtgcagctctctctaacaaatgtgccttacaactcctgattaaacggcgtcttgaaggttttaaaatgtgatcgtgtatactggaattcaaagaggcttcttgtcagcagtcaagtgatgatggaaaactgtaatagtttgtaaagttcctctttgctttttcctaaaatgagagaaaagaaagaagtgtttaatgtagtcctcagatgagtgcttttaaagctccttggctctgttgaagccaaggagggtgtatgtgtgtaactgcccaactggttcattttgcccgctgcctggatacagcccattcatcaagacagaggaattgcagcagaggaattgcaacagagaaagcgtttgatacatgcagagctggctaaacaggagaccagaatattattattactcaaatcagtctccctgaaattttggaaactgggttttcctgtgtatgtattttctctctctctctctgtgtgtgtgtgtgtgtgtgtgtgtttgagacgaagtcttgctcttgttgcctaggctggagtgcagtggggtgatactggctcactgcaacctacacctcccaggttcaagcgattttcctgcctcgggctcccgagtagctgggattacaggtatgcgccactacacccagctaattttgtatttttagtagagacggggtttctccatgttggtcaggc

SEQ ID NO: 82525 - DNA, 1067 bp, Homo sapiens
gaacctgggaggtgtaggttgcagtgagccagtatcaccccactgcactccagcctaggcaacaagagcaagacttcgtctcaaacacacacacacacacacacacacagagagagagagagaaaatacatacacaggaaaacccagtttccaaaatttcagggagactgatttgagtaataataatattctggtctcctgtttagccagctctgcatgtatcaaacgctttctctgttgcaattcctctgctgcaattcctctgtcttgatgaatgggctgtatccaggcagcgggcaaaatgaaccagttgggcagttacacacatacaccctccttggcttcaacagagccaaggagctttaaaagcactcatctgaggactacattaaacacttctttcttttctctcattttaggaaaaagcaaagaggaactttacaaactattacagttttccatcatcacttgactgctgacaagaagcctctttgaattccagtatacacgatcacattttaaaaccttcaagacgccgtttaatcaggagttgtaaggcacatttgttagagagagctgcactttaaaagttatacagacatcacctgaagttattaaagttatcaaaacatattaaaaaccttcaagtaagaggtatgcatattagcagcatttaactaaaattaatatattaattagcatatttcagtatcacttttataataggaaaaaaaacgcagtacgttttcgttgtgttcatcacacacacacacacacacacacacaaatagaaaacttgaatatcatcaagtctggtcacagtgaaaatgttatataaatataaaggcactgggcagaaatgtttacaattacaactttttttttcttttcacctatctttttttttgagatagggtctccctctgtcacctaggctggagtacagtggcacggtctcgcacactgcagccttcacctcccaggttcaagtgattctcatgcctcagcctcccaagtagctgggattacaggcacacgccaccatgcctggctaatttttgtacttt

SEQ ID NO: 82526 - DNA, 1020 bp, Homo sapiens
gcgggcgcctgtaatcccagatactcgggaggctaaggcaggagaatcacttgaacccgggaggtgaaggttgcagagagccaagatcacaccactgcactccagcctgggtgaccgagcgagactccgtctcaaaaaaaaaaaaaaaaagctttaaaaagctgaattttagaaatatttctagcagtgtcagtgagttcctcttttaatagtgttttaaagtataaatctggtaacatactgttcttgtagttttttgttagttttgtttttcaggttaattacccaaagcctcatccatcctcaaggtttttaaattttatttttttaaaataaattgtgcattgtatttgtgaatttttaaaatattactgttttatttaaatgccatgctgagcaattgttctctgtacatggtaaccaaaacttagagatttcgatcaattttgatcaatgtttagtaaaccaaaacatgtactgtgtacaacggaaataatatggcatattagccaggcatgatggttgcccaagacagttaaattaagctcaattctgtattttattagggctctgttatgtccttcatctgaaatgtacacatttttggtgtatgcttggtactggagattcatatatgcaaatattctcatgcaagaagttccacagtaacaacagcaaaaagaaaaaattagttgtccagccagtgctggaggaaaatgtttctggggaagatgactcagtcattttgtggcgagacaccctttggtaactcccactgaccagtcttgggagccttcctggaatgatcgtgggctgagcggagatgttttttgcaaaatgaaactgaagctgaaagaaaggagaattcgagtgaaccaagagaaatccaaagacctggggaaggaggacttaagatgaaagtgaagcaagagagggaaggggaaatgaagtgaaaatggcgtgagggtgtgagagaggtttgggttaggaaacatgtttttagtgctatttccaaccagg

SEQ ID NO: 82527 - DNA, 1014 bp, Homo sapiens
aatgaacctcggtaacatttccaatgtccttcaagagggaaacaagttcagtgttatcatcgtggcattcgttagtttttttttttttaaatcacttgtttagatacaactttatttttttatacctacatagcacatgactggggggataaagcatgtataagttgggagagggtaaagaatgtgtgactatgtatacagaaaatagactaaaatgtgcagcaaaatgatatatactgtaatctggtttttgaagtatctactattctggaatattgttaaacaactttttgcttttgaaaaaaaaaggtgccttgattcagttgcgtgacttagaacattcatcctattttattgtgatttttaatgtcttctgaccccaaactgtgtttttggttgcagtctggcggctgcaggcatagcgtcggttttgttccaataacagagaccaaagagttaatcagatatggttcagctgctacaattgtatgattcaaaggcaatttaatcaccccaaatttccatggcccccacagtcaagacctgccattcgttttctcttgcaggttggagtaaatttgcactttgaatcatgtgggtcatttggggaccttgttcttttctattttgctttattaataaaggaacttgtagaaacctctggactgaatgtcagatctggggagggctttcgtcttcccggagggcagcctgtgcctgtgctggcttgtagttccttgcacaagcctcaactgctttgagcatctgggtgtatgggaaacttttcccatgcattaaggctggggatcattcttgtgtagaattagctctgtatacaggtgggaaaaaaatgctagttcacaatgctacaggtgtgctccctggaatcctgaatcttcaagtcttcctggcctagaaccttctgcccccacctctcctctctgcctgactctcccacccctgctcccccacacatacccaaacacaatttacgtcttggcctgtggctcaaga

SEQ ID NO: 82528 - DNA, 1140 bp, Homo sapiens
agaagcttacagactcccacgtccagggtgcatcttggctcacatcttgtcccctcagccacagctgggggtgctgctggtcctcccattcccctctgggtcacatatcccctcatcgtgtcctcagacgcttcagcctgccgggaactctgtgctgtgtcacctggcggagcctcttccattcatctcctgccttagattccctgaattggcttccctttcgtggaatcgccagtttctcttcaagttcaatgaaggtcacattactgtccacccactgtgtgctgaatgttgtccaggggctattgagtagtcgcccaacaaacacttgggcgaccgcctactaagtgctggcactggggatacagtgatgaaaacagcacagttcctgcccctctgggtgcgcaatttagtgagaaatgaacatgattaccggctcctggagttcttaatggccgccttcagcacagagaaattaagtgacttgcccaaggccacatagctgcttaggggtcaaggtgggatctcaagaggggactgtggtagatatgttaagcatctcatatggcgatgacccagtgatgttggttttccttctagaacaaggtgttaaactttgttgtcctgtaaagtgccagatactattttttttctcttggaggctcacatggtctctgtcacaactattccactctgactatagcaccaaaactgctatggacagtagtaaatgagtgggcgtggctgtgttccaataaaactttatttgcaggcaccaaaatttgaattttgtatactttgcacgagtcaagaggcattcatcttttttttttttcaaccttttaaaaactcacaaattattcttagctcaagggctgtagcaaaacaggctgcggggctggttttgatctgcgagccttagtttgccaacctctgtttagaatgcatgggttgtctttcttcctctttctttctggtgtgaattggttctcttccatcggtgtcaaacacgtgagcccaggagacccaatgccagaaagactcagcatgcctgggaatgtcagggcaccctctttcatcttctttgctttctctctgctccttgacactcatcttgcacctgggctttgagaaagttgg

SEQ ID NO: 82529 - DNA, 1059 bp, Homo sapiens
ccgaagactgggtaatttataaagaaaagagtttaattggctcatgggtcctcaggctgtacaggaagcatgaggctggcatctgcttggcttcccaggaggcctcaggaaacgtacaatcatggaggaagggaaagagggatcgtgcacctgacatggccagagcaggaggaagagagtgaagggggaggtgccacacacttttaaacaagcagatctcaggagaactcactcactatatagtaccaagggagatgatgctaaaccattcatgagaaatccactcttatgatccatcacctcccaccaggccccacctccaacattagtgtttacaatttcacatgagatttgggtggggacacagaggcaaaccatatcagaaaggcagaaaaaagaaatgcagcttgatggcaaatcttcaaaaagttaaaaatagaattagcatgtgatctagcaattgcacttgtaggtatatacccaaaagaattgaaagcagggactcaaactcttatttgtacacctacgttcatagcagctttccttacaaccaccaacaggtggaagcaacctgaacatgcatcgacagataaatgggtaaacaaagtggtgcatacatacaatggaatattactcagtcttgagtaggaaggaaattctgacccatgctacaacatggatgaagctggaagacattatgctaagtgaaacaagccagatatgagaggacaaatgccgtatcatttcatttatgtgaaatacctagagtagtcaaactcatagacagaaaatagaatagagattatcaggggctgggggaaggacaggatggggagttattatttaatgggtgcagactttcatttggggaagataagaaaagttctggaggccaggcatggtggcctgttcctgtaatcccagcactttgggaggccgaagtgggtggatcacctgaggtgaggagtttgagaccagcctggccaatatggtgaaaccccatctctataaaaatacaaaaattagccaggcgtggtagtgagcacctgtaattccagc

SEQ ID NO: 82530 - DNA, 1023 bp, Homo sapiens
tgcagtggtatgatcatgcctcactgcaatctcaacctccggggctcaagcagtcctcccgcctcagcctcccaagtagctgggaccacaggcgtgcaccaacatgcccagctactttttaaatttttttatagagacagtctcattatgtaacccaggctggtcttgaattcctgggctcaagcgatcctcccaccttggcctctcgaagtgctgggattacaggcataagccactgtgcttggcctcttctttttgagataaaggaagaaattaggctggactttgagtttcaatttctactatgcctcgtgctggctgggtggctttgagcactcaacctcttaacttctccgagcctcaaattccccatctgcaaaatggcaataaaaatagggctgtgatatggatttaagtttaaaaaagaaaaacaacaacatatataaagtgcttttctcagttcgtagtacacagacctcaagatttgctgttactgatttttaattattataataaagttaactgaatcgtcattatgactgttggaaggaaaaacatgaaaaaaaagttctgtcccagcagctgctgtgaatcacgaagtgagccagaaaagcttgaaaaacatcacccttaagtcatggatgaaacttcttagaaccaaagaaatgtcatagctaaaaaagaactcaaaatctacatatacccgctcattgtataaagggggaaactgaggcccagggaagggatatgatgtaccttgttttgcaaaaaaaaaaaaaagaaaaacctgaaaaagcttctaggtttctgaaagaagaaaaaaaagagagtgctccagtgagaagaggttttgcaaaagttggaaagacaatgaggaccacctgcgttgcagtgtgtcagagctgccctgtaggaagaaagaaaaggggaagaagcaggcctgtgtagactgcgttatgtctcctccaacagttaagctaactcatgaacaccctgatgatgggctgtggggacctctcggcc

SEQ ID NO: 82531 - DNA, 1405 bp, Homo sapiens
tgactatattcctatgccctcattattccccacatcccagccaccgatccatggtgccacttttaaaagtttgtatagaaggggaaatgttaggtctcactgcaccccataaccttgcatattgagtatgatgggcataaaataccatctactagatgatggaattgtaaagactgagggggatgattcaataaagaggttggcagtgtacgctgggtcagcacccaataaacattatgtacatttactatcattataatgggaagtgaaatcagatcatttggagatgcaacaaaagagaatgtatcagtcagaataagttaggttatactgcagtaacaaccccccagatctcagtggcttcgaacacaaaggtttatttcttgctcgtgttatatacacagtgtggattagcaggagggaccttcttatgttagttactgagggatccaggctcagagagaagcagccatcttgaatatcgttgatcgccattccaaagggaagatgaggagttctggagagtctcacaggggcattaagtgctccagcttagaagtgacacacattagctgggtgtggtggctcacgcctgtaatcccagcactttgggaggccgaggcgggtggatcacgaggtcaggagatcgagaccatcctggctaacatggtgaaatcccgtctctactaaaaatacaaaaaaaattagccaggtgtggtggcgggcgcctgtagtcccagctactcgggaagctgaggcaggagaatggcgtgaacctgggaggcggatcttgcagtgagctgagatcgcgccactgcactccagcctgggtgactgagcaagactccgtctcaaaaaataaaaaaaaaagaagtgacacacattgcttctgttcacaattcattcactggaactagccatgtgcccccctccaaccacaggggccaggaatttctatcttaccatgtgccccaaaggagctatttgcagacagaatgaaagactgccattgaaggtaatcataaatgttgtctcttctgtttagaaacatctttttgaaaatatcaatcattggcattctttgttactattggctcaacaccgtggccctgtctggtgaagaggtgagattctatgcttctctgccttaagtttggtttcttagcatttgaccaacagggaggacaggggtttctcaagagccatcacactccgtatttggtattaatcccttgtgggaagagaatgaaaactaatctggaaagcaacataaggcaaaatgggtctcaacaaaaaagctcaggttctagagtcaggaggacctgatttgaaggccagctgtgctgtgtcatcttccgagtcacttaatctctttgagcctcagttttctcatctgtaaaattgg

SEQ ID NO: 82532 - DNA, 2186 bp, Homo sapiens
acaatggctaacatttattgaaatcttaactattcactagcacagtgctctgtgttgtttatgggtacttaaataaaaaccggtaagggagtgacatgagaatgatatacaccaactttaagatggtaattacctctggagaggaaaggaggagaatgaaagggagaatttcagctgtatctgtagtgttgatagtaaaactgaagcggataagagtgcaacttctactgcatcctagcttgtgcagccctgggcaagtttcctactctttctttgtctcagttttcttatctgttaaatgagaatattaatagtacctgcttcagggttgtgaggatcaaataagttaatacatttaaagcacttagaagagtgcctggcaagtagaaaaggctcaataaataatagtttttgtttttgtttttgttttagtacagaaagagactgaggaaattaggtcaaaatattcacatatgttaaatcttttttactgtagatgtttgcaatagaccatgacttaaaatattttttaaaaaattaaaaatcttgatcatagctgggcacagtggctcacacctgtaatcccagcactttgggagactgaggcaggaggattgcttgatctcaggagttcgagaccagcctggacaacatggtgaaaccccatctctacaaaaaatacaaaaattagctgggcatggtggcacgtgccagtagtcccggctacttgggagactgaggtgggaggatggcttgaacccaggaggcggaggttttagtgagccgagatcatgccactgcactctagcctgaacaacagagccagatcctgtctccaaaaaaaaaaaaaaagaaagaaatcttcatcgtaatgagcatttcacatctttattgtgatgaggaagccaaggaagcaaacattaaatagtgtgtctccagaggagcatggctcgtgtaatttaaggttcaaattctctttttagataaattctaatctacctcatcaagcttaacaacttatgggccaacagccagtgctgcttacataaacaaaatgtgatatgtcctagaagcaggcgtggtgtctttgtggtagagggtggaattaaaccaacaaaaacctgactcatttatgccaaagtagtgaaatatctgactaatcaacaaccgtagggtgatcatcagaactgctgtaccaacaaatagtgtaggtaaacagtggaattgtctaagtattcataagccattgatgacccatatagttaaacatccagagaaaacataagttcctgaagtctcctagtcttccactgtgaaagtaagaagagtgggaaaattaaagtttttaaggaatccatcagttaggaattgaagtaaggttatatacacagaaaacagaaacagatcaggattgctgtttggtgggggaagtggaaggaaaatgaatcaaaaaggacagctgtcttaggagccctgctggtcttttgggtggttagatgcaaaataatgtttgtggccatttgacagtaatattcttgatgtttttgttaaggcagctaagaatggagcaacaggcgtggagttggacattgagtttacttctgacgggattcctgtcttaatgcacgataacacagtagataggacgactgatgggactgggcgattgtgtgatttgacatttgaacaaattaggaagctgaatcctgcagcaaaccacagactcaggtaagtagtttattgtcacttaaacagatcttttagcttttattggaaatgacagacactggtgccttctaattacatctgccccaggagagttgtcttgttttgttttgaactgtacgtaggtcttgtaagtaatgagcaagtgccaggaacaacagaaatttggcattatgtttttaatctttcccactgaggctaaatttggcttcagaattattgtcaagataatactgtctagtcatagaatcatgaggctgaaagtcattgcttggcaatcttcttgccttcaggtgtaccaagaagcaaattatacattcattaaaagcttcaagtaacattataatatcacattttaacttaacccatttaattcttctgatcctcataacaaacttctgaggaatcacagaattgtaggaatagagagtatcctagaaatcatctagaatagcactttg

SEQ ID NO: 82533 - DNA, 2689 bp, Homo sapiens
agtgctgggattacaggcgtgagccaccatgccccgccagtagtcaggcttttgatgtctgtattcatatgataatacaatgatttttgccagtttaatatacggatgtataattacctttagaaactatcctagttctctttttattcttttgcaaagttggattatttagatacaaaatatctatttttacattcattcattcattcattcattcatttttgagacaaagtttagttaaactttggagtaagcatgtaggtgcaggagtcttattactgaatcatttttgcttaatcaatgtcctggacaagttagtctttgttagagagggaatcgtttacgtaagacatttcattacttgctgtttattgcatatattattatccttggatgatagctatcctaggaggaacagttggtaatgttaataacatatgactagaagaaatttaagtgcttgtattctaagattaaattgcacatggatatatgaatatatgtgtgtgtgtatacacatatatatgttcatatttgtatcagattagatgtttctttttataactcttttataactcttttaataacttaggcaggatgaccagtaggcatcttttcaataataatttgagccccctgtgatacaggataccgtagaaacctgtcatcttagtttttctttatgttttgaaatgtcagaattctgaattttcaatttcaattttattttagaaaacagtgaaatcagagactttttgtgcaatgaggaaatattaatttttaaatttcctgtttcaggttagaaaagcacctaatgccagtgattttgatcagtgggagatggaaacagtttactctaattcagaagtcagaaacttgaatgttcctgctacatttccaaatagctttccaagccatacggaacactctactgcagcaaagcttgataagatagctgggattttgccattggataatgaggaccaatgtaaaactgatggaatagacttagctagagattcagaaggatttaattctccgaagcaatgtgatagttccaatattagtcatgtagaaaatgaagcttttccaaagacctcttcagcaaccccacaagaaactcttatttctgatggtcccttctcagtaaatgaacaacaggatctaccacttttggcagaagtcatcccagatccctatgtaatgagtcttcagaatctgatgaaaaagtcaaaggaatatatagaaagagaacaatctagacgcagtctgagaggtagtatcaacagaattgttaatgagagtcatttagacaaagaacatgatgctgttgaagtggctgactgtgtaaaagagaaaggccagttgacaggcaaacactgtgtctcagttattcctgacaaaccaagccttaataaatcaaatgttcttctccaaggtgcttccactcaagcaagcagcatgagtatgccagttttagctagcttttcgaaagtggacatacctatacgaactggccatcccactgttctagagtctaattctgattttaaagttattcccacttttgttaccgaaaataatgttatcaaaagtcttacaggttcatatgccaaattacctagtccagagccaagtatgagtcctaaaatgcaccgaagacgttccaggacatcatcagcgtgtcatatacttataaataacccaataaatgcctgtgaattaagccctaaaggaaaagaacaggcaatggacttaattattcaagatactgatgaaaacacaaatgtgcccgaaattatgccaaagttaccaactgatttagcgggagtttgttcaagcaaggtttatgtgggcaaaaatacatctgaagtcaaagaagatgtggttttaggtaaatcaaatcaggtatgtcaatcttcaggaaatcatttagaaaataaagttactcatggacttgttactgtggaaggtcagttaacatccgatgagagaggcgcacacataatgaacagtacctgtgctgcgatgccaaagctgcatgaaccatatgccagcagtcagtgtatagcaagtccaaactttggaactgtgagtggactcaagccagccagtatgttagagaaaaactgcagtttgcaaacagaactgaataagtcttatgatgtaaaaaacccttctcctttattgatgcaaaaccagaatacgagacagcagatggacacacctatggtgtcctgtggaaatgaacaatttttggataacagttttgagaaagttaaacggagacttgatttagatattgatggtttgcaaaaagaaaactgcccttatgtcataacaagtggaataactgaacaagaaaggcaacatttgccagaaaaaagataccctaagggatctggcttcgttaacaagaataaaatgttaggaactagttccaaaggtaaggaatctttgaagcgtttgataccttctatgcagatacctttattttaatactcttaattgacatttttgggaaaaaagtggtctttattcatatgggcacttaattttatttatcttattagaaagcatattagtcagctacagtttattgccatttgataggctttcttaaagattttcttgagacaaggtctggctctatcaccccagtttggagtgaagtggcatgacttcagct

SEQ ID NO: 82534 - DNA, 1033 bp, Homo sapiens
ctcttagttagtaactaaatatctggaattttaacgtccagtcctttttgaaacctcaagctgagaaagctttataccatcaaggaaacactttctttgaaaatcaaaacaaggcaaaactacaagctacactaccagagatcctggaggacaagtgtcaaaaaaacaaatgatggtaggatgcagttgaggaccacatctgaaagttaagtagagtcaggagaatcttgtctgaatatatagtcctgggtctgtcatttcagatcaggatgggatctgttgaatgagtgggtaaaggtgatgcaatacaggtcttactttattgagtagcatgaaataaaaggagtgtggttcgaagtagagacccagctatatcttgattgtattatgtcagatccaggaatactctcttgtcagaaggataatttaaattgatggtataaaatatcagacattagacttgtgaattttctaaattgaggaaacatgtttcttttcagaaagcgaggagttactaaaaagcaagatgttagcttttgaagaaatgcggaagagactagaagaacagcacgcccagcaattatcactactcatagctgagcaggaaagggaacaagaaagactgcaaaaggtgaggaatgtggagggagatacaactggtaagtgaaatttagccaaggatacctatgaattttggtcatgtatagaatacgtgtaatttttgcctccatatatcttaaggtaagggagtcattttgatacgtgaatggtattttttgtcaaaatatgaattttgatatttagatccttatctaaaagtaattgcataatttatcgagaatattttattgaatccttgatttaaagcttaatattttaaaaaggtattttataaataggtgctaaagtacacattctgcaggagttgtatcataaaaatgacactcatgctgggcgtggtatcatgagcctgtagtcccagctatgcaggaggctgaggtgggaggattgcttgagcccagaaattcaaggc

SEQ ID NO: 82535 - DNA, 1049 bp, Homo sapiens
agaccagcctggccaacatatagtgaaatcccatctctactaaaaaatacaaaatggtggtgtatggacctgtagtcccagctacttgggaaactgaggcaggagaatcacttgaacccgcaaggtggagattgcagtgaaccgagatcgtgccactgcactccagcctgggggacagagcgagattctgtttcttgaaacaagaaagagagagagaggagagagagagagagagagagagagagagagagaaaggaaggaaggaaagaaaagaaaagagggagggagggaagggaagggaagggagaaggaaggaaggataatttgaggaagaaaaacttgaaataaataataattgctgataattacatgtacttttggctaagcctaaaatgatatcattttgggacataattaaaaggtttagcatgttacaataaactgttcatgtataggaaatagaagagcaggagaaaatgttaaaagagaagaaggcaatgacagcggaagcctctgagttggacattaacaatgcagtggaattagaatggagaaaaataagtgactctagtttgctggaaacaatgctgtctcaagcggactcactccatacttcaaattcaaatagttctggtaaatatttaaaaatccttttacatttgggaaagtgatcctacggtaagatatttatttggcacactataagattatatctcctgttttcaaatgattccatgtccaaccctctttgccagctgcttagtaaccagtgaaaaatgacatgataggagatcaaagacttgtgagcagatgtttgtgaacaaagattacctttgccaggaaaagatcaggaaatttggcttagagcccagtctgatcattcatgcagcaggtgatatacttcaagtgaaaacagtttgctctctcctgagtgatcttgaattacctctaattccctagtccctttaaatagcttatcttcatatctcaattatcctgagatgctgtttgtgttgaaaagatccacctggtatgtaagctttaaagtc

SEQ ID NO: 82536 - DNA, 1930 bp, Homo sapiens
atttaatttgtcaacagagtccttcagccaaaccaaggacagaatgcacctgttcataggctacttagtagacaagggtaagaatgccacacacgggtattgaaaactacggaaaccaagattagatttgagagggaaaaataaatctagtgttctttatgtaaaggataatggtttttcaatgggattttttttctttatagcattgggaaagatattttaaagttttgtcttcaaatgtaaccctcttggtgtactgttgtgtattctaattactgtcttaagttgggatgtttttacttttcatttcataccattttactcataaagtattttaaatatccatatagtaaattcagcatcaccgaagtgattctccaacagagtatgactcgtgcttatagtctcctgctgaagccagagtttagctttccttactgtgcgcatgcatgagacttcagttcttttcaagcttatttgtgctttggacagttgatgcaatgtgattgctttctttgaattttgaacatttagaccttaatgccagtgacttattaatttttttatattcaattagaacccctaagacatcagtgaagggggttgtgcaaaatagacagaagccttcacagagcagagtgcctaacagagtgcctgtttcaggtttgtagaaaataaattcctgaagcccattcaatagaaggaagtgcacaagctgccccataactcaggccatagaagtggaatagattgtctttccttgccaccataattttggcatattcacagtcatcttattagtgttctttggtcttagcattgtatggcagtcaggaagtcttagtaaaagtgtgattccagtcttcatttctataatatttctgtggaaagcaccttgtatttttcattctgaaaaaattgtagaatttgccatgcttaattcagaaaacctttttatttaatgaataaaagataacgatcatctctggtgctaagtctgtgcattgtctgttcagcttggggaagtgtatctgcacataaggggataaactttctccctcagactataagatcacatgtgaatatgccagtgggaggagggcttcatattttgctcagtccaaagcttgagctaaatctctccttatgttcattatttgaggattaagagctaaactaaaaactgtattttaaaattctgtttatggtggcaagaagacaaactcattcttgagcaaattcaaagctcttaaccaaatgctttaatattttttaggtatctttgttaagacactttgattaagctcacttaaaaattatgtgatccatttaaaaatactttccaaatgttgtgctttaactatactgctttctagacatttacaacaaacctaaattaatcaccaggcattgaagattaaacctttaatcaattttaatctttccattaatatacaattaggcaaattttagagctttattactaagtgatttccttcaaattaggagggaacaagctattggtcgtaactttgaaatgatggctgaccttttgtatgtatgtagtgaaggtaattcatagtgtcacacatatataggataatttaaaagatcatctttggaaatcattgtgagtgacagttaatggaattgtcttaaaggattacatagctgaagatactgtttactccagaggcagtcagaataagctagtttgaaagataaccatttgaaaggactcagaccaaacaccaaacctgtggaattttaagacattttctgtttttctcatgttagtattctatattgcactgaaacttagcaagttggaaaatcattgaggaattagtattgttttgcctgataccaatttgccacagtgactactctccatgttcttttctcatgcatttcatctccactatttgtc

SEQ ID NO: 82537 - DNA, 1719 bp, Homo sapiens
attcctgctccacacccctattttcctcttaataatacgtttgggtgaagacaaattagtgtttagtaattgcatcatctctgtgcttacctatacaaacataagtttattttatatgcccagatgtctacagagaccctttttgtaaatgtcaaggacatttggatttacttttacagaatattgaaaagataagacaaattataaataagttctaaaacataaatttaattcatctctgcatagtgatttttgaatttgattcaaagggaaattattgcagaagaatgcctttccctcattttataactttaaaaacttggattaaccactcaatgtccactttctttgacttacagtataaccatgtagccaattgtggcccactaaaatctacagaagttaatgtgggtcaccattttggtcagaagcatacattcctgtcagacaactagttgtctgacagaaatgttaggcttcatgtatgttaccccagtactgttagaaacatttgtactaggttataagatctttctgtgacaggtaacaaatttggggaagacagcacaatcttcttgaatgtagctcttgggaatgcattattacatccatttctgtaacataataatatgttgcatgcagttatattttctatttagtctgtatattttgttcttcatagtctgttttttctagcatgcttgatttaggagagaataaagggctatataataataaatccagatttccggataagaatattgcctggttaaaattctgcattgcttaaagacacccatgtttaagatttttcatcactaacatatccattaaaagtatcaactggccaggcagggtggctcacgcctgtactcccagcattttgtgaggccaaggtgggtggatcacctgaggtcaggagtttgagaccagcctgaccaaacatggcgaaaccccatctgtactgaaaatacaaaaattaggcatggtggtgcatgcctgtagttccagctacttgggaggctgagacaggcgaattgcttgaacctgggaggcagaggttgcagtgagctgagactgtgccattgcactccagtcgggttaacagagcaagacactgtctcaaaaaaaaaaaaaaaaaaaagtatcaaccaacaaatgttaccaagataacgtgacttcatgagggagaatgtcactattaatttatcataccatttccaaaaagggctttgtgcttttcacataaaattgagacagtgtatatttaatctaatttaaattttaaagagatactggtattttgaaaatgcaacctatatatattcttaatatccttttaagaatatggagatgaagattgttttctccaattttctgtgccattttaaatttaactttgacatccagctatagacagaaataataagccaccctgggtgtaaacttgattttctttattgagatgtatcatgtattgaatgagtgaaccagaaaattagaagatggtcaaaaaaagtccaagttaccaattttttaaaatttataggcaaagtatcaaattgtcttcttaatatgataaactgtgctttatcattctgaaaactcaggatacagcttattcatagcattgtgggtctctccagtaagaaagatgctaaaagttttgtgcactttttgtgtgtgtaatgcaaattagttaaaacaaatagttttgga

SEQ ID NO: 82538 - DNA, 1034 bp, Homo sapiens
agtagaaattccctacttagatgttagttgttggttttgattggtagtctctagttagtgggtagttggcgatttgcaactgattaagcttaagttccattttgctacttatattgagttggattttggtttgctacatagggaaccccaggtgctgtagccatctcagtccagtgacctctcaattaatttttttaacacttcctaaccctaacttcctactttcccttccttgacagttgtgatcctgagtcatgtccatttgtcacaaaaactaagcatcccctgcagatggttaagtctctgctgcaaatgaaccatccattcaactaccagaatgggaggaaagtacccactggagtgtttcactggagagagttgtgggagttccgttttacctccagaaattttcctcacaggtcacagagtcaaagacaaagaaagtgaaccggaaaggaagcacttcttccacgtcctcctcctcctccagctccgtggtggacccgctgagcagcgtcctcgatgggactgaccccctctccatgtttgcagccactgctgaccccgcagccttggcagctgccatggtaatgcaccccagccatggtcgtccagtgggggttggttttgtgggtgcaggaatgggtggttttcttgtgccctgcccttttttttcccctgagagacagagtctcactctgtcacccaggctggagtgcagtggtgtggtcatggctcactgcagcctccaactccggggctcaagcaattctcccacctcaccctcctgaatagctgggattataggtacacactactgtgccgggttaattttttattttgttgtagaggtggggtcttgctgtgttgcccagggtggtcttgtactccaagcctcaagcgatcctcccacctgagcctcctaaagcttcttccccttttttaagttgcacaagtaatgcacacggtaccttctggtcaggtcatcctgacatgagaggctggtgtagctctgtgaagtctttttgtttttt

SEQ ID NO: 82539 - DNA, 1081 bp, Homo sapiens
gaaaaagtggtcttttccaactatcctttccttaattcttaatgagtttgagcattttttgatatgtttattgtccatttatgatgaaatggtctgaattttttttttgagatggagtcttgctctgtcactcagactggagtgcagtggtacaatcttggcttactgcaacctctgccttccaggttcaagcgattgtcctgcctcagcctcctgagtagctgggactacaggcatgcacctggctaatttttgtatttttagtagagatggggttttaccatgttggctaggctggtgttaaacccccgcccttaagtgatccgtccaccttggcctcccaaagtgctgggattacaggcgtgaggcaccatgcctggcgctgtaattttttttatgatagtaaaccttgagacaaatctcttttattccacagtaaaggactatctggcttctatttatatatgtatatatttaaagatcaaaatgatattgctgctgaagagattatcttgcctttctttaggacagctccagaaggaaacgtgatagagatgataactccgttgtaggatcggattttgagccttggaccaacaaacggggagaaatccttgcccggtacaccactaccgaaaagctgtctattgtgagtaccaggagaccctctccagagtctactttggagttagtagtaatttctttttgttatgttgcttcaactcctgggctctgtaagtttcacttatttatttatttttctacttctcttaaaagctcacatataaggcttcatgtagtatgtcagtgttgttggcagaaaaatgtgctgacaggtttcccaaaaaaaaatgttaaggatcagggatgtggcacaggccagagaaagaattagaacagcagagtcttgtctttgggaggaggtttgaattatgaagggaggaggtcgggcacggtggctcacgcctgttatcccagcactttgggaggccaaggtgggcagatcacttgaggtcaggagttcgagaccagcctggccaacatagtgaaaccccatctctactaaaaaaattagccaggc

SEQ ID NO: 82540 - DNA, 1147 bp, Homo sapiens
actgtgcccagcctcactgttaaaattttaatcctagccacagtcctctcccacctggatagcttcctgcatcactgtggctgcccctagtcccacacaccacctcacaggtagagagaccttttggagccaggtagaaaggtttagactgaagagaataacctggaggagcaggaggcccctgtgctgcttggcagtggttggttaggccagaacatcgtgccattagcagtttgctcaaaccatgcagccctctaagctgtatatgatgtgccccacagcaaggcaccccaccagaaccaggaaataggggcgccttctgagagctgaacacgtggaagatcagaacagagacattcactgtcttacagggactaatgggctcccaacccagcaaatcttatctgtaaacccatcgaaagatacaatgtgtcagaaagcagactatcaatctgagagactcattcatttctgtgcatcccagtcctgtccaagagaccggaggcctgagtgcgctagctaaaacaagtgacaagaaagctaactaaccttgaaaaagtgggtctttattggcttatgctgaaaagtccaggggtagtttggcttcaggtgcagctggatccaggaacccaaacagtgtcattaagaccttgcccttgggccgggcatggtggctcatcacacttgtaatcccaacactttgggaggccgaggtgggtggatcatctgcagtcaggagttcaagaccagcctggccaacatggtgaaaccccgtctctactaaaaatacaaaaattagctgggtgttgtggtgcacacctgtagtcccagctacttgggaggctgaggcaggagaattgtttgaacccaggaggtggagattgcagtgggccaagatcacgccactgcactccagcctgggcgacagggcgagactccgtctccaaaaaaaaaaaagaaaagagaaaaaaaaagaccttgcccttggttgggtgcattctcgagcttcacaagctgtcctcagcttctgctagctttattgctagtggtcccagggcatggaaagagctactttctccaagcattcccacagaagtttcagaatcccatcttattggcctggcttggatcacatgtcagtccctga

SEQ ID NO: 82541 - DNA, 1122 bp, Homo sapiens
ggtctcctgccttctcttaaaatacccacagaagttcaggtttgaaaaaaagcagcaccataaaagaaaaataagtgggagctagaaaaaaaatctctgttctttgttatattgaagtgtcttctgaattaatttccagattttgaaggagtccccatgtagcagcccaagtgctgaagtctaaactgtgtcatgtcattgccattcctgtgcccagaacccttcagggggtttccattatgtttagaaaaactctcaaactcctcaccaaggcttcagccctgtatgaactggcttgtcatgctggctgctcccctttctgctcagcaaattggcttgctttttgttctttgaccatagtgaggttatacctacctcagggccttgcacttgctgttttctttccctggaatatgtttcttccacatctaggcatggctggctccctttcgtagttcagggctcagctcaaatgctgcctctgtgggagccttctctgaccactacatctaatgagccccttcccctaaatcacactcaagtcactctttattccaatacctagtttagtatctttaatagtacttactgctgttagatattatcttatttgtttgcctgcttattctctttcctgtttagcatttgtctcaccccactggaatgtaagtttcatgaagataggatctaccttgtgcactgttatctccccaaagcctggaacaccacctttagttggcccttaaggcatttgtgttgagcacatgaagtaaaggaatataatatttagtttgctgtaagattttaaagtcccacgtaacataatccttttcctaaattatctcttgagctggaaggaaagcctaaagattctgtattggtgtatgcagattgtcgtatagcttgtagtcaatgcgtgtatgcaaggcagcctgcctttagcctgatttccaactctttcaggcaacctgaaccagtttgttttagccattgctgaatctcagttccttcagctagacagtgagagattttgtagatgacctcagagacctatttttgcttttggattttaagccacaagattcagtcatatgaagggaaattaacactgctcttccctct

SEQ ID NO: 82542 - DNA, 1685 bp, Homo sapiens
catggtgtttgtaagttttgtgttttttctttcatttctccatattctcttccattccttaagatgtatgtcaagtccagaactgtgagaaataaatttctgctgtttaaaaatatgtatgtcaaaatcaagcttgggtaccagttccagaaaactcaaaataacagtaatgaaggtcagggccgatgggccagctagcccctggtaccaaggatcctcacttctgtcttgttgctctcatggtcagtatggctgcagaggttccagctgtcatgtctgcattccagtcagtgagcagaaagaagaagtgagggaaggcaagcccctttccttaaagatacttctcagaagttgcccttctatttatatatcctgggaccagaacttgacccacgtgaccacacctagctgcaaggatggccctgtgtcctgcaggaaaatgcgagttcttttattaaagaggaagagaatagctaatggagtaaactggcagtttcacaagatgactctcttggagccagtcgtgagccggcaacataattctggctggtttctcacctcagaggccttgttttaccttcctctggcccattgtgatgtgtagagcaaaagcttagatcacatttcatgttgcagtcgcaggtccgtaaagcatctggaattctcaacaatgttgtcatagtgactggtaggtaaccaagaacctctggattatattagaggcagtggctaagaatgtcggccgcagggccagagtgcctgggttgaattctaactcttacatttgcttgctgtgtgccttgggtgagtcactacattcctctgtgccttggtctctgcatctgtaaaataagataataaaactacgtacctcagagggttgctatatgggatcaggtgagctgtctgtaaagcactgcgaacgacacttggcacttagaaagcctgtgtctgtgtaaactattgttatcatcagttacttcctaatagtgatatttggaaggaaagaaacaggctgagtcacccccttttctgctccagggtaatgtattcccatccagggactcacacagatcctgagatttaggagggctgatggatcttgttttttgtattacagatcacttttctccagagaatgcaaatgacacggccaaggaaacatgcctaaattggtttttcaagattgcctccatcagggaactcattccaagattgtatccttttttttttttttggtctgatgattttaaagataggctaaaagaattgtactgttaatagaagccatgtgatgggatgccctgacattcttattgaaagtttggtcccgttacggttgctagcctgaaaacacatacagggcaagccacattgtagaaacccttggactcttgctctttccagttttttgtcttttactttgaatacgatgccatgtgtcaagcatttgtttccttgaggaacattcccaccttaattctctcaattaaaatgcttcatatttgtgttttctctgattccaagaacttgaaagaacagggtcaagctttgcagggcaaatgctactattgaagaacagataatttgacttatacataaattccatcttagttacctaaagttctttctttccccataaagcattgattagaaatgctcaaaacccagtttatatttcagca

SEQ ID NO: 82543 - DNA, 1162 bp, Homo sapiens
tttatttgatcattgaaaagtaaagagagactacaaaacaaggacatatagagcaaagcaaagttgaaagacatctgccttttcctagatcttgccaacacatgttgaaagctgtacagaaaagaaaaaaaaaggacatgactttaaccgagcaatcccacttttacgaatttatcctgtaagttagacgagtgcataaacattataaacacacacagagatgcacacacggtttgttcacggtagtgcaaaattggaggcaagcatcagagaggactggttatggtatgtgcattcagtggggtgttaatggggccatttaaaatgatggagactcccgatgatctgtacatactgacgtaagggtattcatggtatatggctaagtgcaaaaagaaagttacacacattgctgtgtgtgctgtaagtggcagtgtggcctagtgttcaggtgtgggctctggagtcggggtgcctgggtctgcatctcagctccgttaacagctgttgtgatagagtagggagcaggtaacttgttcctaaccactctgagtcttctctctttatctgtaaaatgggagcaatattaatgattcctattttctagtccgttgcaagaatcaaagaagtcactgtatctacggtgcttagtgtagcgccccacatcttagtactcgcagacatgatttttatatctgtgcgagagagttgggaaggagaaatgacagaacatcactggagtgtgagatttggggccagcgtaacttatttttctttgcctatctgtttttttttttttttctttcttcctttgagacagagtctcactctgtctcccaggctggagtgcactggtgcaatctcggctcgctacaacctccacctcccaggttcaagcgattctcatgcctcaacctcatgagtagctgggactacaggcatgcatcaccacactcagataatttttgtatttttagtagagatgcagtttcaccttgttgatctcgtgctgatctctaactcctggcctcaagtgatcctcccgcctcggcttcccagagtgctgggatcacagacaagagccaccgtgcccagccgcccatctctgttttctaacttttcaacaagtatgcactgcttacctttttactttttgagattc

SEQ ID NO: 82544 - DNA, 1047 bp, Homo sapiens
atctcttttcctctcttagccttttccaaaggccactttgctattggtctttaagaatgacttttcaaatgtaaatacccaagagtgggttagggaagccatttatgatgtggtcaattttgtcaccagctagggtgcttttggctgcaaggaacaaacatctaactagtctggcctccacatataattccatgtgtcctcctccacaacaagtggaggctctcgggtgatcagcttcagtgcatctttttgctctgctgtccctgattagtagcaaggtgggggcaaccattccaggcatcacgtccagagccgacagcatccagggaatctttgattcttgggtccttgtttaagaacaggaaacctttctccaaatccccccgaagacttcccatcctgtctcagcagctagaaatggatcatgggcaaggggaacgagagccactgtgattggtttgggtctgtattaatctgcttgggctcccttaacaaaatacccagactaggagcttaaacaacagactttattttctcatagttctgaaggctaggagaccaagatcaaggggccagcaaggttggtttctggtgaggcctctctccttggcttggaaactgccaccttcttgccgtgttctcacatggcttttcctctgtgtacacgcatccttgctgtctcttcctataaggaggttagtcctgtgggattcggatcccacccttatgactccatttaacctagaatagtgatattaggggttagggctccaacatagcaatttaggggagatataattcagtccgtgacagaagccaacctagtttatgtgaggcatagatggaaatctgaataaaatcagggttttggggtagggattccaacagtatctccaacgtcagctctcacttattcaggcaacatgacagagaggggtgccaccagaaagggtggaattgcacttaagaaccctccttttatttttttactttgggtccagacgtagatatagatcccttttttttctttattttttactttttact

SEQ ID NO: 82545 - DNA, 1174 bp, Homo sapiens
ctcaagcgagcttcccacctcagcctcccaaagtgctgggattacaggcatgagccaccacccctggcctgcacaaatcccatttttgccacttattaggaagtgtcttaaccctgtctgagctttggcttttgcatctgtaaaatggggataatgttccatggacctcacaaggacatggtgaagagtaagagagtaaagggaagtcaaggacttagcccgaaacctgggcagtgctcagtgtcctgtaattacctctggtcttgggcttgaccttccccaaaccactgccctaaatgatccttcttccattgattttcttaaaaacaggagctcttttaaagatatgtaattgtcttaagatagctccaaagccattaacagtattccaatgagttaaaaaaaaaaaatctgcttcctttggcggaggcggggaaaatagacttcaaactgtgttggagaagaaatgtattgaagaacgtggcctttgatcccagtctgcccaggttcatgtctgcctgccatcactaactgtgcgaccttgggtgaaaaacactgctattcgtggctttgtttttcatctgtgaaatgggagaatagagcccctgcttcaagggtggttgggagaggtaagatcgtgagtgcaaagtgcttctcaccatggctggtgggcactaagctctagcccagtgtttgttgctgatattactaagtgcaccttgggcacctcttaaaatggggaagaatgtggggttacagaagaggtggggagcagagtaattatcgttctcattcatgccctggagtgcaggagttatctcccatcatcctgtagtgaccccacagatgagatgataccacttgtagcctttcaataaggacaaggagacccaggttcgacagagttggcaactcttccgaagtctcatcattggtagttggtgaggttggatttgaatccaagtgtgcctgatgccaggaccctagcttctgttgattgatcagttgattgattgagacagggtctccctctgtctcccaggctggagtgcagtggcatgatctcagctcatagcagcctccacctcctgggttcaagcgattctccttccttagccctctgagtagctgggattacaggcacccgctatcacacctggctaatttttgtatt

SEQ ID NO: 82546 - DNA, 1051 bp, Homo sapiens
tattgagttgcagatatgtacaggacactgtgttagtctctccagtttacctttttactctgattttttgtttttccccaaccctaccgctaaagagctgttagtcttccttcctggcaatatatattcaaaaattaaagcaactttgattgaggagaagccaggctgacttggggatctgtgtcttgcagtgccttgctgttgaattctgtgatgtctgccttccgggctgagttcatcgccacaaggtctatggatttcattggcatgattaaagagtgtgatgaatctggtttccccaaggtaggctcttgacttcatgctcagtaggacacaaataagcggtgtgtatctgatagctcttgagagacagtccggttttgggaacagcatgggccagcaggaacacaggcgaaggctctgtttctgaggaacgcaatggaagatgagttagaggttgggattgtcagacactgtgtgattgctatgcttcaggcccccatgagccctaaatctatcagattggctcactatgaaggatttaagaaagactttggtctaacatatttaagaatatatcaggctgggcacggtggctcatgtttataatcctatcacttgggaggccagggcaggaggatcacttgaggccaggagttcgagaccagcctgggcaacacagcaagaccccatctctacaaaaaatcaaaacttagctgggtgtggtggtgcattcctgtagtcccagctacttgggaggctaaggtgggagaattgcttggagcccaggaggtcaaggctgcagtgagccatgattatgtcatgaagcctggtgacagagtgagaccctgtctcaaaacaaacaaaaggatatatcttcattcattatttatgaaaaactttgtccagtagaatattatggccccacattagaccaacagatggagctaactctgtgtgagcctctcagtgtagctggggcagatatgtgtgatagaactttagaaggaggttgttggaagattagccccaagaaggattaaacattaca

SEQ ID NO: 82547 - DNA, 1050 bp, Homo sapiens
tctccttcccctttctttccctgtaatttatttgttgaagaaattgggtcttttgctctatagagttgcaaagactggatttttcccattgcatccttgtgatggtgtctggcgtgctcttctgccttttgtattttctataaatcagcagttaattatagagacttaaaagccattcttagcttgtgggccttataaaaacaggccctgggctggattgggctgcagttggctgactcctgctataggtgacaaaagtgaacagtgagcagttaggtcagacagcttgtaagggtgagcctgcagtcttccgcagtgcttcactgttctctctgcaggcacctgagggagggcctgggacaggcaggtggagagaggcacggccgattcaaccatcactctgggaaagcagagacaatgtaaagccccagaacttttgagaagagcgtttagtcctgactaggtgtggggctgtggtactagaccgggtgatatgagtgagatttcctcccttccgttattttcagcagaatactgaaattgatttcctggaaggtgtgtgatatattctgaatacgttagtcctttcccccaggaacatggtcagcagttgccatacagtgtctaattcaggtttggttcctttttcctgcttagaaacgagaggtgaataccgttttggcagatgtcatcaagcacatgactccagatcgtgcatttgaagattcctacccccaggtaacagatttgcatttctcatttcaacattgttaggaattttgttctgttgaattaaataggcgtgttgtatgggtcaggctataaaggcacataatcctgtgtttgaatcatagctctgccatatcctagccatgtgccctttgatcagttacttaaccttgttgtgccccagttttctcacctgtgaaatggagatagtaatagtgctacctgagagttactgtgaggatgaagtgaagccctcacacagtggcctggcacgtggtaaatgctcaataagcgttgtcttcattgttgtcaccagtaagt

SEQ ID NO: 82548 - DNA, 1108 bp, Homo sapiens
aattatatctcagtaaagctgagaaaacagaaagtgactcagcttctgactctccctgttcagattccaagtcttcagacagaggggagcgaggtcaggaggccaggctcaaggactgcagacatggcttcaggatgggggcctcttgttgtcctgcagggaggataggcggcaccccaagatggggcagcgtgcactggcattttctagagccccttcacttgacacttgatgtcactgttttcagatctccatattagtactctgtaagtttctctctttgggtaagctagttatttatcaagtgagaaggcaaaagaaaaaaaatcagggttttgaattaagcagttggtaaaagtgagaaggcaaaagaaaaaaatcagggttttgaattaagcagttggtaaaagtcattgtttattgattaatcgggatgcattcagcatctgcaggttaaaaatcactggagcctttttgaaaagccttctcagattcagaagcttctgttcagtcctgacctgaagagttcatagcgctgagactttgggaaagttttataactcctcagagcttcagttgtcacctttctgaggtgtcatcacagtgcccacctcaaatgactcctgtgagggttaaatgaaatgatagctgggaaagtgctttgtaaacctgaaactctgtccctgggattacagattgatgtctggagggcagatccagccggtagacatgtagacacttgctggctatgtcctgatggagaacatttggaatgagtttcctacatttaaaaattggtagatcacagaaaatcccagatttgcatctccccttgaaaaatcaggtcctatcacgtggggcccgcatcctgcgacctggccagttggctgcagctgggtaccagctgccctgtgcaggcagcgtatgcctttctctccagttttcctgggtacctctggacccattaaccccatttctgttgtccacttggccccttaggcatttgtggaaagagctcctgctctcaacagattcattattccttgaacagatttgagttatttattccttgaacagatttattattccttgaacagatttgcgttat

SEQ ID NO: 82549 - DNA, 1021 bp, Homo sapiens
cacctcccctccccactccgggcaaaattgagcctgccttggcaacagcctagagcagcgacagtcacagaagcagcagagccgacggcaaagagcccaatcatcagggagcaggttgtgctgtgggcgcccaggcccgcgggctacaagagaaaagcgctttggcacagggcacgcgggctggcacctgctgggcacggactcgcaaactggctggcgaccacctgctctgccttcatttgttctaacagacaatgcagttatgccccaagtgggaacctgagcccatcctgctctccttttaacctggtcctcgtctgacacctgggagaacgggagccccactttctgcctgaatctacaagaccaagctaaaataaaactctttcagagctaactaaaagtctccttggagagaggccctttgactacctttcactgaagtgggagaaactgttttaaaagtcagacaagcagcacaatacctaattggctatttctccattccatatcttctcaattagcaaaaagctcaattcgcatgtgttttaaatgccaaagcccattaaaagtgaaatcattggagacgtgtctgagggatgagacacatgccagctgatatattcaaacaccgagaaaaatacaaacacgtagcttgggaaccaaatcagggcctgatcccctcccctcgccacagaggttttaaatagaaaagagctgcttttcctatgagaactgtcatttccaggaagctctcggggtttggcatggttcccagctccaccacacccaaacaaacaacttcataaaatacagcttgtgattaaaatgaggctggcaccttcacgtggccttagaggatgactttggaagcacggttgctaccagagctgcgatatgattctcagaacggcacaggcatcagggttttccaacagcaagaagccgcccaccccactcagtggggagaaatccaccaggcccttcctggtctgtgatgggcctggataccaagcctcat

SEQ ID NO: 82550 - DNA, 2124 bp, Homo sapiens
tcaggtgtaatgtgagagcggtaagaattcactggcctaggcttgggaactaatgctgcccaccacgttcagcctcagaggagaagaaatgacttgaagaacataatttgtgaatttgccaattgtttttcattttatagcatcacacagtaaaagtagataaaataattttaatgaaaatacttctgtgggccaggtgcggtggcttacgcctgtaatcccagcactttgggaggccgaggcggcggatcacctgaggtcaggagttctagaccagcctgaccaacatggagaaaccccatctctactaaaaatacaaaattagctgggtgtggtggcgcactcctgttatcccagctactcaggaggctgaggcaggagaattgcttagactcgggaggcggaggttggggtgagccgagatcacgccattgtactccagcctgggcaacaagagtgaaactgtctcaaaaaaaagaaaaaaaaacagaattttgtgaaataaaggccacttgggagtatctgagccaccccacaatgctgtctgagtttctgtatgatttagtagaggggagggaaagaagcattcattagtgtctgctgtcctttaattttttttgagatgagatgatattttgctcttgtcactcaggctggagtgcagtgacgcaatctcggctcactgcaacctccgcctcctgggttcaagcgattctcctgcctcagcctcccaagtagctgggattacaggtgtgtgccaccacgcctggctaatttttgtattgttagtagagacggggtttcaccatgttggccaggctggtctcgaattcctgacctcaggtgatctgcctgcctcagcctcccaaagtgctgggattacaggcgtgaatcaccgtgcccggccaataaattgatttaaaaaaattttttagccccttttactgtctgaggttaactgagtgttcaactgtagtcttgtatttctcagagtaaagatgaaatgtaatctatgtccagttccagtgtggatcttgtagaagcacaatagtttggggcatttttaatccacagtgtggatgcattttcataatggcagtggctgagatgatgaatcacccatcagtatgaatgtttttactgattcaaaatgaaatgtcggtgcaagctcaccagccgtaatagaagaatcaggttccaccaaactgttggaagaaaagcagacagaatcacatgctgtttagaattgtggctgcaaaacaaaccaggataatatatttagacacggtctttctcttctggaggaagacagtcagaagtaattaaatgaacagtcatgaacataaatgctccttcaggacatttattcagttactgtatactgaagccacagagaatctcaaatttgacctcgctttctcctttgatccaccaacacagattctaagtccaatcaagagctgcttttgataggaaaaagagttaatggagtgctatttctgccttttataaatcctccataggggttcaggtaacacagttccagactttgggtgtgctctaactttaaggtacaaagtctggaatggaatgggtctggaacagtggcactttgaaaagcagtccacttttaaagtccttatttctaaactatgaaaaaacaaacaccttccagagaagaaagatgttacttgcattcttgtttctctcttgctaaaaaggcccatcagatcgggctgagtagaccgaaggccacttgtgcaaagacaacacagagactgcttcttagtgaagattgcattttaatgctctgacaactcccatttcttcattgtcagaataacctggatagaggccaaagcttaaaacaatttgtacatatgtaaaaagaaaagaaaaatgagaaacctaaattgccgtaagagttcagggcagcagagcagatctttctggatttggcaccagagtccctgagcctggggatgggcccgggggtcaggtccttgtttgcagagggagtctgagggccagctccgtcagatgagtcatgtctggttgtttgctttgcttcttgatgtattctagcgttttcacctatgaggaaaaagaaagatccatctcctt

SEQ ID NO: 82551 - DNA, 1092 bp, Homo sapiens
gggcagctcatatttcgggagccaggagaacgagtgagtgctaaaacctcctgttttctgtgttaaacattccgtccctgtttgagacatcagtatgtacagttaacttttgttgagtgtttagcaggtactagggacatactagtgttttccttaatgtatttaatcttcataattatgaaatgggtgctattattagccccatcttatagatgaggcaactgaggttcagggataaagtaataaaattgcctggggtcacccagccactaagtgcagggtgttgtacttttgtacccgaagccctaagttcactattcgccactctgaatgtcccctttagggaatttccaccagaatcctcgttggggattgaaatgtctttagatggaggaaaaagttttatgacaagtctgcatctctgataaaaagtggagtgaatgaggaacggagaatcgcaaactccttttccttccttttcctttcccctgtcatagagcagctgtaggcagagaggtgtctgagttgttaccaaacacatgtgactgagctgctgctgctgggaaatgtgcctctaaaccagtcctgccttttccactggtgtcccttcggccctaagtgctgaggtaggatttttgtgctttgactggattctgaacaaggcattttaggaagagtggttagtcccgcaaatgaatcaatggcagatcccagggacgtgtgtgtgtgttttgagataggctctcactctgtcacccaggctggagtgtagtggcatatcacggcttgttgcaaccactacctatccagcttaagtgatcctcccacctcagcctcccaagtagctgggactgtgggtgtgcaccacaacaaccagctagtgtttaaaattttttgtagagatggggtctcactatattgtccaggctagtcccaaactcctggactcaactcatgctcctgcctcagcccccaagagctgggatcacaggtgtgagccactgtgcccagccccagggatgtgtctgatgagattcttttttatcacaaggaagagaatcccaggtgacttctgtaggtggatattgaatg

SEQ ID NO: 82552 - DNA, 1155 bp, Homo sapiens
ttccgttcccccagccccgtctctgtcctgggttttaagcttgaaagaagatctctgtctgacggccctcttctgtcatccttcttgctcaggtgaggcgaaaggccttgcaagaagagatcgatcgcgagtcaggcaaaacggaagcttctgaaaccaggaagtggacggtaagtttggggctagggctctgcgaggaggtggcacgctcggcctcccgacgcttcccctcgcctccagcatgaggagtggagcaggagaaccaagtatgtccaggccccagaggcagccctagcctgcagcaggctccctccacagcagaatttgtcctgagctaatttccttccttctgaaaagggcgcttgcctccctcctagagagctggcccggtgagataagctgcctgaacctttgtctcagccctggactggtggggtgtcctaaggattaatcactgaggacacattccagcgagctcttgccagtggtggacgatgcctttggagggctgctaggaacagggacaagaggcagaggggagggagtggtcgcggcccctctcaggcctggttttcagatccagtctgactgggaaatgtccaagccgggcctgagaagatctctcaggagggaggagggtgcgaggatcatgaggctggagagtgtgaggttgtcaggctggggccctggcggagttcagtgggggctctgtgctgggtgctggacatggagcagatgaagcccatgtgatccccatcatcgcgctcacggtctagaggccagagcggggtgagcatggcagggaaatggttagcaaacaaggaaaggaagatcagttgaggtggcagtagcggtcaggagaaagaaacagaacagtgagctggagaggggctgcaacagatgggcgagggctgggaggtggcagcgcttgtccagagatgttcagggtgcagaggccccagccctcaggagacagggggaagagcgtttcagtgaggccagtggccggtgcagacccctaaggtaggaaagggcctggagtgatctgtagggaaggccagtgaggcggcactgcggctggaatgagggacgagagggctacaggccacaggcctcggcctcagcggccatgatagagagctggcctgggatctg

SEQ ID NO: 82553 - DNA, 1123 bp, Homo sapiens
cttttgaggagggaggtgttatattcccccattttccagatggagaaattgaggctcagggaggttagctgatttacttaaggtgagagaggcatttaggtttgaacctagggctgtgtggatttaaaatttacgctgtttctgtagtatttctttttttgctttaaaggaatcatgtccattttccctgtcccacaacgctttgaccacccactcaaagaaacatggctcttggcaatgcttagtagaattgaacacaggatggcttggtatgggataacttgtaccatttgttttttcaggaatgatcaccaagacacacaaagtagaccttgggctcccagagaagaaaaagaagaagaaagtggtcaaagaaccagagactcgatactcagttttaaacaatgatgattactttgctgatgtttctcctttaagagctacatccccctctaagagtgtggcccatgggcaggcacctgagatgcctctagtgaagaaaaagaagaagaaaaagaagggtgtcagcaccctttgcgaggagcatgtagaacctgagaccacgctgcctgctagacggacagagaagtcacccagcctcaggaagcaggtgtttggccacttggagttcctcagtggggaaaagaaaaataagaagtcacctctagccatgtcccatgcctctggggtgaaaacctccccagaccctagacagggtgaggaggaaaccagagttggcaagaagctcaaaaaacacaagaaggaaaaaaagggggcccaggaccccacagccttctcggtccaggacccttggttctgtgaggccagggaggccagggatgttggggacacttgctcagtggggaagaaggatgaggaacaggcagccttggggcagaaacggaagcggaagagccccagagaacacaatgggaaggtgaagaagaaaaaaaaaatccaccaggagggagatgccctcccaggccactccaagccctccaggtccatggagagcagccctaggaaaggaagtaaaaagaagccagtcaaagttgaggctccggaatacatccccataagtgatgaccctaaggcctccgcaaagaaaaagatgaagtccaaa

SEQ ID NO: 82554 - DNA, 1074 bp, Homo sapiens
ttttatggatgagagagctgaggcttccaagatgttgagagacttgttcaggccacccagttggtaaatggtggtaggattcaaagccggagctgccttctcccaagtggtgtgctctaagcagctaagctgtgcttggatggctccattgctaggtttgatttggtggcttccttcccctgtcaatacctcagttttcacctattaaaaacaagccttttattgaatctctctttttccaggaatcaagaccctttacggggtcaaaccttgataatcccatggttctgtctcaatataaccaatgttgccactcccacgccaaatgtttccatttaaaatactgccttcaaggagactttgctctggattaactttagtaactgtttggaagtcaacaacagaaagctgcaattactgctcattcaaggctgtcacgttctcccggaatgccttgtggcttccaagttggcttaattttcccaaaaataatgcaacacagcatctggtactgtcaagaaatggaggtaaatttaccaggctactgacatttacgccctgaatgtcaacatgtatttctttgtagaaaggaatcttccacaatttgttcttctagttgggggcagaggggcatagattttttttttctttttttcctgtattcttcgaattttctataatgtattgctcttcatggaaaaataaaatctcggtaatatatataatacactcccctgcctttctaactttagggaccaattcttactccaaggtggtgtcagatgatggttaagaccatgggttttggagtcaaaagataccaagatcagaatcttggtgtggccatttacttaactctgtgaccttgggcacgttgcttagtatctctgagcctcaatttctcagtcagtaaaatgaaaatgaggatagcatctacctcccagggtggttgggagaattgtatgagataattaaggtaggtaaagccctgagcctagtgtccagcatctggctagtgcaaatttcctgattaattctatgatattgtccatagggaccctcttgggtgtgtaa

SEQ ID NO: 82555 - DNA, 1051 bp, Homo sapiens
gacctggggtgggggtgggggcggttgcatgcggacccggtattctgaaaagaaagaaatcttcaaacacctcggtcctgtccggtgaaaaaacgacagcattacacattctcgtgccaggaaatggttactcacccccgctctctggagtcctttggagctttctgataccattcacacgatggagcaattcacacgttcgttttctaagttctttattgtccaagcatataaggtgagcacagcacaaatggctgccatggaaagtcgtgcttccccagcataagaacagagccatctttgagccatgggaagcctcatttaatgagacctttttccccccttttaaatctgatatgttatcgcacttagggttttgttttattttggcttttaaggttgagagtgggctgaacgccttcataatgggggcggaggcgggagtgagaggagaagggagagagctgttctttttctaatgactacacctgaaaagtatcaagagacatctttgccaagagactgtagcagccagctgccccccgtggagcaaggtttaaagacaaaattaaatggcacctctgtttaagatctgcgtgtgtaaacaagactcgtttggggaaaacgacccgggaggagagcatctgtgatcaaaatctctcattgtaagcacaaattgttccgtgtctggttattaaaatcgctttgggtctataacagccactcttgtccccccttttaatagaaaattgtcattctagcctggatttctccccactggaggtggagggtgggaagagaagggagtcagctctgacagcttacaaactgggaagttctgtgcatctccagggattccagagttgaagatctggttgttggaagctgggcgcccagtgcttttttttttttttttttttagcccagatgccgtcaggacccactgaacaagggtgaactcgggtggtggtctcggttggccaaggctgagttgaacgcctcaggccaaaccccaagttgaaagggagcattgtggcttttataatccaat

SEQ ID NO: 82556 - DNA, 1346 bp, Homo sapiens
gcctctcctgggaattattcgacccatctaggtaaaagcaaggtaacttatttttgccgcgttgtttacgcatcggtttctagtgttgactttgcaaagcacagagttctcagtgtgttatccttatgtgttattccagatcccaactgctccgccaagtcacacaggaagacacctttggtgaaagactttaagttccagagaatcagaatttctcttaccgatttgcctccctggctgtgtctttcttgagggagaaatcggtaacagttgccgaaccaggccgcctcacagccaggaaatttggaaatcctagccaaggggatttcgtgtaaatgtgaacactgacgaactgaaaagctaacaccgactgcccgcccctcccctgccacacacacagacacgtaataccagaccaacctcaatccccgcaaactaaagcaaagctaattgcaaatagtattaggctcactggaaaatgtggctgggaagactgtttcatcctctgggggtagaacagaaccaaattcacagctggtgggccagactggtgttggttggaggtggggggctcccactcttatcacctctccccagcaagtgctggaccccaggtagcctcttggagatgaccgttgcgttgaggacaaatggggactttgccaccggcttgcctggtggtttgcacatttcaggggggtcaggagagttaaggaggttgtgggtgggattccaaggtgaggcccaactgaatcgtggggtgagctttatagccagtagaggtggagggaccctggcatgtgccaaagaagaggccctctgggtgatgaagtgaccatcacatttggaaagtgatcaaccactgttccttctatggggctcttgctctagtgtctatggtgagaacacaggccccgccccttcccttgtagagccatagaaatattctggcttggggcagcagtcccttcttcccttgatcatctcgccctgttcctacacttacgggtgtatctccaaatcctctcccaattttattcccttattcatttcaagagctccaatggggtctccagctgaaagcccctccgggaggcaggttggaaggcaggcaccacggcaggttttccgcgatgatgtcacctagcagggcttcaggggttcccactaggatgcagagatgacctctcgctgcctcacaagcagtgacacctcgggtcctttccgttgctatggtgaaaattcctggatggaatggatcacatgagggtttcttgttgcttttggagggtgtgggggatattttgttttggtttttctgcaggttccatgaaaacagccctttt

SEQ ID NO: 82557 - DNA, 1079 bp, Homo sapiens
tgagacagtctcctgtggcccaggctagagtgcagtggtgtgatcacagctcactgcagcctcgaaatcctgggctcaagtgatcctcctgcctcagcccctcctgagtagctgggaccacaggtgcgctccaccatgcctgtctaattttttagtttttttttttttttggtagagacggggttgctgcccaggctggtctcaagttcctgggctcaggtgatcctcccacctccacctcccggagtgctgggattacaggcattagccacacccggctattatgtcgttatccattcgatgtgcatacattgagcacctaccacgtgcctggaagtttccagacccctatccattcaggtatttgggcaggaaagggctctgtattgctctgggttcttgtttgcaagcaacagaaatgggctctggttaattaaacagtcaaggagtttggtaaaaatatatgagaggacttccagaatcatctgtactcagtggggccaggagagtggaggatggagcctgtgagggcaggggccctggcattgggggcagcaacaggatggaagaactgccccgatcccctgtcccggtttcctcctgcatggcagccaccctggctagcaacggacaatttcctctgccctgtcctcctctttcctcttccagctcccagtgtcttccctagccctgactcactgcgccatccctgccctcctctccccaccattatataactgtcccctgtcccaggggcccttatgtaactcgagtcacctcaggctcccttccccacctcgcagctcccacctcagcctgccctgtctggtacaatctttcacagttggctgggccaagccctcagtaagaaatgtgaaaacagagagagagaggaggaggaggaggaggaggaagaggactctccccttcccagcagtgggacagaacagagacaaggtccaactggcaggaggacctctagaggaggctcttctgcacacgaagcccaggcccatggcctctgtcaggggacttgagcaactccctgtgcctcgatttgcacttctgtaaaatgggga

SEQ ID NO: 82558 - DNA, 1050 bp, Homo sapiens
aagctactacgggtaggcaggactgaaaaccgaagctacattcttggatctcaaacccagggctcatcattcccatatagacacaaagctgtcaaaggcaggaatgacctccaaaatgaagttacccctctgaatcctactgggaccttccattgttctttcgtttgtaaattgtgatagctacttgtgccataaaggaaaataaatctgggttcctaccctcaggaagggcagagtctagttggagagatgcagaagtaaatcacattactgtgaagactgatgtatgacgtgcaaaaagaaagcccagcataccatggaacaaaaatggaagctcatcaaccccagtcttgggttggggagcagtgctggggaaagggtggggttgacagcatgatggcatagccccaagtcagtagccaaatactgcattcatgcctttccaccaccacatcccctcatttcacagtatccatggctgaaacatggatagtaagattgctgacttctttatgatagacactaaactaatagtcatttaccatagttaaaattaacattgagttcctactacatgttagatactgttttaaacacattacctgaattaactaatttaatccttctaaccctatgaagtagatgctattacccaattctacagatgagaaaactgaggcacatggcaaattactaaatggctcaaagccaagcttcagacccaggcagcaggtgctagagcctatgctcccatctgctgaacagcggcaagaggtgaggattttaatagtgtttttgggaaggaagttctctggttctaagctcagtcaagtgagtatttccatgaaagcagtcatctctgtcttctgaaatggagatgtggggtggagacacccacttctgggagatagaatggtaaaggctgtccatgttggagataaagatacatctccacaaaccaggtagtaactgttttttctgaaaggaggttgaaattgttaatgagggtggcatctaattctccatcgggtggactaggtttgagctctg

SEQ ID NO: 82559 - DNA, 1095 bp, Homo sapiens
tagaatgtggacatggaaagtctgggttgaaatcctatgtcatttactacctgtgtggctttgggcaaatgttttaacctcttcaaactccagtttccccatttataaattgagactgtctcctgaaggcaaaggagaatcactggagagttctgagcaagggagtaacacaagtgtatttgtgcttttttcccccccaactttcatttttttaatacaaataatcccatagcatttattcccttcttgtaataacataagggtaatcaaaacaatatgaataaatgtttatattggacaaaggacatctcaaaacaaactgtatccttctcaacagtttctcacttcgttgatcatttctagttggagacactttgtagcagaggaatattatctccttttagtatgatccgacccagttgttttcttgactttgttttagaatgaatctcttctgcgtcatctaatacaagattcatatacttatcaaaaccaatgatacagccttctatctacatattcacttgctcatagagccacacctgaatccatgatctattttgtaagtatctgaagatgaggttgatgggcagtaccataaccctctgcactctctggtcctggccatggtacgccatggtggaattttacaaagagcacagctacacgctgcctctgagagcaacttctggaattatttttccccattttctctgtctgctgtggagaggatagagtgaaaggggcaagaccaacaagaggaaggtctgttggaaggtgttgcaaataattgaggcaaaagatgatgtgacacaaccaagtcatgagagctgtcacctatcgtgtgcttaggaggtgtcaggctcagtgctacatgctttgcctgagtcatttcactgaatcctcctaatgaccctaagagttagatactattttttatttccatttcacagatggggagaaggatgcttacagagtttaacgaacttgctaggatcatgtaactgctaagtaactgagcttggaatcagccataaatcatttgactctgacatgcaccctgcagctctaggctgctccctgtgcaaggatggt

SEQ ID NO: 82560 - DNA, 1292 bp, Homo sapiens
ggtttcctgaatttgaaagttttttcaaggcctctttttgggtaaaacaattgaaaaggcagacaccaacaaagtctgcaaaattaactgtccagattaagaatattaaggagctgtaaaattagcttgtagaaatggacttatccttaagttttaaaaagttaggaaatcctaaaaatgttaggcttcctgcacaagtggctatgttcatttaatggctagtgaacatgggaatgtatttttatcctcctagctggtggttctgtttggtaaaccagactagaatgatttgagaggggcaaagagaataggcaggaccttccttctatagctttacatatttagaatgttaatacttaatgacattgaagttaccttgcaatgattgataagaggattattaatatcagttaggggaatagggaggataggattttggtgccttcttcagcagacttgctccaagacaaagattctattttgatagtgcaagacaaaaggactcggaagaaaattggccatatgcctacagagcatacaactctgtggaactaaattgtttttactttgtgaaagctgctattttacggaaagattttgattatacagtttgtttttaaattgtcttttatatttatttgtatttggtaagaatcggttgttacacaagctgttctttcccagttacaaaatcctgtgttcggttgtaacctgaactcattaaaagacttgttttcaggtttatcaactgtttattttcactgacatttgagcatgttattttataaatgacgggattccagggtaggaagtgctttttattccccttttgttttttcttttaaaaaattacgtcagttaaaaaaataaaaaaactgcagtcttatggtttagaaaacttgtttagctccatagaggaaagaatgttaaactttgtattttaaaacatgattctctgaggttaaacttggttttcaaatgttatttttacttgtattttgcttttggtacggccagaaatcgagcttgttttttcatagttcctgatattttcagaaaaatcaaaataaatttgttccctaaaaattggtgttctaatattttttctttctttctgactcttagtaaatctcttgctttatagtatatatatatcataaaatatgtttatatgtcaaattataaaatgccatggacatgagcctaaaaaacattaaaaaattattacccttgaataattaatacttctaaatccaagtttcagatattttacagttaatttgcttcaaaat

SEQ ID NO: 82561 - DNA, 1569 bp, Homo sapiens
aggtatgtttctcttagtgattttccataggcattcaatggtaaatacttgttttttaaggatttttttctttttaaagatttaaggcttacatttttgagtgtagaacaaatatattaaaatgttcttaaaatagtattaaatcaactgatttcaatatgtcggatatgagattttctggtagttagataaaagtcttttttaactcgaaattgaattttgtttggaaaaaaattcttattaaatgttgtagggtttcatttgtgtttatttattgtaagggttcagattatttgaagtccacatagaagagtggattactgtatgtcttgttttaacaagaaacagagacaaaagattttttgtatctatcagatgtaatggtatcctcctcagctatgtgtttttctgtttttgttacaggaatagtgtgcaccctcaattcagaaaataaagtggatctcaccaatccacagtacacagtggtagtagaaatcatcaaagctgtctgttgcctgagtgttgtgaaagattacatgttgtttagaaaatacaatctccaggaggtggtgaagagccctaaggatccgtcacagcttaactcaaagcagggaaatgggaaagaagctaaactggaatctgcggacaaatcagaccaaaacaacacagcagaaggaaaaaataaccagcaggtaccagagaatactgaggagctggggcagacaaaaccaacgtctaatccacaggtggtaaatgagggaggagccaaacctgaacttgcaagtcaagccacagaaggatccaagtcaaatgaaaatgacttctcataggaagtcatttggtgttggaggtgggtttctcacctggggctctacgagatgttgctggggctccaccttaaattgtgactaaaaacagttttttatttgtgtgctgcattatgctgttctcacagtagtgagcaatgattgcgcagccctgttaacagtttttttagggatctttcagcctttatggtattacgtagaggcagacccatgtgctgctgttgcaaagaggggaggataggagggggatgttggcctctcccaggctcctcttctgcagtgccagctgacttaagggagtgaactacctgtgaagtagaaaatcagagggaagttttcattctaaggaaggagtttttacatgccacagctcagctgtctgcctgccactttgttgtaaacattgcaaaaatgtggatcatgtaggttagaagtgaattgtttagtgaagtttttgtacttttgtgattttcttgtttatgtctgttttttttttttttttttaacatttgtgtgtaatatagctgacagtccagtgtcgcaattttggaaggcaagatgtgagagagacgagaaccattttaggcatagaactacagacatttctgaaaaggttggtgatgaagaacttcagtcttctgagtatacttcagtatactagtgcaacaagggacacaaagaaattctgtcttaataaagaaagctacttctcaagggtattatgtggactcagtccaagctc

SEQ ID NO: 82562 - DNA, 1703 bp, Homo sapiens
gattatgggcatgagccaccacttccggccttgctccacgttttgaagggtgtggtgtcccagcttcgtaaaaaaagctttattatcaatactgagtcagctgggcatggtagctcacacctgtaatcccagcactttgggaggctgaggcgagtggatcacctgaggagtttaagaccagcctgaccaacatggcgaaaccccatctctactaaaaatacaaaaattagctgtgtgtagtggcatgcgcctgtaatcacagctacttgggaggctgaggcaggaaaattggttgaacccaggaggcggaggttgcagcaagtcaagatcgcaccactgcactccagcctgggaggcaaagcgagactccatctttagaaaaaaaaaaaaaatcaatactgagccacctgccgccagggacttcacataaataattacttatagtgtttaaatgtgagctgttgtgtcatttctgctcattagttttatgcaaacagtttacagacaaggatcagcagccctctggaagtgagggagaggatgatgatgcggaggctgccttgaagaaagaagttggtgacattaaggcatctacagagatgaggttaagaagattccagtcagtggaaagtggagcaaataacgttgtcttcatcaggacacttgggataggtgtgacaaatacttgctaagattatcgatctcataacatctgggtatcttcctgtctcagggaatactgcttacaaaatggcttcttgggcatgactcagttaatcatttgatggcagcttctgtacactgtattagcagttggcctgtggagaggtagaatggggtggtggacgtagcattggcttatgagtggaaacctggctttgctgcttccttcgtatataacttaaggcagaactagagtgccagttctgtgtaaataaggggcagctgctactcagctccagccagttgttgctctttgggaatgcagggccaggtatttgaatttctcaaaagaagtttgaaatctggagtttttttgtttttcagtgtggtcaactaatttacaaattttcggagcagccccaaatatacttgtatgtaggcaagttgcagcctgaggacctccctttcatgatgttgtgcccagcatggttctgggattcctcttgggtctgagatttagacttgtgtgctaacttagctaatggattaattacatcttttaaagtgactcacagaattttttttttttttttttgtaaaaaagtgtgtactgtttaatgtactctgttgttacaggaaaacaacagcatggtgttacggttggataactcaggacatcacaaaaatgttaacaacggtgtctacctaaacagtcatttctagtgcaagcagtaataatgatgaaaagttaaaatatattagatacattatagtacgtattaggcactgaagaaatactgtttggaaagaatgactaggtagattcatttaaaattcattatgagaatttcttctgtcaacttatgtcattgccagtgaaaattcattttagagttcgatctttaagatgtctgagaaattatcttcttaactttttttttttcttaagagcctgagaaattggtgcatcatattctccaggatatgtacaaaaccaagaaaaagaagactcgagttattttgcgaatgttacccatctc

SEQ ID NO: 82563 - DNA, 1044 bp, Homo sapiens
tggaggaagccatagaggagttttgaaattgaaaggaaagaagttgaggggcggttatgggttggcctaaatctcatcaagcccattggtgcgtttatctgtcgaagtggcaggactaaacataaacgctatcaggttactcccctgctcaaatctttcagtgcttctttttccactccaggtaaaatccgagtccttacatgaactgcaaggagttgtatgatctggcacagggtcctctgatccacagcccattctccttcctctgcctcactctgcacagccaccggcctccttgctttttctcaaacacacttgcctgtttcagcctcaggctttctgaattcacagtttccactgactggaactctttcctcagatatccccctggccaaattcctcattttctgaggtgtcttattaaataactcttcccttacctcattttctaaagtagcactcttcattttttctcttttaccattttttaactttttacatctcttactatcacccttgagggtaagaactctttttgtttgatggtgtatctattgcctggaatagctactggcaaattttaggcattcaataaatagttgatggatatgtgaataaataaaggactctttcaattacatgtgagagacccaactttacttaaagaggaatttgttggtcacttttgagttctaggagtcttttgttgttgattccttgggattttctgtgtaatcacattacctgtaaataagtaaacagatcttacttctttctttcagatctatatgcgttttatttccttttcttgccttattgcgcaggctagagtgtctagctctacgttgaataagagtgatgagagcagacatccttgccttgcttttgatcttagagggaaaacattcagtctttcatggttaggtacaatattagtagtaggttttgtgtagatgccctttatcaagttgaggaaattctcctctatttctatttttttctgagtgtttttatcatgaataggtgttgaattttggcaagtgt

SEQ ID NO: 82564 - DNA, 1774 bp, Homo sapiens
aaaaacaaaaacaaaacaaagagaaacgggggttgtttttctttttggattaccaatgaaccctttcaaatggaatcagcaatagaataaaagatatgcatcctcttttctatctgctgggataaggttccaaatagaaacaagttctctactttctcagctcagagaaagccatcatccaaaagatttaccatcttcttacccataaccactgggcttagagctataaacatagctgaaccctcactttcttcttgtttgggggatcttgccctggtcacagtaattatcatttacagaatgcaggcaagaaggagaaagaggaagaggagagattgctaaatcctgtgtctactggcttggagctatgtttcaggcagaaagatcttttattttatagcttcctcttctcccctctccccactagatgcctatttactaacatttcttacctggttatatcattctgtacaagcattcggtatacagttggtgctgaacagaagactgtgatggggtacttggagagtgtctgcaatttagaaaaagcaaactcttggtcttactacaacttaaataagtgcttaaatgtctttggttgacgcagcacaatttaaacattgtttatgttaatgtaaatacattcttaccttttcttgtagaatcatccctcagtgtctgcaggattggttccaggaatgcttaagtcccttatataaaattgtatggtatttgcatataacctatgcatatcctcccgtatactttaaatcatctctagattatttatactgcctaaaacaatgtaaatgctatgtatatatttgttacatggtattttttatttgcatttttttaattgttgtattttgtttttggtttttctccccaaatattttcaatatgtgcctggcagaatcagaggctgcagaacctgtggatacagagggggccgagtgtatcttttcaggcttattgactttctggatgtgacatatcttaaatcatattgtctactctgatctctgcaagttgctttattcaccagttctgtcagccatactgcttaatgcatttctaaatattgacctctttgtgctttggcttacttgcaagatagaagtcggctcaaaacggggtaaatggtgtgtgaatacacatgctccctggatccacggagaaaaaacactactccatgcagactttgcccagcccgtatctgaggtattccacatcacatctgagggtgtcaaatctagccagaacctgggaaaacaaagagtagccctgatgtacataggaaaataaatataaaagaccagtacataagtcatcatctttgcagttttgacacttcaagctgcacttttgtgaaagtataccttccatttacagataatcctaaaccaaaactgctgtgggtgtgtgcagtcattttcggatatccacttgttccactggtaaagaatatggccatgatctcattgtgttttgtcttcacacaggtgtggctgtcactggcatgtctgcaaaggaaaaactacaatgactgcatgttaaacacagcatcacagactgttaccactgaaaaattttgagaagctctccacttgaacctcttcatgtcatgaatcaggtgccagtggcttagcttgaattacagggtaaaagccatcactttctctatccttttaggtgctttctagaatcaaaactaaactttgtcatcaaaggcccatttataatagctgctttcctagctttttattctatg

SEQ ID NO: 82565 - DNA, 1849 bp, Homo sapiens
tcctgaaatctctacttatttacctaccaagactgcttatggttacctcagttccagcctctggttcccacttctgacatctgatgccagcccattctccttcactacaccagggacctcgttggtttccagaccttctgggtaacaatttgatcccatccagctgacttctgtcaccccatcctgacgtgagcctgggttactggcattcacaccatctttgccctagtccaccacggaaggaattcaaattctttctagtacgtattttcagccttattttgtttgtctgttaggatcagagctgcaactcataattcaatcttattttgtagcagttctttctgactagcatatttctatctgacttgcatatttagtaaatgaatcatttggttaattctgtttcactgagctactgtttgtaagtatgtgttaaattgccaacaaattataaagttgacatgaatcagttcttttacctctcctctgatggggtctgggctgctgacaacagctgactctgcaactgaagggtgttcattcagggcattttctacctcaaatggtccaattcgatagctagaaacacatatggcaggaatacatacaggtgagtggcaggttcactctagaacactgatgatcagttaacacagacatatgcacatatggaaaagaaagttacccagaggataatatgacatcatctgctcttgcaacaaaccagaaatacccatctttatccatatatcctctgtccccagtgatatagaaattgcctcgtagagttgaagctgtttttgaaggattatcctgcaaaacaaatagcattttgttgttatggtgaatccaactcttctggtcaattggaatttttttttttttttccgagacagtctcactctgttacccaggctggagtgcagtagtacgatcttggcttactgcaacctctgcctcccaggttcaagcgattctcctgcctcagccttccaaatagctgggactatagacgtgcaccaccacacccggctaatttttgtattttttggttgagatggagtttccccatgttggccaggctggtgtcgagctccttacctcaagtgatccgcccaccttggcctcccaaagtgctgagattacaggcataagccaccgctcctggccctcaattggatttttaaatgttcaaggaagcagaaaagtttggctcctttgagaagcattagagttaggaagagatagattgtgaaaataaagatgaaattccagcatggagctagcccgacagaagaaaggtaaactacagttacaaagattagtcatgtttccatcttgagatttttcttagatagattacaaaataaatattgcagtagctcagaggagtaaactaaattaagtcttttgctaattgattaatagataatgctggtaggaaaagagagaagtaaatactcaagagtcaaaagaaagcactgacacctaataaagagcagacaggtttgttttgtttttgtgctttgttttgttttacacaataatagaattggttctgcaagtctgacataagaaaaaacaagatactgttacattatatcaaatacactggcaagtagcatctggatcttttattatatgatagagactttgctctaatttgtatactgtgattagagatgaaaatattgttgtaaacagtaaggagcttagaaagcctcttgtgaaagacatttgcttaatcccaccacccccgcatcccctgtccctctcactcttcccgaaaagaaagagcactaactggatttcaggaaaatgagtgggttttgtttgataattgaga

SEQ ID NO: 82566 - DNA, 1058 bp, Homo sapiens
ccatttccatggccctgaggaacaagagtggaaatcatggtggcctttaactggcagaagccaagaaagatgttattactttatgcttacaaatcctcttctccaaattttatccttcctagaaatgtttttgaaaactctgcctagtttttggacctgtaatggagaagacagaaagataggccatccctcatagccccctttaaaagtaaatttggagtcctgtcattttctctcctagggcactaccaggactgccatttactgccttccctagaggcatgagtctaggtgcatcaactagtatgtacctccaacgccagattaccagcccggagctggctatggaatgatgcttccctgtaggcacagttccaggagagtcccctgaagcttttttatgattaagtatcctgcacttaggtgcctgaaatcttattaaattcaaggattcgtttgtccagcttaaagataagctggcaacatttcctatccactttgatctgggagtaaagatttcattgaaaaggaattatttgaaacaacaaattaccaggacagccatttggtgagaaacaaagacttgaagttataattttttcacatattgaaaactgttcaccagtgggcagttttacattgtatgaacaattacccatttttgtctttacccaaaacccttgtggccaggcacagtgggtcacgcctgtactgccaacatttgggaggccgaggtgggaggattgcttgagcccaggagttcgagagcagactgggcaacatagtgagactttgtctctaagaaaaaaaacaacaacaacacttgaacatttttaatttacatgtgccatgcggcagttgtgaacccttgtgtgtgtgtgtgtctatggatataattttgttccattcactttttgacattttataaaatgcatttgtagttatgctagctctgctgcattaacatttttacaaattaaaaaattatgcttgttgtaagtgagtcattcaaaggtaaattattttaaaaactgcaatactggttcacatattgacga

SEQ ID NO: 82567 - DNA, 1046 bp, Homo sapiens
gaaatttgaatacaattcaagttgaagaaatgtctgcctgtaacattagcatccagggtcccagcatatataataaggagcctaaaaatataataaatcctcatgaaaaagttcaaatgaagtcaatttgtgcaaattctcctataaaggcacaacaggatcaattacaagtaaaaaacaatataaaagcaagtcttcacaatgtcaaaagttccttacctctttttaatactaagtcctctacttctgtggggcagttgcagtctcctaccttgaattcacctatctatatgcaaaagcaaggaaaaaatgaacatcttgcatttaataccaaatctaaggcttcaacagttggttcagaattggtacttgtttctaccaccgttccaactgttcatcatgtttctgatttggaaatgagctctactctggactgtttacctgtgttggctgattgggaggatgtggttttactgccagcatctcagcctgaggaaaacgtagactgtacagttcccattagtgactcagacttagagatttcatttaattctggagaaagattaatggttttgaaagaattggaaatgtcaagtcatgaaaactttggagacatagaggaaactcctcaaaaatctgagacttctaagtctattgtgtacaagagtcctcacactactatttataatgtaaaagaagccaaagatccaggttcagatatttctgcctttaagttacctgaacacaaatcaagtaccttcaacagagttaatgccaatatgtctcatcctttagttttggggaaacatcctcttctttcaggtggtaccaaaaggaatccatgcagtccccaagctttcccaccagcaaaaaaacaacccttcactattcatgaagaaaagcctacatcatctgattgctccccagtaagaagttcttcctggaggcgtctcccatctatattaacttctacagttaacctacaagagccatggaagagtgggaaaatgacacctccattatgcaagtgtggtcggagatctaag

SEQ ID NO: 82568 - DNA, 1075 bp, Homo sapiens
gcctcgctctgttgcccaggcaggagtgcagtggcacaatctctgctcactgcaacctctgcctcccgagttcaagcaattcttgtgccttagcctcctgaataggtggaattacaggtgcatgccactacacctggctaatttttgtgtttttagtagagatggggtttcaccatgttggccaggctggtcttgaactcctgacctcaagggttccacctacctcagcctcccaaagtgctggaattacaggtgtgagccactgtacctagcccagttctttatattttttagtgaaaatccttaaagcaggcggtctgatgaacttaactacttaagattttccctctgagaacatgtcttgataaggaatatcaagtcattggtcaatctatagatgatctctcttgagccaggtcatacccttaatccaatcagtaatggtccctggttaaagaacaagcttttgctgcttaaataggtggctgagggtggagtatatttagctagaatgaaccataagggagagacaggcactgtaaagaacaggttgaatataccaactatctgaattctgtcttttttttaagactcaatcttttcctttcttgatctctgacactctattgtgaagtatattcctcctcctatccctttactgttttagctcatttgggacttcattttctctgtgttttttttgtttgtttgttttgagacggagtctcgctctgctgcccaggctggagtgcagtggcgcgatctcggctcactgcaagctctgcctctcgggttcacgccattctgccacctcagcctcccaagtagctgggactacaggcacccaccaccacacccggctaattttgtttttgtatttttagtagagacagggtttcaccatgttagccaggatggatggtctcgatctcctgacctcgtgatctgcctgcctcagcctcccaaagtgctgggattacaggcgtgagccactgcaccctgcctttctgtgttcttataattgtaatagattgcaagcccctaaatggttggggctgagttttatacatctttt

SEQ ID NO: 82569 - DNA, 1017 bp, Homo sapiens
agctaatcaccaagaaatacaagcagcaggccaagagcctaaaaacacagcagaagtacttcagcacccaaacacaaggtaatattttcagtttgaaacaagagcaaagacaaatggagtatctagtttcttatttaacaacacctgagaatgtttttatcctcttttgagtctattaaaaactatttaccaaaaaatgataacatctatcacaaaaaccacggaaaaaataccaccttctagccttaatatatagtatttaatttctaattttctgaatctagtggctggtctaaaatgatatccttgatcaaaaaaaaaaaaaagaaaaaataattggaatacgttgaacctaggtagcactgggaaagatgatagactagttggtattttggctagaagagtcaatctgtagccttgttgtattgcccagactatgaaagacacacacacagactcaaaagggctttgtctccagactatagcaaatgtatcagatctttagaattttgcctaatcttttgatagagagctttgggtatatttcttgtttatccttcctctctctattgaagcaacactgtccaaaacaattttctgtgatgatggaagtgctctacatctgtgctatctcgtttggtagctgctagtcacatttgactagtgcagttgaggaactgaatttttaattttatttaattttaattttaatagctatatattgctagtggctaccatattgtataatgcaagtatagagaaataactgtcaggttctggaaaactgttgttcttaccttaactcttctacttctttatagtgttttagaatgcttggattcagtgggtcagaagcttctttttttgacccgggagacagatgctggtgaacttccatcttccagaaattgtcaaactattaagtgtctttcaaataaagaggtgagtggcctgctgaacctttgcaggttatattcaaagcagaggggaatgtagccctttgcacccatgccagtg

SEQ ID NO: 82570 - DNA, 1063 bp, Homo sapiens
tcttaggggcttaatttccctctgtgccaaattggggatgggggaagaagctcagactaacgtgatccctgggattcccatctgcctcttaacactctagatgtatgatgattagaccacttacgacccttagcttccttccattgtattttctgtctagttattgtttacattcaggaaagctcttgactggccatcttacacatttctttcatggagaccctgatggcctccccaaagattcccagcctcatgttggtatcttgtaaaaataagtaagtatggtggtgggagtaggtgtactttttcttttctgttgcaaaggctctggaagtcatgtctacattctctgattagggagaggtttctgagatttcctcaatgaactgcaactctttttctcttcctcattactaaggacaggaccaggtgggggcaggaaggaaatcttaagggatgatgttttcctcacttaaaaagtatgcctctaaaacattccccagttggctcttttgggcttgtttcttctgtgctttggcacttctgagttatggagcccagccagagccttacaaataggtttggggaataaagtggaaggatactgatttgggggcttgtatagagcctgggctattcaaagtgctgtcacaggctgtatagattatatacagctaaaatctaattttcaattagatgatggacaaacaacttcacttagttaccagatgagcttaactgcacgtggaatgctttctagcaagaaaggtgcactgaaggtagtgctgaggatctgaggagtacggaagagttgcaacactggcttcttccctcctttcaaatcagttgctgaagcacatggctggattggctctggaagtcatccttctagctctgagttttgacgtaggtcaaaaagggttagtctgcctgataagattagggagcttgcctaacctctccatttcctttcctttacgttgacttgtgaggatgccctgtcttaaaaacataaggctcctacctgagtttaacattcttctgttcagtgttctgacccttg

SEQ ID NO: 82571 - DNA, 1024 bp, Homo sapiens
gaatatgactaggttttaaagggggaatgtgaagcaataggcacatggggcttggatgaattggtcccacagatataccctgccttaagccgctgaggtgatgagtccactgctcatgtgaccctccacctttgtggatccctcttggtttgtgaccagtgtgtctgtttgttgaggttgtacaaacttgacaaaagttaatacttttgtttgtattttctgcactgttgcactctccaaatggccccttgagtatttttattgacttgttacacacatttttgtctttgatgtctacattttttcctttaatgttttttatttggaaggttacctgctgttggatttaataaatttgtttacttgaatattgatatttctacaaaaaaaaaaaaacagtgactttattctggggcaaaatttacccactgggagcttctaccaacatgatattgagtaacaatttttattctttgaaaaacaatccagataagtacaggatcctcagactccaaacatgggtgttgacctcccacataccaagcttagtagggtggcttttgggggtctcagtgcttagaggcaaagagcaaataagtcttcacagggccactgcctaaatagtcttacctttgcaactgatgtgaattctcatgaggaataaaaagtgaagttgagcagtatgttaaatgcatgacccctagatttaacagtatggcagtgcattaaggcaaaggaaacaagctgtatctggctttaactgtcaaatgccactgctatgtgaccttcggcaagttagtgaacctctaagtttccttttactcatctgcaaaattaaaagactcttggttccatcagagtgctaggatttaaaagtcttgataaagtcccaatgacacataagtgctcaaacattacaagctcttttaaggttctccaaaggaatgctaggtgagtaatgcagggaaaccagagaataagagagggggttggcatggtcatacatgacctttcacaagtcaca

SEQ ID NO: 82572 - DNA, 1036 bp, Homo sapiens
cagagtactcagggtcctgggctgcctgcctcttttgtgcagctttctctgatacactctgatctgggatggaaagggccttatctggccaagagcagcctggcttttccctcagtcaaccactacccaatccagaaccggggaaaatgagttgcaaactggcttaatgaaaaagcagtctttttaaaacctcagtctgggtacccagctacaactgatcccacagaacctgctgggacccctggagacttattcaagagtcttatttagctagaacagaagccaggcatctggcccaagacccccttcagctttctagcagtactataccgtgggtgatcttaaagtttcccatttgcccctctgaaggaggaactgtcaggtttaggatttaaaaaaaaaaacaaattccaagtatgttccctatggtcaatatcagttttagaaaaataccaactgccaaaactctttaataatccttaagatgggagcccagagctgtaaggctgctcacaatggaactcaaaacatgcaattcctgcccaggctgagaaacatacctgggacgcagcggggtattaggttaagggagaaacctccaaatgtttaacagacaaagtctcattacctcaagagtataaatatttttatacgtttttatttaaaagattccctttttaatctgttccaaagtgttggaagctgaactatacaagttcctgccacccatccttccagtacagttttctgaggacatactttttaaatggaaaaataacaggaggaccctctaactgaaaccaggtaggcccagagtgagctcctcaggcccctgtggcagcctggccaaagctggcctttatggagccagcgcgtggagaagtctggggaaccggggccctccctcttgtgaggaaagggctgagcaaactcatgttctctttagtgaaatggtccaaattcagatccaaaagcctccattatggcattccctggcactcttcttatactttatacattgaaggcagctccctct

SEQ ID NO: 82573 - DNA, 1134 bp, Homo sapiens
aataagcctgccatttcttgcacaaatttaggttttttttttgtttttttttgtttttttttttttttttttggtaggggagggcatagagcagggcggggggatgggactgttaggttgaattaacattacaaaatgatacagtgccagatctcagtttcgcatattgtttttcagggcaggtctgtactgtgtgtagtgctgtttacatagatgaatttaggttgtaataattatttttaaagatttacacagatttgaatagcagtgttaactgttaaccacattgcattaattcccaggcgatttagagctcttggagagccaaggccagccaagagcatttgtagtctggtgacaacccccttttaagctaatttatccagaaccctgatttccctcacttcttgctcattccttctttgacctattgcatttcatgttgagtttttccatcaacatgctgcacctgtcagtcaagtgagcattttttaagaacacattgtactgagaaccacttaagcattgaatgcggagaaagcagtgctacctcagttttgctggaagtagacttctttgatagttttctttctttgatgaagtttctgtattttcatgttgtaagtggaaatacttttttttgtttgtttgtttcatttgccttggagccaaagtttctgttcctggtggtcgggaaactgcctgccggccaactgacttgaaggaaaactgtggtatggagctctgcttgaatttttttttttttaatatttttatttttttctttgaatatcatcagcttacttgtctggcaagggcagaagcctggggttggcctgaactctgccaaacaaatatcaaagtgtatttaatagttaaatttgtgccctttcccttcttgctgcacccatgttgtcacttaacccccaggagttatttattatctttttgttaaagtcaggctcatttggggtaatgtgatgactgtttaggtttacatgaccctcctctcctttccctacccccaaatatgtatatatacatatataaaatatgtatatattttacctatataaaatatatatatatacacatatatgtatctatattcctttgtttctttgcctgcttata

SEQ ID NO: 82574 - DNA, 1038 bp, Homo sapiens
tattgcagagcgggaaacagggcagggagcaggagacttgagtttagctttgggaagatgaatgaatgaataaatgaaccattatcagctgccaaccgtgtgccaggcactgttagaagcagaatagtaatttgtttagtcctcaccaaaaccctatgaagtaaggtggtatttttaccatttgacaagtaaggaaataggactaattagttggaggagttagaattcaaattcagaccatctggcctgaaagccttgctcttaatcactatgtatattgcctgtaaatagtatagtttataatgattaattgtccttttcctttctgttgcaggaaggagttttttgatggctgcaaagcaataagtgcagacagcattgacggaatctgtgcacggttccctagcctcttaacagaagccaaacaagaggataaattcaaggatctctaccggtttacatttcagtttggcctggactctgaagaagggcagcggtcactgcatcgggaaatagccattgccctgtggaaactagtctttacccagaacaatcctccggtattggaccaatggctaaacttcctaacagagaacccctcggggatcaagggcatctcccgggacacttggaacatgttccttaacttcactcaggtgattggccctgacctcagcaactacagtgaagatgaggcctggccaagtctctttgacacctttgtggagtgggaaatggagcgaaggaaaagagaaggggaagggagaggtgcactcagctcagggcctgagggcttgtgtcccgaggagcagacttagtggctctgtcccaggagcagcagcaaggatctgccagctgccctgcagccaactgaggaattggaccattttggaaattactgaagatccggatattttctactttacacctttctctgccttgtatctgaaagggctctaaaatgctgtatcatgttttaggcactttcttcatttttttggttattttggttatttcctttttggggggatctcccag

SEQ ID NO: 82575 - DNA, 1098 bp, Homo sapiens
tttttttacacagggtctttgtcacccaggttgcagtggagtggtgctatcccagctcactgcagccttgacctgggctcagttgatcctcccacctgagcctcccttgtagctgggagtacaggtgtgcatcaccacacccaactaatttttttctatttttcgtagagacagggtcttgctatgtctcccaggctagtcacaaactgctgcactcaagctatctgcccacccaccttgcctcccaaaatgttgggattacagatgtgagccactgcaaccggccccagtccttcttttaaagtggagacatgcttctttggaaggctcagcctataggccctataggacaatcacatttattgtggacttggcttgcattctaagtacagccttgctgaggacctgggggagaagaagctcctcagttgggaaacttggtttggagtataggcttggtggatggtttctataggtggatggagtagggcaaagcaagggcatttcacctactgtgtgggataggcccagaaaggaatctggagagatcagaggcaaatttcattttgctgcttggcttaggcccctgcttgtagtcttgacaacctcatcattagggcattatgagactattgttctgaatatggccaccccttctccctactcatcctacttaaaaagaaaatctgagaatgttggcattaggaattagaagatgaacccttcctttgtgccttctggcttaacccaggtccaaataacttttcttatgtgatggcaagttggcaagacagatttcctctggaatatttctgtcagtctttgatgcattctacatatgaatcggcctctttgaaatctatgttaccttaagaattttaggaatttccctcattggttctccatatgtgccccagcctctgcgtcgccaaggtgaagttacggagctggcctgtgaaggggatgatgaactcagggtctctcccatggttcgttgttggctcatggaaatagagcggtgaaccagtgtgcaccctagaaggtagggtccataccccatttcccccacccagaggtgatggctttctaatttccttc

SEQ ID NO: 82576 - DNA, 1048 bp, Homo sapiens
gtccttgttttgagataattcagctcgcacagttgcttcccttgtaccatggtcttccaagaattaaccccttgccatttgaaattgtaatgagttgtacttatggcttactagctgtagtcttaaagcataaaaagtcttttaaaaaacttacttaggatggttgttttccataccaaaagcccttataagagcttcagtgtatttttgaagcctaagtaaaactacaagtctttgagggcatgtttggacatgtatttttgtcattgctctctttgcgggtggagaaggggacaggccttgatatgactaatctctaataactacaggaatgattgtgctcttcattttaaacttactgtatactcagagcttatcctcagagagaattcctcttgaagacgacccccaatttatccaggcactatttggaggaagccaagtattttaggcaaagtttaaagctccagcctttcataaaaaacaccttctgtcccactgccggttttcaaagatcttttagtttggatcatagaggtccatgaaagctccctagacctggggaggcccgggtgactgacgttgacttctgtttagtgtctgtttcctgctacacttctggctcctggtccacacttcattaacaacgtaatttcagtggctgccattattatagcagttggcaaagttttataaatactaaattgtacatggattttccaacaaaccagttgaaggtaggaataagagtcctaagtagccagagtcatcttagagaaatcacctcgcttctggctcagaaatgtctagcaatttgtttaaaaaaccacttttaaattatataaataattaataaaccaccatgacgagtttgttatgtatcagtgcaaacttttctttttcatctagcaattatcctaccatttaaagattgtatttgggtaaatctgtccttcttttgtttttctatttttttcccacttttttcagttttttctttttttctgaatatcctgagcatttttatttatttatttttggtaacttt

SEQ ID NO: 82577 - DNA, 1047 bp, Homo sapiens
gctgcaacaactattttcttgaggttgttgggaggcttgaaggtgatgatgaatatgaagcatgtagccccaggctccacagatactgatttcacgtccccagtccctccctacctttctttccgtaatagtagttcacacttctctctccttctcctgtctgcatttgtacagagtctcagtgtgagtttgtcctctgtggtggttctgttctgtaagacacagttgagagtaagcccctagaagacagggacttgcctggttgtcatttcatgatctgcctaggagatgggaacaacttcctgatccctctttggagctagagcaacccagggactgcagcctctgggattgccctttgggctcagcagtggccgctccaggcctaggaccaggcagccagccaagcccatccccaggaacagcggccagcgctggcacaggggaggaaagagtctggaggctgatgtgcagaggagggagggagaggcagagcagctgggctgagactgagggagagaagctggaggctgatcttggtccagcagaagctgagcagagctgctgtctttggtctttcaggtaaacactcaaagctataagtagaaaagaaaaaaagcctagaagttggtttccccagtgcatgggttttttttttccttctttcttctgccttttctttctccacatccctccttgtctctggctccattcaacccatttgtgtcccttgctaatgcaggagaatggtcacttattgtgagcagacctgaatcgctatgggagatctgggctggctcctgaaaagagcactgttctaggagaagggagacgattctgtcaccaaagttgtgacaataattataactattatagaggctaacaccaaccaaatgctttctgtgagtcaggtattgagcagagcatttacctgcgttatttattctacccaatagtgctttgaggtacaactgcctcgatttaaagttccatgcggacagttcccattatttggtgagattgccatggcaatggcaatggtttgtc

SEQ ID NO: 82578 - DNA, 1051 bp, Homo sapiens
gcatttcctgtcagtctttgaaacttaaacactttcttaataggctcttcggcatgtaaaatcaaagagaaattgtctcagtgataggaattgaaaccaagagggtagccaagttcaggttagatttgggctttcagtttcatgggatatggtttagatcaaatacctgtttcagctggaaggttgatcatgttattgtacagagaaagacttctgagagatttttgctttcagcctttcacatggtgtctgaatgctgggacggggttcctctttgggaacaagatgatgacagcaaatatgtacacaatagaataaagctcctgaagtattctgtggcatatctacttgaaggaggtctaacggtgtaaaaattgcaattggaaagattcttgtagccagttagtcataccatcttttaaatagcatcctactggtccacgtagttataatggaatttgacagctttcatgaacttgggatcattggtcctgttgttcagctaagggtcctatgatatattcgactagaaattgtggcctagtcagttggttctgaaccatgaatcagaacatctggcaattagatcttctctctctttgctctctgaatagaagagatctgagtgacatagctgtgtcttggtagggactctttcagttgtgatagaaaacctgatatctaacttatgcaaaggagagtttgttggctcacacctgtgaagttcaggctttgatcttgactctaggaacagttggattcagggtgtaaataatgccttcaaaattcagtttccctttgtctcttcatactgctttccacttggtgatttcatttttgggttctacatgcatttgagctgagccccatgtgataaacagggaccatttaatcctcacagtgaccccctaggcattcttattttctctggtagctctttctggtagcatctccagcctcctgtattttcagggttgagattctgtctggctggcttgtcatgggcatatcctgggtccagtcattaaagccaggggcatgtgaggccttg

SEQ ID NO: 82579 - DNA, 1021 bp, Homo sapiens
acttaaaaaattcggtttaaggacttactgggagggagaaattacggaacattttcttttctggttcttaaaatatgtttttggcctggaagaaacaagtgtcaaagttgtttttaagattattaggttgacttctcttacagtgagtagttggtgtcagcaaattgatttgcaatgagaaagatgactgtgccttttgctgagcagtggtggataatgagacttccacttcaataagcccattggcaataccgagtcataacctgggtgaataggagttaatcttggctgcctggcagaagtggatttgttatataatttatgatacccagaaatcctttggggaggtctttattatcttattatcatgacagtatccatctatgcctgaagattaatttttgttgttctcatctagttccaccagagcgattctcctaactgaaagggtagtgacttgttaaatgcctgcatttggcttttgctttgacacaaaggtatgctaatcaagattggatgttagcaatccagaaatatttcagttagtgatttattaatagtttagagatttttttttctcctgttaaactgacttctgaaaaatgagtcatattcagggtttcaaacatttcctctttgaccagcctcaaaaaaggtttatcagtgtttgtcttgtagattgttgctgcaattcatttgtgtcagttctgccactgctgaaacaaacacaagaggggtatcagtttggttttccatcatttgacacaagcggacttcttaattctgtcactggtggacgatcactgttaaacaagccggtactattttttatgactcactgagaagtcatgtggtagtgtgataccccgtctccagctaccagtgtttaaacttgtaattttcaatatattgtgttaaaacagacttctaattctggctatttttcttttcaattttaggcctaaaattggaagctctgtttttataaaacagcctcctagaaaagtcaccggtgttgcta

SEQ ID NO: 82580 - DNA, 1013 bp, Homo sapiens
gtgacattcacccttggtctgcagaccaagttttgcaaagctagagtggggctgtttgttttcttctcttcttgggaaattgccattggatcagtttgtcttggttaagatcttttgtgggtagctgagcagttgggcttttaaagatgaaagccacatgaaagaagactgttctttcctagtcatacaaatgattatctccatggtcgtataatctccataagaagtatgagcattcgagaccacacatttaaaaacttaacatataacagagtcagaaggaaagatgtacaacatagtggcagaggtcagtacctttacaagccattcttacatgttccagcaccacttatcgcggtcttctcatggtagaataaccttttagtttatccagaatcttttcactcctaaaataaagcccttttaggatgttagaaacttgaatattcatggcaacttcaagtaaaaaaataaaaatgtttaattgaagacttaatctttaactctgactttaaaactttcctagtcaaagagctggagttgcttaatttatcagagcatttgcttttccaagttcacagctctcaatcgttgattggcctagcagaaagagataataaaaagttgtgcaacaggtaaaaatctttccagttgccttttccccatttggaaggaaacctgtttttctttccttctgaacagtttggcctaagctcctcccctttctgatttgcatatttgctattttcatacagtacttcaattgattcactcaacagaaagttctaaagatctccagtatttaatacttctgatacaaccagcttaagcaaaagaattttcaattatgatagcagtttaacagaacaaaaatttttttttttgagatggagttgcgctctgtcacccaggctggagtgcagtggctcgacctcggctcactgcaagctccgcctctcaggttcatgccattctcctgccccagcctccctagtagctgggactacaggtgc

SEQ ID NO: 82581 - DNA, 1161 bp, Homo sapiens
ctagtgactctgtaatggaaacttccagcatgtttccaaagctggcctaaaacccagagatggaaaatcttcctcctgaaaccctatggagcctgtataagtctagcagtggggacaggggctaggatactgttggatcaaaaattgggaaactgatccaggagacatttttatctttgactgtatgccttgaggttcagtgagttgggcaaaaccacattagactttgggaaaagaaatagatttatttcagccagtctagataatgtttgacagagtctcagataaagagaaaagcccagatccacatgcaaaagggcttcctgactgcttagagtttacttgttggtgaactcctctgaggccaggtctctaattcttcctgtagctcaagaaccaagacagtctactgtagtgggactaccattggattaagtccttagttctagtctagactctgccaccattgctgcttttccttgggcagatcacatcccctctcagtctgtttctttaactatgacataaaggatttaggactaaatcactgtttctcaaagtgtggctttggttacacttgtaatttatgtgttgctgaaatgaatactcatgtgtttttttactgctgatggtgcataagatgatttttggtggcacatgatgaatacttttcatttactagttctgttttttattgtatttacttactttttgagatggaatcttgctctgtctcccaggctggagtgcagtggcgctatcttggctcactgcaacctctgcctcctgggttcaagtgattctcctgcctcagcctcccgagtagctgggattacaggcacccgccaccacgccctgctaatttttgtaacagggttgcaccatgttggccaggctggtcttgaactccttacctcaggcgatccaccctccttggcctcccaaagtgctgggattacaggtgtgagccacagcgcccagcctactagttctgttttttaatgtgtatgaatgaaaacataactatcatatcacacctatgaattcatggacaatagtgcttaggatgatactaaagtcatgtcaaagacaaaattgcaaccaatttagtttccagatctcaactggctgtattgcaattctagaattgggcaatgtttc

SEQ ID NO: 82582 - DNA, 1619 bp, Homo sapiens
ctgtagaaggattatcgaaaacttgaacagagctttctgggcagttctgggggcaatgaaggggacgaggtagatcctggtactgaattactaattctgatttgattgcaaacagaatgtcttttagttagcaagcaaatgactaaagtaaacatctaggaacaggcaacttctactcttcatactagagtatctcaaaggaatagagaattggtagtgagatttgttaatttaattatttggctttggcccaggttaaaggttttggacttaacttatatgctgatgcttggcataaaatgctctatctgatgggttattaagctctccacttcattttcatttcaatggtttattgtaactcaaatatgaaaatatcctgtaggctgaagtttcatcagccagtttggagactggtggctcttttctaatttttgaaagggggcgggtgggtaggaggggacttgaacacaaggagaagccattgtctcctacattggctactaattgtgtttggggaaagaatccacaaatttaagtggattggattttcggagctgagctggccttttaatttagggtaccagtggatttatttcttacactttgcaggcttttggacaaactcttctgaaaggtgggcaacctagaaagccagttgatgccacttgctattggagttgtgggtaagtggttttacattgcattacacgactaaaaggtaatcagattttgctactgttttggtgtacagatgctctttgatttacagtggggttaccttttataaccccatcataagttgaaaatattgttagtaaaaaaatgcatttaatatacctcacctaccgaacatcatagcttagcctagcctaccttaaacatgccaagaacctgcatgtttggcatgtttggcaaatgcatctaatgagcctattttataataaaatattgaatatctcatgtaatttattgagtgaatactggaagtgaaaaacagaatggttgtgtaagtacttgaagtagtctgggactgtctatgtgctgaagtaaggacatttaattgtgcagtagttgccagttgttttgaggtgaagaagtggtaacttagattgaaacaatggtaatgacgtggtaactcctgttttcccgggtcttgataacttaaaattatctctttgtgtctgtttagactgttctggagctctttgcacaatggaccagggttaattgagttagtgtctttcagttcaaatctagtttcactagttcttacgtctgtgttcctagatgatggtgaatcctattcttttgggtggtgagaagggattaccacagaacttgaccgtttaatcagtgaataattacaaactagagcgtaacatatttacatccccttggtatcctgggggattggttttggaccccttagttaccaaattcacaaatgatcaagacttacataaagtggtagtatatgggaaggtgcagggagtggcggtgatgcacatctgtagtcccagctactcaggaggcatttccagattacttataatgcctaatacagtttgggtgtggtggctcattcctgtaatcccagcacgttaggaggctactac

SEQ ID NO: 82583 - DNA, 1227 bp, Homo sapiens
ttcaacaaacatttattgactcctaagtgctagccagtgtttcaggcactgggtgtacacaggtgaacacaagcaaaaggttcaccctttcatggagcttacatcggagtgggagctggggacagagagagacataatatatatcccagtaaaccagattttgatcaagcgctgaagaaaataagagtgatgtgattgaaagtgtcttaactgtagatgcagtcaaagaggatctttctgaggaagtgacacttaagttgagctttaagtataaagaaggagccagccatccaaagaaaaggggaagatccttccaggttcagggaacagctggtgcagaaactggctggaatgcgcttgtcaagttccagggaatgggaagaaagggtcagggtaggtgggaggtagtggaaagaggatgggttgggtgagtaatagccagagcttagtgaacacgggggagagttggagataaggtcagagaggtggatatggggctcagaataggtaggcaaacaaattgccagaaggagtaggaagtagaaaatgatgctgcttgttgattaattctgtcgccttaactagggtcttatcacttactgtttttgcaggtactgttggactatcataataaagtcactctgctgagtgggagaggaagaggcagtggtcacctgggtcttttctggcagataaatttcaagctgggtgttcagattttcagcaggatgttcaattgaggacacacctctttctttattttgtcttatatactgctgtttaaaactgcataataagttctctgaatgtgttctagtatacgaatcctcctttgtttccagctctgtatgaatttaaggactgggcaagtgttaataatatgcccttatccatctaccaagatgaccatcaggatctaagtttcaagttgtcttttgtagggaggcagtttatgttgcaatagttccactcttgtctgatccttctgatgactaataacactcagctgaggtgtaggttggtactaaaagttcactcagtggattacattagataaatgaccattgtggggctcaattccactgtgtcggcatctttgggctggcacgtaaccaagggatgtaacctacttttgccttctgctgagggcattcatctctaatggtgtgctgcttttcagcctcaccttgaccagaccgtccacttgagaggcccaatcaagactcc

SEQ ID NO: 82584 - DNA, 1047 bp, Homo sapiens
atttccctccccacccccatcgttctctttaatcattaacagccctggaattaaggggctcagacctgaaggcctttttgtgcacctttgctataaacgataaccatctgtgtccgaggtaatgaggctggaggctttgcctgtatcctctataggaagtgggacggggtgacaaatgtattgtttgttcctccaccacaccccccgcacttctcacccctcatcctcccccatgcacacccctggtttccactttaattctctgtggctgagtggcaatagtggatttttttttcttcccctttcctcctttatggcacttagtgccttggttacctcttttgaatttggtgttcagcctctatcccagatcttaactgtaagctttgtaatacttcatacaggctgtcacgttgggagtacctcttacgctccgattataatgagcattttcttttatgaatactggaattccagagcctttgcaaggaatcctgaatggcatcatagcccaggaatcaaggtctcttgctcgaaatactttatgtgtgaggaatttacatgttgtcagctcttcccaaaatgatttgctaggctaattctggatttctgtgtttctctccacccacttttcatgatgcacttcagagaacagaaaaccccatattacttttttgtttctacaattggacaatagctcttttatgtttttctccatttatgtgtgacacacaaatcatcagtgacacgttcagcttgtgctgattttcatctttacgtagctgattctttgtgtatgggggtcctaaatgagacagtgtgatctgtttagttttggtttaagggcgaatacaaaccaataacggatgtgaaaaaattatttgaagcaaagaatggaaagaaggcctctttgttgatatgctgttggtttaaaaaaaatcaaggagcactcttctagcctctcagacagatatcagagtgaagtgttatgattttccttttggtgttgatacattcttcggaaatcttttgtagaatctgaaactg

SEQ ID NO: 82585 - DNA, 1069 bp, Homo sapiens
gtagccactgaccacatgtgactatttaaataaaaattcagttcctccaacacagtatgtttcaagtgccagtagctacctgtgacaggtgtgtgtcctattggacagagcagatagaacctttccttcacagaaagttatcttggtcagcattggactggaggaactcgagggtactatgtaggctagtcattctccgcatgtgaaactcaagggacttagcctactgaggagctctggtgcctctgcagatgggaaagttgcgcattcagtagttatttgatggtggaggaagctgtcctgaaggcctggacccctgcacagaatgtggttatttatcagagagttggatcaagggtcaggtgctagaaagccccaactgtatctagtgtggcatgcaaagctctttggtcagtttcctaatccagttcctcagaaaactataacaaagcaagaacttaagtcagtgtcttgtgttctcagacttttcgatttgatatgaagggtgaaagatcctggctggggagttatgaatgaatgaatgaatgaatgaatgaatgatctttagcattggccttcaattccagcccccccaccacatctcttccactgccttctactactagtaactggtgactgctttttcaccacctctgactgacccgtaccttttctttgcctgttaaaatatgctaataaggaaacatacttccatttcttttgaattgaggggcccataacttttcatttagaacttctatccctgatgggaaaaatagctgtatatctattggttgttatcttggttacagtagcctgattggagttcccctgtacaaatataatcttgtgtgcgctccggtgctggtatgatatatttagaatgggtgtgcttgcctcctgtgatcttgtttgggatagacattttagaagtctttcagacattttttgttttggccccgtgttctaaaaacttcccatattacagggcctaaactaaattattttcccttaggtaaaataaaaatgccatccaccctctcctccctgccccctattgctgacagac

SEQ ID NO: 82586 - DNA, 1082 bp, Homo sapiens
tccttgtaagcatttttttctgtgcagcctcatagactcagaattggtattgaatataactttggtccttttaacctttgaattaggtgaagtagtatttgaagcttttcatcagttggctcattctttactcaagaataaacctcaagaaacgtcatcagggtcagagtaagtgctcatattggaaagagaaattctctgtaagttgaattccttgcaagtacttagaattttgaggtaaacgtgcccacttccagctccaatctgcattctttagctgctcaaattctcataatttcaggactaccctaaagcatattatctccacctcttatgcctttccctccataagttgaaaatggatcatgttcccaaaagcaagcagtgagcagcttacttcccgatcctgatgagcctgttagaggaaaacccagaactcagaatgaggtgtccagctgcctggccttgctacttactcaccaaatctgccctccttgtcttcccaccctgtcttctggttcaaggctgtacaatattcattgttctaattctgactaatcagaatcttccagtagtgggacttttttttttctagcttccctgaatttattttagatatagaaatgtaaatagttatgaaaaaaggagagggggggctgaaatactttgttttttcatttttatagagatagggtctctttatattgcccaggctggtcctgaactcctggcctcaaatgatccttccatctcagcctcccaaagtactgggattataggaatgagccactggagccagcctgaagtttttaaataagttgttggggtttgcttgtttgtttttgagatggggtctcactctgtcacccaggctggagtgcaggggctcagtcttggcttgtagtgcaatctcagcttactttagcctcccgggctcatacgatcctcccacctcagcctcccaagtagctaggactacaggcacatgccatcagccctgtccaatttttgtatttttttacaaaatgaatgttttgttaaaaacatgttaccgaggtgggtctcaaactccagagcttaag

SEQ ID NO: 82587 - DNA, 1025 bp, Homo sapiens
gcctgaggtcaggagtttgaaactagcctggtcaacatggtgaaaccctgtctctactaaaaatacaaaaaaaaaaaaaattagccaggcatggtggcatgcacctgtaatcccagctactcaggaggctgaggcaggagaatcacttgatcctgggaggcagagtttgcagtgagccaaaatcgcgccactgcacttcagcctgggcaacagagcgagactccatctcgaaaaaaaaaaaaattaaaaaaaaaaatttgctcagccctgagctagatttagaaagatgcacaatttgttggtgggtgtttcttactatcatattctctgcccctttgcagacaattgaagcctgagctcatctctgggtatcagtccctgttattccaataggcattggcaacatggacatgtatcaggaaacttccagccatggggcctgggttgtttcaagaaaagttgttttgaccaaaggcgaaccaaatttctgtctattctaggaatggcagtggaagacacagttgcagccaaactcatctatgattcctggtcatctggtaaataaaacaaaggaacttgatgttgagatggatgcttgaggaatattgctgctggttctcataatttctagagtaaatgagggagtccagtccccagtgaactctccttttgtgcttatcatgttttaccttaaatgctgagatcctcatttatgtttgtagttggaaagcaaagctaggtagccatttcttctgttctaccaagttataatagcattcatttccctttatatttccctgaaataaagcacattccaattgtgcagtgtttgcttcggtaacttctattactatcacaaggaaactgagagggatcagatgctcccatttactccctgggggagctacactggctataatgaaacttcttttttatgtatttatttagtagttacaactcacatactctaagatccactagtttaaactatacaattcagtagtgtttttttttttttttttttg

SEQ ID NO: 82588 - DNA, 1838 bp, Homo sapiens
gctggagtgcagtggcatgatcttggctcactgcaacctccgcctcccaggtttaagcaattctcatgcctcagcctccagagtagcaaagactacaggtgtgagccaccacgcctggataattttttgtatttttagtagacacagggtttcaccatgttggccaggctagtctcaaactcctggcttcaagtgatctgcctgcctcagcctcccaaagtgctgggattacaggtgtgagccaccacacctggcctatttcttaataagtatttcgtcctactgattgggagagcatggcctggggaatgagggggtattttgaatctgagtgtgttcacgagtcctttgttcacctctctcctgtgctttgggcttcttagcagcctttggcactaatcctgggcttaaggtctgttttgctgtctcttagctgttggagccagcagacctgactggagagaactggatgatgagctcatgaaagaagctgtgctgtacgtggattcccaggaggctgccctgaaggagtctggagatgtcctgctgtcaggggtgaggcccttctgaccccagtcagggctgccacctggctggcctcacctggatcccagggtttcattaacttcccttccagtttggtctgctccagacctcagccaccccacctccttgtaggggaaggagctcctaaacattttgcaaccctctttaattccattccagaaaaatatgggcattatgggtggtgacatgtgtgttcctggaaggagaagctcagtggattttatttttttgctgggctgtcctctaaagaagtgggattggaagcttcttgcagcctggaaaccttcccaatgtggccaacatgataagactgtgttgcccaccttctggcctcattttacggttataatcagcataaaacaagaagggagctgctggcatgcatgttcagataacagcatgtctatttcctcactgacacaatgatcttggcaggacagctccctgagcaccaactcgaatctctgtgtttatggtatcacaaaagcaaatgccaccccaaaaggatttcggggccagcctcctccctaatatcattcagtgtacaaaggatctctctctttttttttttttttttaatcaaatttatctcttatccaattcaggaattccctgggctggcttcaaaagccaaccctgcacagactttagcttcatgcctgggtcagcgtatgtttgtttcctaggccgagatctttgctgagctgggagaagtgattaagggagtgaaaccagcccactgtgagaagaccaccgtgttcaagtctttgggtaagatccattgctccctgggcacaaatccaactagcgcacaaggcaggttcacccattggtggaaagagcaatgagtcaccagactctgcagctgaatcattgtgctccatcattcaggtcaattatttacatggtttagcctagtgctaagcccatgaactctggaactgagcagtcctgggtcagagtcccttccccgccactcaaaggcaggtgtccttaggcaagtgatctgacctctgtaggcctcagtttcctcaccacctgttaccattgaggattaggtgggatttgcatataaaatgaatcagttcggtgcagatcttgatgaaattcagaaggtacccttcagaggtggagggggcaggggacaaagatgttaaaagacaggaaccttaagggaaatggcagagacccaacctgaaagagtcagatggaaagtatagcctaagccctgttcattccctccttccctactctcccacttgctgctttga

SEQ ID NO: 82589 - DNA, 1056 bp, Homo sapiens
aggtcatgggaacttttgcatgaggtggatagaccagttggccacttcagggggctggcaggggaaccgctggttggtcatacccgcatcttggtgcagctgctttgctgccgtgggtaccctgagccagtgctgcgtgacctgggcagactccctataaaggtgaactcgcattctgcggcgatgctgcctctggagtgatgagtgcacgcgagctgcatggctggactctaccagcatctgcgcaagccacagcaggaagcagctttccatcgcggttctagaaccctcctctctcactcatgcgtgtgcacacacacagtcggaacaggtccacaggacaacaggccacagcgagaaggcagctttccattgtggttccagagccctcctccctcactcacgtgtgtgcacttacacggtccgaacaggtccacagaatggtattactgtgtgctgattgcactaatattttttattctgttttctgttctgcttttctgtttctcttcctttttgtctctttgaaaactggctatgacacattgcattgattttgcaacccacactttgaaaaatactggaatagatgatcgctaatgtctctttcgtaagagtttgtagttctaaaagttgtaattgagtagctgggactataggtgtgcaccactgcatctgtgtaattaagtaatttttaaaaatttacaactatataggccgggcacggtggctcacgcctgtaatcccagcactttgggaggccgaagtgggtggatcacgaggtcaggagatcgagaccatgctggctaacacagtgaaaccccatctctactaaaaatacaaaaaattagctgggcatggtggcgggcgcctgtagtcccagctactcggaaggctgaggcaggagaatggcttgaacccgggaggcagagcttgcagtgagctgagatcgcggcactgcactccagcctgggcgacagagcgagactccctctcaaaaaaaaaaaaatttacaactatataaagtttacactgcaaatattaatattcttcctc

SEQ ID NO: 82590 - DNA, 2586 bp, Homo sapiens
gaaccaccaggtacgggctggggccggggccggggcgggggcgtggcggcccggccttcccgcgctgggcccggctattgtgcgggacggctccgcgagggggcggcccggccctcgcccctccgcctcggccccttggaaagttttccccgcgccttccccgccgggcgtcgactccgcgagccccgggcacccggccgcggccccgcgagcgccttttgttccgcagcgcaggcggggcatggcctcccgggcccgatcgtgagcggcccggagccccgcattgttcctgggtcccgggcggtgactgcggacgcccggcagcgggactggggaactttggggccagagcgtggctgggggcgcccgcctggcaccgaggcctgagactgaagagacccggccagatccattaccccgagaaacaaaacgaaaagccagcccctcttgttgtctcgttgaatcccagaacgtacaaagggtcgtgaagaaatgtaactgtacatcgcaagccattgaactctccaggctgattggggtgacatttctccctaagcacttaaaaaatgggtttgacaggttgtcgctcccatcctacggaaccttcccctcctacctagcagagatctcctttaaacttggatttagtcagcctgctagaaagattgtgtgtgatgaggaggaagattatgcaagttttacaggaagggtttttaaaacagaacgggacgggagggagttttagttatgcatcgtgagcgttacgctgtgaccgggtaggtaggcttttcattagctcagtcttgcgccacttaaacgtgtacaggttaactgtagaattaagtgagatatttcgtatatgaccttaacatagtttgcagttaatgttaaattcattgaaaagaggcttttgaactctgccagagtgttggcttgtcatagctagcatttataatacattttgcttttccatagagtattaattattccctatatcatcttgtgtctcatcattttcatatatttctcattttcctacattacttttttattatgccaggtgttcagagaatttacacccaggttgatttcatgtgttttaatgagggtagagaattgtctaagaaggagatagagcaatttagaaaagtagcatttagtctttagtaatatgtatattgggcttttttctattgttaaaggaatcctaaatttctgtaaatttttttgaaagcctccagccattgcagtttgttaggtgcaatatcagtatcattgatcacttgtatgatatggttaggaatgtatgtaaacttaaattgcaaaaccacatttattcctatggattatttgcttacactagttcattcttatagagacaactcaaaggtactgtaccgttgactgtacagttaccagaatgtcacatatggaacaatggggtagacaatgaattagaaatgtcatttttaacatttttaagcagttgatagaaataaggtcctggataggagaaaaagcgatttatctccattgatgggggattatggttgagtctcttagctattggtatttataacacttatcatgattacccctactgcagccacttggtaggtttttagtgctcataaaagaattgcacttattttaaaattgaaacactatttcaacactgtgatgtgtatggaggcggaattgcagctgtagacatagcctcagaatatctcccagcagaggatactttctgactgtaccttttaaaagctgaatctgttaagttctaatgaaaactaatactggtttcagatacgtttatttcagataccgtatttatattctgtgtgtgtgtgtgtgtgtgtgtgtgtgtgtgtaccccttcactaacaattcagcagataatttctttagggtgaagacttaatatggtgttttctgaatatttgggggatgggtcaactcttttccttagaataatgaatccagacattattttgacatgaatacattcatattatgaaaataatcgtgcatgaataaagattaaaaggaacagaagaaaggtgtgtagaaaccaccatgagataaagtaggaaactgtcctttctgcactgtggctggagttgataatttgttttccacttaatattccaggatcctgggtttgccttataacttcgttgcttgtgaagtaactgtaactgtttttcctccttcagattaatagttttatacaaggtcttctaagtgttcagttgggtgtgtgagttccatagccagccacatctgggccttttggagttgcataaaagtagggttgtggatttgattgaaccatacttagcaaaagtgttccttctggttattttattaaggaattatgatggaggattctgtggttaaaagagagatcttgggcaatgtttattcgttaaaaatggctattttgttagtatagtttggagaggcaaggctcctttgggctaaagctgctctaaaactgtagtagcagtgccattttagtaacttggtttggtgtgctagcttcaaaactgggattatgtttcactttgggcaagcaagaag

SEQ ID NO: 82591 - DNA, 1696 bp, Homo sapiens
cctgcaagcctaaaacatttactacgtggcttcttacagaataaagactttttccaagagaaattcccagcttccttaacaaacagcttttttttttttttggagacagggtctcactgtgtcacccaggctggagtgtagtggcacaatctcagctcactgcatcctcgacctcctgggttcaagcggttctcatgcctcagcctctccatagctgggattacaggcacgtgccagcacacctggttaatttttgtagttttagtagagacagggcttcaccatgttggccaggctggtcttgaactcctggcctcaagtgatcttcccacatcggcttcccaaagtgctggaattacaggagtgagccactgcaaccagcctccaacagcatattcttaatcacaggttgcagggtgggtagattgactcactgggaagaaatagaggcaggcagtgagaaactagtagatattgtcactttgcaatgttggcagactcagaatttaaaaagacaacaacaaaaaacttaggatctattctttttgatgcattgcacctagtgcttaaagttaatgcaactattatggagctactgaaactttgaaaggacccttaggccccaggttcttggtaataatagcggttcagtagcttctcaattgatggagtgaaaaaattgttatagaactcgctgaaccaaaccacaacgatttctccgggtgacatactgcaaggttttttaaaagcacagataacattcaatatctggaattattaagttgtaacttaaaattgcaagtatgtgtatatttttgtgacttattttttcactttcttatataagctcagaactgcgctatgccacaagtgatgaagaattcaagaaagaattaaaatccttttttttcccccaaatgaaaaaatacttggacagcatagccagagccaaacactgtgctaaaggacagagtgtttcctgtccctttacccctcacttaccctgtggaggcagactggagtcaggcatgagttaacaatgcttcaaggatagtcagccagctaagccggacagacactgatggattggcgtccttctctgaactgccttcgagagtctggaggcctttgcagctgaataccaaagagacttcagaaaggatttctttgcttcctcataatctgtgttgaaaccccaagtgtttgcttcagtttcacagaacactagaatctctttcttgtgctggatataccaggagtctttatgtttctctttgaaggtgccctagaagaccctaatagcttccagtaaaaagctctgttgtgtagaccctctgaagctttgttaaaattttaggattatcctgtcctatggggagtgagtatttagtatttgcaatgaggattgccagtaattggttattaaatcaaagctgaagccatttaatctgttttaattgattcccctcatggatatgagggtgcctgtcactgtacacattgaaatctcacataaagaggttattgggttgagtttatattgtttgtgggaaaatggtgaatggtctgaatatttacgcctatgctgtgcttaaatgcaaggtgtgcatggtgaaatgtctggactgagttgactgcattgtaaaatcttagaatgtgaattttgaatccttagctgtcaagctctgttgatgga

SEQ ID NO: 82592 - DNA, 1126 bp, Homo sapiens
gaagagacttgctcaccagcacagagttaatggatgatagagttgggctttgcacccagctttggtttcaaggcaacacattttctgctgctttatgatgcccctcctggtaaaccttgtgttgtctgaggggtggtaaaaataggcttgccttctttttttttttttttttttttttttttttttttttttttgagaaacaagttcttactctgtcacccaagttggaatgcagtggcctgatcatatctcactgcagcctcaaactcctggcctcagtacatcctcctgcctcggcctcctgagtagcttctaaatcttttgtagaggcagggtcttgccatgttgttcaggctggtctcaaactcctggcctcaagcagtcctcctgcctcagtctcccaaagtgctgggattacaggcgtgagccactgctcctggcctaggcttgccttctgaataggaaactgccctcattctagtgaggcctctgtgtagacactgaagttaggtagctgtgtgcacaatacttgttgaagattttgtagtttgtgaattagatgagaataagacagctgcttgaagttctggcctttatctggtttgtgcatgctttttttaaggcttaaagttgaaaaaagattcttacatgtattgtcattttttcctgacatcagccattctctaattttccatcaccaagtgggtgtttaattgttcaatcctgttctgacattaactacctggagttagggtcacgctttacagagttaagagctcagtcccacaagactgccctcacttcagaggccagctggaagtcctgggttcccaggctgccagtgcttttgtccaccttgaacaaatttgggagttcccacaactctaccttcaccctaccccaccccaccccctaatttcctataatagaatgactcatagaacttaggaaaacacaggtgcggtggctcacgcctgtaatcccggcactatgggaggctgaggtgggtggatcacgaggtcaggagatcaagaccatcccggctaacagggtgaaacctggtctctactaaaaatacaaaaaaattagctgggcgtggtggcacgtgcctgtaatcccagctact

SEQ ID NO: 82593 - DNA, 1022 bp, Homo sapiens
gtctcaaaataataataataataataataaaccacttaggtttactggtttattacaaaggatacaattggggaacggccaagtggaagaggtgcatagggtgaggtgtgggaggtggtgtagagtttctctttcctctgatgagccacccaaccatcatatcaatgtattcagcaaactaaaagctcccaggaccccatagtttaggggtgtcattacataggcatgattagactcagtcttcaactcctttctcatccttggagattggaaggtggggctgaaagtttgaaccttatacccacatcctggtccccatcctgaagctgtctgggtctcccacccctatcaggagtcatcctgttagcatacaaaagatactcttattaccctgagattcccgaagggttttaggaactctctatcaggaacctgggacaaagatcaaatatgtattttttattataccacatcatctaaaatcagtcagtttttaaaattactttctgactctgctagtgtgcttaaatcctttgtattttgggaatgttgtattttggatatgttgtatatcacatgtttgattagttgataaactccaaaaataatttcagaaaaacttttaaccatatttggtctgattagcaaatctaattttataggaaaattgcattcctactttgaacgagtgattcatcaaccaaggttatatataaatattaggaggagttcatgggcttaatgagaaattttttttttttttttgacagtcttgctttgtcgcccaggctggagtgcagtggcacactctgggctcactacaacctctgcctctctggttcaagtgattcttttgccttagcctcccaagtagctggaattataggttcctgccaccacgcctggctaatttttgtatttttagtagagacggggtttcaccatgttggccaggctggtcttgaactcttgacttcaagtgatctgcccacctgggcctccaaattgctgggattacaggt

SEQ ID NO: 82594 - DNA, 1057 bp, Homo sapiens
gttggtgtcttccttcattgcttgcttccttgcttgtggtaatgcaattttgtggtgagtgggtagctgtaaccactggttgcaaaattaggtttaagcaaggccttgcagagtttgagaaattgacagaaaccccatggcagcgatctctgtggttatccttatgtttcctctaggattttgttagaaactccaaattctgtttaggctgcctgttgatgaacatttattgtttgtctgtatctgtgccaggcactgaagccattcattttctctgcctttatgaagctctcagtctacctgggaagataggcactgaacatgcgattgtctacaattattcaattcagagattgtaaatattaccaaagggacaaatgggatgtatgaaagggtattagaacagggggcctagcctagcctttcgtaggtatattttcctttgaaaagaaaatatacctaggaaatatttaggctgaagttgaacgaaccaggtgaagagagagtgggttaggtggtgggaaatgttggggggcagagcaaataccatgtgagacagccacgggaaaggggccttccagaaaaaagaaggaaggggtggagctgtgtgatggagtgagggtccaggggtcatgggttggtagggaatgtcatgaggtgaggctggagacacagaatgaacaaaaatcgtgcagggccttataagccatattaagcattttggatgttatcctaagattcctgttaagcagggtagtgatgtgatcagatttgcatttaaaatttgcattttaagaggttttctaggttacttatgttttcaggccacttttaatttctggaagatctaactgccacctgcatatttagggaggggtgtgtgtgtgtgtttaaaaaacagctttattgggatataattcacataccatgaaatttatccttttaaagagtacaattcattgatttttagtataatcacagaattatgcagccatcaccagtattaattttggaacatttcatcaccccaaaaagaaacctcatgtccattagcagc

SEQ ID NO: 82595 - DNA, 1439 bp, Homo sapiens
gacttatttcacttagcataatgttgtcaaggttcatccatgctggagcatgaagcagtgcttcattcctttgtatggcagaacatgctattattttatatgaatctattatcacatcttgcttatccaccatttgatggacatttgacttgtttgcagtttctgacattgctgctgtgaaatcgacatttgtgtcatgcaaatggtcagaaaggacatacgtttcacctttctttttaaagagaagagctttgctctatttttgttctgtagcacattctgttcaataagcagtttctttccagaaagacctgtgtgacagtaagggttcaaccacacgtgttaatgttgatgaattgagaaaaatgctattaaaaacttgagttttcctcttggtgcttgaaagcactatttgcagctaatggtgccagttcctgcttggttctagaagtcagaatctattgttgttctagtccatttacaagtggatgccaaggaattcttagctcctctgtttcacttgaatgacttctcatccacattaataaaatgtacctgattgcctattatcaaggtgatggctttcatcttgattagccatttcagagaataaaaaataaataaaagtcagagtggcctccatattacagagttcagaacgtgcaccaggaggtcatgagtataataaaaaacggtttatgacctgcactggagcataacttcaggcacaataagtattaagaattagaaaatcattaagcaagaacattttcagaccaagggaaaaaatgtaggcagtgaatgtaaaaagcttcatagcttgtcatatagagtaggaaaaataaaaacagttttatatataaagtccaagcagttttgataactgtgatgaaatggcaaattagcacaaattagtccacaactggaaaggtttggtttacccagtttagggaacagagtttgtaaaatgattaatctctgaaatttaacgtgcctgtttgtttgtgttgatttgtaactagttccttttaacgttagcatcaggaatgttacttaagatttcactgaacattagtaagcttaggatgactgtaaagctggtctaccaattgtgcaagcacttatgggacgtctactgctgataaaaggtcgtatttgtcaaggggaagcaaattactcttggccaattgactgggaaaaatttgtgtttcatggcagataatgggttaataataattgatatactttgtagtttcatcactgtacttaaggggcttattcttatttctcaggctatgttagaggaatctcactgctattattattgtaggattctcactacgtgctttgtattatgttgaggacttgcctgcattatcttgtttaatcctcatcgtaccctgccaggatatatagaccccagtgacatctctagtcta

SEQ ID NO: 82596 - DNA, 1186 bp, Homo sapiens
ctgaagcactgggctgggagtccgagtgcctgagctgtggtctggttctgctgcctactaagctgaatgacccaaaagcctctccacccttccctcacccactctacctaccttgagggctgtaagagaattaaatgagaagtcatgtctgaagaagtactttatattttataggttatatgagtatacgaaatgattattctcagagtatcatgagatggtaatatttggaaatcttagatgtgatttagtcttctggttttttgtttttggatttcttaggtgacacttcggttgtgtgttttaatttttgttctttttttttttttttttttagtggtatgtgtgcaacagagagaaattatgcgaatcactccaggctgtctttgttcagagttaccttgatcaaggaacacagatcttcttaaacaacagcattgagaaatcgggctggctatttatccaattatatcattcttttgtgtcatctgtttttagcctgtttatgtctagaacatctatcaatgggtaagtgaatcttggacatttatttttttctttatccttaggtttacaaaaggaaaaacacaaaaagaaaagttatcttgttcagcatgttgactacctgagctacaatacttctactagtcagaaccttggcagttggtccagcgttctatctttctgtggttctgccctttaaattcaccataacgtgacagcctcattagtatgtttattcatagcgggagttacttacggtagtgcttcttggctttgatgtacataggaatcacctgggggtcttgttaaaatgcagattatgagttagtacatcaggggctaggtctgagagtctgcttttttttttttttttttttttttttttttttttttaaagacagtcctgctctgtttcccagactggagtgcagtggcaatctgggctcactgcagcctccgcctcccgggtttaagtaattctcatgcctcagcctcccaagtagctgggattacaggtgtgcaccaccacacctgtctaatttttgtatttttagtagagacgaggtttctatgttggccaggctggtctctaactgacctcaagtgatccatccacctttgcctcccaaagtgctgggattatgggtgggagccactgcacctggagagtctgcatttttaa

SEQ ID NO: 82597 - DNA, 1159 bp, Homo sapiens
cccttacttaaaactcttctgctttttccttctgatacccaccctgctttcagtccttcttgccttgtgtcccattctcagctaaaaactaaattttagggcccatcagtactttccggtcatggcagtgggagataattactacaggtggccatctctcacagaaatcattactgtagtactgtcttgtattaccttaggatacttatcaaacttcctttattttggaaaggagaaggccaagtaaggaaagacttagtagatgttccagagtttattttataaggaagaggtgcatctctccgtagactcttaagtctagagagaacttagattgtgatcagagaacctaggatggttattaaacactaaagttaaacccaaattagagggtcatatctcttcatggtttgtgtttatgggaaactttgtattgggctcagtattttaggtgatactgtttttcattgtgcgagactgccccccacactgcaggaagtctaacttttctggccttgcccactaaatggcagtagtacccccaggtccttgtgattactggaaactctcctgtctactcccattgccccctagagggcaaaatcaatcctggttgataaacactgggcttgatggattttgatttattttttgacagtgttaatctttttgtagagcccctgttgctaatgttctttcgaaataggacaatgcttcccctctttctctagtgccttctttctttcttttttggagacagggtctcgctctgttgcctaggctggagtgcagtgtcacaatcatggctcactgcagccttgacctcctcaggctcaggcagtcctcctgcctcagtctcccaggtagctgggactagaggctcatgccaccgtgcctggctaatttttgtattttttatagagacggggtttcaccatgttgcccagctggtctcaaacacctggtttcaagagatcctcccacctcggcctcccaaaatgctgggattacagacgtgagccaccatgcccagcctctagtgcctataaatgtagaccagtcagatgaacttgtgagctctgagctcaggtgacctcttgttctagaattttataattatcatgtcaagattcctcacatcccaaggagatggcttggg

SEQ ID NO: 82598 - DNA, 1047 bp, Homo sapiens
agtgggctggccacagctcctgggctcccaacctcattcgaacagcagcagctctcttaggatcttatgttatctgtgagttccacttcatttaaagaaagggttctgctgcttaaaggagggttgagaatccctgtcctagataaactagaatttcagagctagaaaacaagtcctaaatagggattgcgctttatttcccagagtgatgcttccatgagacttggctggacctatagttgcttttctgagggttctcttcaatctccagttaaactcccctcagtctcttttttcaaaggcatcactatggttttgagtgttttctaggacctttagaaataataggacccagacagttgtaaccatataaactgacataagtacgaatctactttaatgcatattaaccgacatcacaaggaccactcttttccctcttttctctagtgtctcttaaaaatctgttatactaaagctcttttttcctgatccatggtttagttccatatttgaaatcacttttttttcctatttggtttctctgctactgtggtctggctgtgttagcttgtcatctttttcaactgataaacatgttttctgttactccttccacttttccttcctattttgacttaagttcttcacattcatctcttacttatttcttcttccttcccctgtcatcctttccactttccaccttttatttccctcctcccatgcttttttggggcattatttgcaactccaaagacaaatggtatctggaggcattttcttattttattaactttgtcttctaatcatagaaatgacataaaagataatatctttgctgggcacggtggctcatgcctgtaatcccagcactttggaggcagaggcgggtggatcacgagggcaggagatcgagaccatcctggctaacatggtgaaaccccttctctactaaaaatccaaaaaattagtcaggtgtggtggcgggcgcctgtagtcccagctactcaggaggctgaggcaggagaatggcatgaacctggg

SEQ ID NO: 82599 - DNA, 1120 bp, Homo sapiens
gagcgagactctgtctcaaaaaaaaaaagaaaaaaaaaattaggccaggcgcagtggcccatgcctgtaatcccagcactttgggaggccgaggcgggtagatcacctgaggtcaggagttcgagaccaacctggccgacatggtgaaaccctgtctccactaaaaatacaaaaaataagccgggtgtggtggtgcatgcctgtaatcccagctactcaggaggctgggacaggagaatcgcttgaacccaggaggcgaaggttgcagtgagccgagatcatgccactgcactccagcctgagtgacagagtgagaccttgtctaaaaaaaaaaaaaatcttaaccatgtaataagtgattatggttgttggtgctgagtcactatattcactttgtgtgtgtatgtgaggggtgcttaatttgcatagacacttccatttttgtcctttttttctttcaggttgctaggaagaggctcaatgtttgtgttttcaccagatcagtttcagagactgcttaaaattaatccagactggaaaacccacagacttcttgatttaggtgctggagatggagaagtcacaaaaatcatgagccctcattttgaagaaatctatgccactgagctttctgaaactatgatatggcagcttcagaaaaagaaatacaggtataattttcttggttttagatgcatttcttcttgaaagtatattatttaaaggatatgaataaaaaatgatcttccatgattagaaatttaaaaaatcatctcatacataattaactggaaatgtagagaaataatcttctggtagcagtatttttctggagcggaggggttggcactataggtaagaaaagcactagcgagagacaacttggaaaaggcagatcagaagaagggacttcttccctaatcagaatgtggcattctcaaaaaaaatttttttaagtagtggtaaaatacacatagcatagaatttactgttgtaactatttttaagtgtacagttcagtggtattaagtacatttacattgttgcataatcatcaccactattcatctccagaaatttttgtcttccgaaacggaaactctgtacccaataaacaata

SEQ ID NO: 82600 - DNA, 1003 bp, Homo sapiens
actgaaacctccacctcctggattcaggcaattctactgcctcagcctcctgagtagctgggactacaggcacatgccactatgcccggctaattttttttttttttttttttttgtatttttagtagagacagggtttcactatgttggccaggctggtctcaaactgctgacctcgtgatctgcctgccttggcctcccaaagtgttgggattacaggcgtgagccactgcacccggctggaagaagggtattcttatttcagtatgatttattgattgggagatttctatatattggctcagtgcagaatcagggaggtagagctggagtcagcctttctctgtgatatttttggaagtctggttagccttagaaagaaaggagaagaaattatgtaatcactcactttcctatccacatgtttctacttttacagattaatcctagagatagagcatcagtgtagcttttggagcaggactggtttgagcatttgcaaaacatggagatttttagcctggagaagggaagatttctgtgaacagatacgctgtgggatttttatatggaaggaaaggaataggtatagtctctggtgtaatcaggcacagctacgccttagaagttgagttacagcttagggagatcgaccttcctagcttgaactgtttaagtccttatcactgtcagtgtttaaattgctgttagggttgttataggaagagacataaggaaggtgtgagtttgaactgagtgatttgaaagccccttagctttagcaagctgtctcagataaggttctggtgggtctgcatggtgataattgacatgttttccttcagttagagattaattcggcatttcaaaacttagaatgctttgacctttgttataacagtggcttaagtcaggctgaattcctaatctgattccacctcccccccttaaaaaaatccatgctttgaagtgggtcgaagaggaaggtgttaaacccatcttc

SEQ ID NO: 82601 - DNA, 1023 bp, Homo sapiens
ggaaaatggggaattctttcgatatagaagggtgtggaaaagagcagagagaacagatctcccctttcccatcttagatctccatttttatgttcctgttgtcgagtggtttgtcatggtaaagaaaaaatgcttttaaatgtgagtgtatatatatcatctatatgttgcaaaatgtcctccttcgtgattcagcaacctgatcttacttcagtgctactccttcctgtgtaattaagcctcagctccagctctctgtattgcactcactagtcatcaggttggaaggtcctgggttcctgtgtcctgttgggcaaccgcatgatagaactttaatgctacttcctggcatagcaggagatgaaagagcagggggaagaaacatcaatctaaccacgaattttatttccttgtgtttctgatgctaaaaatggagaggaagtcaaactagacaagagggaagtctccatgaagtgtggaaaacaagctccttgattgtggatgtgcagagctgcctgttgagtctgaggagtctggcatgtgacacactgcagacctgagacaagaagccttgttgctatgggtgacttttagtgacctataaattttgcaggcgcgccacggcactctattattgctttctttctctgagtcactaattagatcctgatgatttccatgtgaaaccatgaggactgggagatgcaaaatggttttgctgtgtagattcatgaatgctggactgttggaggatatctgagtgtgctttgcatacttggcttaatttgtttttttttaactaaaagtagttgtaggtgaaatgattacttaggtaattgttttggtaaatggcttgaagttgaaccacagcagttttgctatttggaaaaaaaatgaaaaaaataccattctaatttcagtttatttggtttactgacccagttttggctaggggttattgaatctagtgagaattattttaagcaccccccaaagaaggaaagatatgaagtcaagagaagg

SEQ ID NO: 82602 - DNA, 1066 bp, Homo sapiens
agataatattttgtttgaagaacctgtttatataagactttaaaggaatactttcaggatgtattatagatatacatgtattcttttcagttcaactccagacactggagaaatacttgttttttaatatcattagctgcatcttttctaatgtgaatttatttttgccttataagtaacaagtaattttttttcataatttgacccacaaacatttgcagtatctactgaacgcctaccactgcatgcaggatactgtacagagtagcttttaatctatccttttaaagcatcattgtctgtattgaaaacattgctcgtgtctaatgtgtttctgaaagtttccatgtcactaagatgccagcctggggctatttaatattgtatcagatgtcttttgttatgtatttattaaaacaggttctatataaaaatacattcttgtgaaagttctctttcagactcttctgaaggaaaacatggttcttgacagctccttggcagcttagttttttcaaacgtgctttatatctgtatttacatttttttttgacattttacacttacagattgctgatttgtttccacatgtctcttatggtatagttcttgagcaatttcctgaaaaatacgccgagcactcttcttctataaagacaaatgagaaaaaaaaattctcttttgggaatataagcgatgataacgacgcatcatcagaacttttcttgctctattgccaccggtcccaaaaactaccccctcccccaacacatatgtgcctacagttaactcttttgtatttgagaactttaaatataatttatggttgagaactgtccaatttaagtcacagtttaccccttgagattattttgtcattgagtttctcaacaataggaaatagtgtctgcagttgaaagttaccttgatattctgtttaaacttaacatttaaatatttaaaagctaaaaaatatttcagttttgaaatcgttacaaccagccacaatttaaaaaatatttttcaagtgttggtctgtaccttttgtgagtcttcttttatttct

SEQ ID NO: 82603 - DNA, 1283 bp, Homo sapiens
taatatttaagtgatatacaatgagacttaatttttacatcatttttgagatgcttttactccattaaaaactaattgaacaaactgacgttgattgtaggatttatagtaatcctaacacaatggtatacatctcccttcttatacacatagccaaaaggtattcttttttaataactttagccctttttgaagattttaaggcggcttttagtttcttcatcaacccatttttgttcttaaagactgttcttaaggctttcgtagataacagtaatatctcgccctccacctgcccacacctcacccctacagcagaaagatagcatagtggatggctctcttcttaatcccatgctactgggctttaaagagaaaacagcaaactatgtcccctggctaataatttcagtgatgagaatgtatgatgccttcttccaaagacctcttctgcaggtggtgttccctgcagatgcacaggaaaatgttaattagggagctcttgctgaggcccataacttgtggagagatagaaattatttttcttttgataatattcaaggatatagggacattccatgcaagaggatttgacttactttggagaggagtatgaaggccacgcacacaccggtcacatagacagagagcagtgatacaagagctgtcaggaagctccgcagttccttgctgagcagcttaatttcttaatgacaaaaacagaaagaagcacattgactattaaagcctattctttcaaatacatgtgtaaagtatccttcacactgcgttttagaggtgaaacgtgaacttactctgcttgcctattcgtataaaaactagacctcaaaaggtactcaagtatgtaatagttaaagccagttcatcagttctttaaatgtgttaaaccaaaaatgttactcgtttttaaacattaaaaaaattcaaccaaccatttgtcatattgctaagcatcactttttagataaaggattatttgaagttagataaacatttccagacagtttgttcaagggcatctaaaatctcttttggtagaaacggtttaccagtatcatcaagagtctgcctatgtggttaagatattttcatatgtatttgttaagggtgatatttatagccttggaactagtacacatagctgaagagtcccatctgtgaaagaacctgggaaggccatacattgaggagcgcagtgctcactgcgtgcttgaaagacaggcacttttgccaaatgtgctcttctttctttatgataaaat

SEQ ID NO: 82604 - DNA, 1048 bp, Homo sapiens
actagcctggccaacatggtgaaaccccatctctactcaaaatacaaaaattagccgcgcatggtggcatgcacctgtagtcccagctgcttgggaggttgaggcaggagaatcgcttgtaacccaggaggcgaaggttgcagtgaaccgagatcgcactactgcactccagtctgggcaacaaagcaagactccatctcagaaaaacaaaagaactactccaatccatctcgaacatccactaacacaaagtcagtgatttgctgggtgctctattctccctacatggtgatgtttaaccaaccatgttcacctcttttgtatattacagtgatttagtgtaaagtaccatgtccaaagggaaccttgtggtgagtaactatcagctttctcaggaactagtctggtaatgcaccacctagaacaaagcactagagaagtgtaaaagatcaataaattggacccacagaaactatgcaacatggagaataagcacagatttggagagaagctactcagggatccctgacccttcccattctgcctggacatcagtgaacggaaagtgatgactctcacttcctgagatttgataaaacccatgacaattcctcagccgagcgaggacatcaaacatagctaaatcctatcagtaatttcaccaagtcattcccttgagtaaactgagattaagacattcccgagaaaaaaaaagggggaatttcagagaaaaagctttacatgattctgaaggaaaaaagagaacagcagcaactcctcgccttgttggggtctcttcccttaggaaggaccctggtatgatgagcagagattgttaaaacatgaactcaaaatcaaccagcccttcgatttcaaaataggactctgaggaagggagaccatccagtattataacctgtgcttttaaactacgagggttctaatgggcttttgatattcaaatgtcatttaaccttagtttattctcatctgtcagctaaattataaataagttaaggcacttaaagcatttttaatagtgcctggc

SEQ ID NO: 82605 - DNA, 1001 bp, Homo sapiens
tttcataatgttatacatttaaaaattaatctgaaggagcttaaaatataaatgcattaggtgaaaaatagcagttgatttaaataaaatgaaggaggagaagaaaaagaaccttaccgacacaaaatagaatgagattggtttgcagatggcgagcgatgttgcttctgctcgcagtccccatttctgtgtatgccggggcgggttggggtgtgtatttgaaaggaaagttggctttcttttttcagaagggaagaagagctgaagagaggaacctcttatgaaggaaccataatcaggaactttttgaaattgtgcaaggatggcttcaccatttaacattgagattttggcctggagcacatttagaaatgtgcatatcttttttttttccatggattttacagttgtcataggtgttagatgtttctgggtgagattttgatttacacctagcacatatttccaggaaggagtattgtttgacaaataattcgtacttggatttttcagaacagttcagtcactgtctagggtacctgctctgggtgccactctgggccagtaactgctgggaacaaagaacagcagaaggagaagtggctttgtgtagagatgagaaaagttagtaaacaacacattctaatgcagcgaataaataaattgtctgttattaactttttgtactccagttttgaatccaaagacacctgccttccccccttttttgacagggtctctatcacccaggctggaatgcagtggcaagattgcaggtcattgcagcctcagcttcctgagtagctgggactacaggcatgcaccaccacccctggctaatttttttttttttttgtagattctgtgttgtctaggctagtcctgccctcaagcgatccccctgccttggcctcccaaagtgttaggattacaggtgtgagccaccatgcctggcccaaagacccccttttaatgtgttgagaaacaaatatgtgggccct

SEQ ID NO: 82606 - DNA, 1037 bp, Homo sapiens
ggaaatgactgatagaggcttcatctctagtccaagaaatgctggacggtgtatccatcctactgttccatctctctctggtcctggagcttaatgtttatgaaattgttctgaaaaggcaaagaatgagtcaacttccctagaaaaactccccaatgatctgcttttctaaattaaaatccttcatgagcctgtttttattttcagcctaataaatctctctaggtagtaagttgcataagtttactatgccagtggtattttcttgcatttgtccaaaactgtccttcagatattacatgttgctctctgtttcagtattccagcatttaatgaccagttttccaaacccattaaccattacaccctgcagtcagtctattggcagatactacccaaaactgtcagagaagataacagtgtggggccttggatccagacaaacctgggcttacatttccatactgacactcattaaccttgcaagcgtgggcaagttcttcaccccttctgagtctgttctttatctgcccacctgtctcaaagagtacctgggaagtacaaaagaggtaactcatgaagccctcaggcttggaacgtaccaagtccttggtagatatggctcctccctgcttccctctttaaatcacttgtttgttcaagaatttaactgaatgttcttatttgtattagtaggtggcaagtgggagaaaccatcagaaattttggaaatcaaaggacagaactgggaagaacaagtgaatagtctgcctgaagttttcagaaaagctggttttgttatcgaagctttcaccagactaccatacctgtgtgaaggcgacatgtataatgactactacgttctggatgacgctgtctttgttctcaaaccagtataaacacgtggaggtcgaagtcttcagagtccgcaccctccgggatgtgcccttggaagagggtctgtgttcacaattacgtgaagggaggacccttggggaccgccattctaaatatcatgtaggaatttaaaaagccaa

SEQ ID NO: 82607 - DNA, 1051 bp, Homo sapiens
gaagtgatggatgttcaaggaggcaggttgccccaaagtgttttctaactttcaagtagagaactttatgctctaataagaaaaatacaactcattcttaaccacccccccaaaacagagaaaacacatacatttatgcattttaaagataaaaagtagtttctcaaaaaaatctgaagttctctgaaaaccagcttattaaaagtgctgttttgtggtgaaaattgaaaccaaatccactcacatttcctatcgggtcttgaaattcttggtggtgtgtcaccattccactagatggcagtgttgcttactgagtgtcaatggcttttttccccgtaaatggaatcatgtttttctcccccaaagtacaataaagctgccttgtctgcaccattcctcgtgtaagtgcttcatatcaagttaagactgtactagagaaattaagaagagctttatttgtggtaaaagcaagctaaccaattgaccttaaaggttgaaatgcaagccacacctctgattcctagctccctgcacctgcattttaagctcctaaagtgctcagaccactgatctcagagaaggggaggaaaggaggtacagtgcccttagtcatttatcccttgtacagagtagttaaaagcagtactgtattttctgccatccagtgtgacctgtcatcagtttttacatggttggcttttaacagaaaaaagttgagttggaaaataaagtgtagatgtttcaagtcttcctgagcaaagctttgttttcacttggttctgagtatagtattaataggctatactgcgtatgttatttacagtattaatgaagcaagatgttttcattaattgcttcccactacttggttactgatggaggtgttacatgatcctttttctccagcaatgtcagtatagtatcatgggcttccagtgactaaagtgacctaccatgttagtgcagatgcttaagcacccccagttaccttatatccagtgcttccgccggctagaagatagtgcatggaatcagggcagcctggactgag

SEQ ID NO: 82608 - DNA, 1063 bp, Homo sapiens
gccttgtgatccggcctcctaaagtgccaggattacaggcgtgagccaccgcgcccggcccatgactggcttatttcacttagcacagtgccctcagggttcaccgatgtagagggtgtcagagtttccttcctctcttttttttttttttttttttttttgagacggagtctctttctgtcccccaggctggagttcagtggtgtgatctcggctcactgcagcctctggctgctgggttcaagccattctcctgcctcagcctcctgagtagctgagattacaggcgcctgccaccatgcttggctaatttttgtatttttagtagagacggttacaccatgttggccaggctggtctcaaaactcctgacctcaggtgatctacctgcctcggcttcccaaagtgctgggattataggcgtgagccaccgcaccggccagaatttccttcctttttaaggctgaataatctattgtatggatagaccatagtttgcttatccattagtctgttggtgaactcttggattgctactaccttttagctgtctgaataaccctgctgtgaacatgagtatacaagtatcttgtgaccctgcttttaattcctttgggtatataaccagaagtgaaattactggatcatgtggtaattctatttttaattatttgaggaaccacaatgctgttttctgcaccatttaacatttttgccaacagttcacaaccgttccaatgtctccacatcttcaccaacattatcttgttttgttttgggatggagtcttgctctgttgcccaggctggagcgcagggcatgatctcggctcactgcaaactccatctcttgggttcaagtgattctcctgcctcagcctcccgagtagctgggattacaggcacctaccattacacttggctaatttttatatttttggtggagatggggttttggggtttcgccatgttggccaggctggtctcgaactcctgacctcaggtgatctgcctgccttggcctcccaaagtgctgggattacaggtgtgagccaccatgtcca

SEQ ID NO: 82609 - DNA, 1116 bp, Homo sapiens
caccacgcccagctaatttttttgtattttcagtagatttggggtttcaccatgctggccaggctggtctcgaactcctgacctcaagtgatccacccgcctcagcctcccaaagtgctgggattatagacgtgagccactgcacccggcctagacttgtttcttaactgtctgttagatgcatttacccagaatcatcatagatgctccaaacttatcatgtccactcttggctgggctccatctttcatggagctttccctggttctctctaagcacatggttgttccttcattgagtctatttcccacacttccagatctctctagttacagatctggtttacaaggccctccatggtctatttggtgcttctttgttccccagatttattatctgttggcttggtcactatacatgccagccatactgaacatttttcagttttctgaaaacatacttttccttctgtaagaagcagaacttccagaaaagactcaactgtgttactgtttaaagacagctgaagcatcactttctctttaaagcttttcctgacccctgcctcctttcccagatacaaagggacattttctttgtgttccactgtattttgtatcagcagttctcattcttggtattttgacataccaagaattgcactagttgtgtggagtgttgcaagtagaacttttttcgtcttgagacagggtctcgctgtgtcacccaggctggagtgtaatgggcccgatcatggctcactgcagcctcaacctcccaggctcaagcaatcttcccacctcaggctcccgagcacctgggaccacaagcatgtgctaccatgcctggctaatttttctagagacgaggtctccctatgttgcccaggctggtctcaaattcctgggctcaagcagtttcctcctgccttggcctccgaaaagtgctgggattacaggcatgagccactgttcctgcctgctagtagaaataataatagttcagtactaaagcatcaaagtctgcaactgatttacttttttttttttctttttgagacatagttttgctcttgttgcccaggctggagtgcagtggcatgatcttggctcactg

SEQ ID NO: 82610 - DNA, 1027 bp, Homo sapiens
attcagcaaccatcaccaacattcagctccggaacttttctatcttctcccacctgaaattctgtacctgttaaacaatggctgctcattctcccctcccctcagcctttggcaactgccattctcttttcagtctctacaaatttgactactccaggtacctcataagtagaatcatacaatatttgtccctttgtgactggcttattatccttagcataatgtcctcagggttcatctgtgttgtaacatgtgaccagatttcactccttttaaggttgaattatttgctggtttttaaaaaaattttgaattttagttggttaatatgtggagttttgttatattattgttcgcaccttttatacttcagaaattttctttccaaaggaattggttgatagaagattataagggaaagcttactatcctgattcagatgatttactctagtttattttccgattcagtgtgaccgcaacaagggaaaacatggcttatactgtggaatgcctgcggggtgatgtgtaagtacctgtgtgtgtttaggacttctgctttgaaagaaatactaagctgctcacttctggtctttgtaatgcgtcattatgacctctgacttccattttggattattgttcataaactgctcaaaaacactgcttaccacaagacctaaagtttcacattgagagcattacagctatgtagaatctcaaatgttggctttacatttttgactcataattcttatctcgatgtcttctgtagtgatattctaatggagttcctgctcaatgtcaccacagcaccagaatttcgtcgttgggaagtagctgaccttcagcctcagctaaagattgacaaagctgtggcctttcagaatccgcagactcgtaagtacatttccagatcacatttgattctaagatactgggttttttagaagatcaatttatagaagaaaaaaaattgctgtcaaaatttttatttttatttttatttatttattgttttgagacagagt

SEQ ID NO: 82611 - DNA, 1730 bp, Homo sapiens
atgcagtgcaatgacttatcagagctctgtatagtatgatgtcattgaagcattatctgctatagggaaatttacacatgtatactaatgcttccaggaaagaggagagaattgcctccttcatgttttggttctggttggacaagttgcattgagttggctctgagacatctaaattgagaacccaggagaggggaagaccaggaggtttatttgcaagtcttcagtgtagagattgtgttgaaatcagggatatgtgtgaatgattgtaggaaaagaaaactaaagctcaatttctgggaaacaacaccatttaaggagcaagtggctaagaaaaatggcccaggtaaacagaaagaaaaagagaagctgatatatttgaaggataggaaagagagtatgtttaacaccattttgacccacagtgaaataacattcattaccactgagaagtctggtagtttcagcaagctaggacatcatgggtgatcttaacagttttgactagagtagtggaaattgggtaaaatgtgtagtgattaaggaatgaatgacaagtaagaaatgagaggttggtgtgggctagtggagcttagacattcaaggagcaagttgttttaggagagtttacactgagagattaggttgaaagagacatactgagcaaaaagatcggagcagatatcggagatagaaaattataaatggctcaagtctgagaaaggaatacttgggatccagcacacaagtggaccttttagccttacagacaggctaatattggaagatattgggaagatggggaagtacctcctcagtgagacaggaggctaagtcatgttttgacagacgtgagaggaaagtttaaagaaagtagtgaagtttgggacagacaaatagtgaggtacacaaaaagtgggtattcgctgtagtgtagatgtatccttgaaatcagcgaccacaaattcatagtacagtcagtcagcactgtcatgtaatttttcttcagttgcattcagaagcctaatagagaaatggaggaggtaggtattagggttaatcccaggttggaatcctgcaaagtgggcaggtgagaagtatgaggagatagcaagggagttgggagcattggcaagagtgattaaaaggatgattcagggatctaggctcaatagagaagtgaagccagagggggcctgataaattgaaagactggacaagtcaaggaactagagatcttgataaagtggaagaataaggatagtgagattaaagactgaggtcggggtcttagaattgagggcttcagaggtatgcaaatttaggctatgatcaggtctggggtgtggctctgaaaatgggcagctaaaatgaaggggaaacagaggtcctagaatttaggtgatcagagggaaaaataagtagcagacccagccagcactgggatggagaaaatcatggtcagatttatttatttattcaacaaatatttaccaagtacccacatccccggaactttattctttctttctttttttaaataccatacaaggattcagattccttcttgaccctggcttacaaagtatggacaagccttacaaattggctgtgtatggattactactctcttcttagtgaatagtaagagatagcagtattaatggcatgacactgcaagagtctggggaagttttaaaggtgcttattctttatgggtgattagaaat

SEQ ID NO: 82612 - DNA, 1050 bp, Homo sapiens
gactgccatctcagtggatgacagccttctcactgacagcagagagatcttcctcactgtgccagtgggcaggagaaagagcatgctgcgactggccagtgacatgcagaggatccagattgcacaaccggatccagaggccttgggaagcattagggagctctccagctgtctcactcaaatctgtagcagcatatggacccacaaatggaggccaaagtgggccctcaattggacactttggcaaccctgaagagacttcttcccttcagacttactgttttagtatgttccagagaagggagtggcattcttcttggggaattcaggaagagggagacacgctgttactctatccattaaataaagctttgatgttcacagccccccgccaccactcagaaaaaaaaaataattgccttgctctctaaaactgacttctgccttttattggacaggaacaagctgaaagctggatacctaatgtcagtggagtcttctgagtgtttcctggaagaagtcgggtcccaggctctagttgctggttcttacatgccaccatccacagtccttcagcagattgattcagtggctaatgctgatatcataaatgtaagtaaatgaaaacttaacgatttaacaacagagaacttaaccttaatgatccaatttcagaaggatgcataagcgtccttgggcagtgtattattcttatgtttggtgctcatctacttaatgtggaggcaggagggctcattcccataagatccgcaacaagcttccctgtcagctcgagtatatgtatcttcctccttcaaataaactaccattaggttaaactgtgatgtcagtaagagggctgccatccactgagatggcagtcaaaagtgcatttaatacacctaacgtatcaaacgttaggttaaactaatggtagtttataaaatgggcttatgttagatgactagaagtaaagaagagtcaaatattagcagtttcatatgatccaacctaaatagtgaagtttgctatttttcctcttcagtccta

SEQ ID NO: 82613 - DNA, 1083 bp, Homo sapiens
acacattacaggagagagctgaacgttctctcagcccagagcagcaaacacatgaaagtcagaagtctctaatatatcatttgtcttttttccagtgaggtaaaataaggcataaatgcaggtaattattcccagctgacctaaagtcaataaaacattctgtttaagtgtttttcttacgtttttctcaatgagttaatcaacaagtatttattatgtgctgatatctttgttttagatgctttaaaggagacaggaatataattattgagtatagaagcatcagaaactattaaaattaaggctaagtggctatcggggtaaatagtgccagattactattggtggcgtttaagatgaaagcaagttcaaaatttgtcattttgggtgtcaacagctaaatggtctggtttttacccctgttttgccttttttgcaataaaattatttccaaaaaacatacatttcctatcaatcatatcctatattcccattcattcatttttttatgtctgatttatcttcattgacagagttttgtttttctctcatctcctgtctctcccttatctgttactatcctgtctcttccaaataattaactctcaattcaacatttacagtaaaagaagggctaaaaaggggaaaaaaaaagaattctaatgtgaataactagccaaagaattatgtctcttagttattttaattatagtacttgaagtttaccaaaaaaaagagagaaactaaatatttaaagaaaaatgtagtgtttacataaagtgacattctctactatgttcagacattctgatattggatttctctacggcattttctaaaagaaagaaattcttctcaaaaaggagggtcttattctgaaaataagatttgtgaggcctgcaagaacccaaggaagtctttagataatcctgttgaagaacatctctaaaggctttataacgcagtcataagagaagagaattggtgagtctacagacagtccttgataagtacagcaaacttgtgcctggtgaggcacaaaacttgggtgtctgcaagataaatgctcatatgaccacagat

SEQ ID NO: 82614 - DNA, 2001 bp, Homo sapiens
taatcccagcactttgggaggccgaggcgggcggatcaggaggtcaggatttcgaaactagcctgaccaacatggcgaaaccccgtctctactaaaaatacaaaaaaaaaaaaaaaaaaaaaaaaaaaaaaaaagagaattagccgggcatggtggcgtgcacctgtaatcccagctactcaggaggtgaggcaggagaatcgcttgaacccgggaggcagaggttgcagtgagctgagattgcgctactgcactccagcctgggcgacagagcgagactctgtctcaaaaaaaagaaaaagaaaagcatcactgtgctgtcaaaacttaatttttaagtattacttatggttctgtatttatcctgcaatatttttagctcttagaaaaaaagtggtagctgggacatttgttgcttcctcctccctcccttctctcccccaatctagacctagtaacacaaaatcatgctgtcatattcactggttattaaaataacactctaaaaattctgctacttttcttgcccatagagttttagcagaactcttaattgtaaaagatatgaagaatcaggatggtttcgaatttggtggtactatgggctttgtttatgaaaatattgttgctgcccgacaacttaacacggttacatgtatgacatccagttcgtgacctgttgatgtttttatcctacttacatgtgtattgactccttttatgagactttcaggcttcacgtacttaggggaaaaggggtttcggtgctgtagcagaaggaatctttttacaaagaagttttagatagaatcccaatagataaaatagactaaatgaccatgcaaaagatatagttgaaagagaagaattgttacatataaaagagaagaaagataagtgatagcataacgttcctaagatggaaaagggcatagccgggcgtggtggctcatgcctgtaatcccagcactttgggaggccaaggcggacggatcacctgaggacaggagtttgagaccatcctggccaacatgatgaaaccctgtctctactaaaaatacaaagaagttagccgggcgcggtggtgcatgcctgtcatcccagctactcgggaggctgaggcaagagaattgcttgaacttgggaggcggaggttgcagtgagccaagatcacgctactgcactctggcctgggcgacagaatggtactccgtcttaaaaagaaaacagaaaaaaaaaaaaaaagggcaagctcctcttgtattcagaagaaagcaaggatagaatgagtataactctttaaaatttggaggcaaaattggctgtgagttgccatggagataggagcaatggatgtccaaggtctgaggaaatagaaactgttcgaaataattgcagagaaagcttgccaacggtgataagtaggtttgtctagcagcactgatgcgtcgtggaagttgatggtcatgaacatacagtgtgataacctatctgccctcttgaccttttctagtagtgctatgtcattttggtactaaggtaggtgaattttccaagtgttcttggaaataaggaaacatcaagaataatgtaaaagcctcatatacaataatgaataataaagaataatgtgaaggcttcattcaaggttggggtttgccagatacattgcaacaaaatgacagagcagccaaggtatttaggatagtggccaaagtattgtaatgatggcttatggagtgtcagctggataaagagtgaaaatgaataaaaactaatggattgttcagtcgaatagcagatggtacaatggtacatggccagtagaataggggacccaataaaattgaagaccagtcagagtgggagtgatcaatccagcaaagtggaatggcaggggatcgtaggcacaaggtccagagtgtaacagtgacaatgtgtggctgatgtgggatcgaggaagtgattgttttttttctaaaagttttccttgccatctca

SEQ ID NO: 82615 - DNA, 2631 bp, Homo sapiens
ttctcacccctgaagagactttttgtcagggggaaaaattagtgttagttaattttaacaagataaacagttaagtaaagctgcgtctctgataaatataaatggtctgcagatccctttagtgaggaaggcattatcccctcacagcaaggatttcagtgaccgtaatcctaatcatcctagatagatttgccttatgttctttatgaagatttccagatgttccccaaaagtctctttcaagtagctgaaagaacttctcccttatgtctcgtcaaaatttccctaaagtggttatcatattcatgttatagtttgtcataacgaagttaaggttagtgtattcatttctgaagatattttcattcttgttgtttttaaaattgtctagatgggatgttactgtttggggggggggaatctcaaaaactgacatgtttttccctgcttgtattctgaactagttgaggggcaaaaaagaaataaggtatttaggggctaaaatattattttattactaagaaagaggatattggagaatgtcacttacatttgggggcacgtgacgtcctactcctggaccttaaaattgagcagacttaacaatccagtcccagacagaactgggggaactgcccctataacacttccagcatgacagaggagagatgagtgcttccaaagacaaaatgttggatcacatatgcccattttctcctaaactaccagtcagatgaagtcagtccttgtgacctgacaaggattgagtgaggagacacaaatgagctaaaagtattatgccaacaggattctgtcctctcccccggtctccattgctcatggataataaaatcgggaataaggagaaagccttatgtgtttaaaacccactatatgtctagcattttgtgaggaagagttttcattttcttcaggtctaaagattggcaggtgttcagggaagtgaaagccttggtgaggggtatcatttcctattctgctacctcctacctacttcataggaaaatctggtaaacctcagataagggactgtggtgcttgacatctatctcataagggttcaagatctacaggtagatcccagcctatgcactggggatcctcagtttaaaacactaaaattacaagttgctcaagcagacctgtttattaagtaatagaaaatgattaaatcattagtcctttccctggaactgtaacaacttcaaagatcacaaaggtactttgacatgaaagaactctgtaacatcagttgttaaacaaacctatctcaaactttattttattaatcactttggacatgatttatagaggacaggatttggttacctaaaagggcaaacattttgagattgtgttgtccttgaatttaaaaagcattaataatatttcttcattggccttttgagcctatttccagtaaattttttttaaagagctttattgagatgtaattcacataatactaaaattcatccatttaaagtatacaaataaagtatttaaagtatacaaatcagtggcttttagtatcttcataaagttgtgtgctaccatcaccatagtccatttcagaacattttcattactccaagaccaggctaagaggtgcctcttagcctcctaggcaacccctaatatgctttctgtctgttgatttgcctattctggacatttccaatcatagaatctatgtgatcctttgtgacaggcttcttaaacttagcataatgttctcaaagttcatacatgttatgacttttttttttctttaagagacaggctcttgctgtgtttcccaggctcaaactcctgggatcaagcaatcctccagcctcagcctcccaagtagctgggactatagatgcacgctgccacacctagctatgtatttcttttttattgccaagtattccattatatggatagaccacatttatttagccattcatcagttggtggacatttggaccactcagttttttacttccaagcataaaagtctatgaagataaagtgattaaagatgttttttaaatgtgattttttaaaaagtgacattatcagtataatctatttcagcatatcaagtaataattatcaataaaaattcaaaaaccggtctttttacagtactcacaggacatgcttaaagcttgagatcatttatgatactgtgaattcccagagtggactagattttccaataggaaattagatctcctgaacaaagcattaatatttcctttacaaccttagttccaaacatcatctcttttatcattaccaacagagatggagccacttcagaattaagactataaataagcctaaatgtttttggagaaggggaatttaggatgaagaacatgaacagcaggcatgagtaaatggaaatcactaaaagaaggaaattcagaagaaaaaaaattagagtaaagactgctgatgcatttgttagattggccatacttattgagtccttccttatttggctgccagaacccctttcaaattttgcatagtaatagttacatatatcagttctccactgttctgcttagtgtgaccaaaaacatcattgtttaatccctttcctggtaaatactg

SEQ ID NO: 82616 - DNA, 1664 bp, Homo sapiens
tttgtgatggtttatataacatgacattcatgtctttttggttgtcagaatgttgtattttcaagttctgaagctacacctttttttccaagtactttctagaattccccgcccaactaagcagctagcagctttataattagaaaacctgatccgattgataacaacagattgaaagtagcagttatttcatcctttatcaactacaaactgatgaaaaagtaatgttgggaaagctgttgtagaaatcctaaagaggcttagataagagccatgaggaaacctgaagatctttgaatatcaggatacctaaaaataggtacctggattaaaaccatttttcaataatatacccttactgtgtatttcacctaaatttactgtgtttgtaaactttactgtgcattctcttgttaactgcaaattacacggaggagaattcttgccaaatatgcaatgagcaagtagaatgtgacgttcctttggggtttattgctttagagttgacaaaaaaaaagagcatttgggtttgggtgttgctatcaatggtacttacatgtatttgtgaatatgtaccaactaacatgtatagtttgcttaagggaagtttcagtgtgtgactccagttcacttttgaagcaaactgacaaatctttgaatcactgcttttttttttaattagcaaaaggctgcactttgtgtgtctcattatactagctttgctataaataaaatatcacatttggcattttgacacttgccgttgtatatattgagcaaaaaggcagctgttgacttttaatatagatctgttcaactagggaccatattctactatagttagagattaaacaggagtagaaaaaaatgcagttgggtgggtcaagtaagaaaaaggaagaacaaaatttcattattgcaatatattcacagtaagttgtttacctggaacatggttgggtccaatttcagccataataatagaagttcttttcaaaaataggccatgttcagatcagttctgctgaccaggccactgacctccaaagacaaaaatctttaaggccacttagactgtcaaagagatatgaccatttgatttataaggtaccatcattttgataaaagaaatctttaatttactatgaatattttaaaaatcttcccatagatattccctatgcgattggacttcattccagaccatcttgcaacaaatgctattgacgtatttgtggtctgtaaggaatctgtactgaaataatcagagagattatgtttaagcaaatgaaaaaagtccttgaggtaccctataccctgggaagataaaattgtatcttgcatgtcttacatcttgtgagtatgtaccaacatatgcataggatcaggcaatcagagaggaggtggaatttgagcttaacagatgatacatttaataatgagtaataaggaagacttgggtggttcttgttcttgaaaagggaatggcatgagtaaaggtagagaggaggcagtgaaatttctattccagtccatttctctgtattgcaacttactttatctttctaaagaacaaatagaataataaatacttgtatagcatttactttgtgacagattcttttctagacactttacatgtgttaattgatccccacaatgcc

SEQ ID NO: 82617 - DNA, 1054 bp, Homo sapiens
ttcatcttcttatgatgaaacgtaaaatgtgagactctgtttttttattctgtagacaaaatactttgggtttaaaaattttttaaattgagtcacttaagaaaccatagcaaagaatcttactaagacaaatgtagacagtcatatatcagcctactaaatcaccttttagactcccactctggataagatttagtggattaggattagaagacaaacccttttatgttgatatgttgctaatataggactaatcctagaaacctcatactctttctgaggttcttaccattcagtaggtagctattatcgtgtaaccatttagaattgcaccattagttaagtaagatgttggctttaagtggaccaccctgtattgaagatttaattatcctttattgtgactatcttgacagttatcagggatgttggatacattatgggttttccctactgtgctatttcttttattttttgcctctgtaagttgctgggcactgctttttttctctttttattagcctagaattaactaaaagattgtatctcttatccatcacctcctactgtgctctgcccttcctctctaggagcctcttgtggcaaatctccaacttggccattcaagcagttcatacccagatgaaaaagttcaaggtacagatatcagccattctcagtggtcagtttccattgtctttaccaatagctctctgctgtgctcagctcctgtttctctgagcttggggttttactgagttttttttagaaaatccgtcaacttatctaatgaagaagactcttgtcttttgactgtattgatacaggctacagaggtacttactccttttctgtgaacctgttttctcttgtatagattcaagaaattcttcagtgattctgctttgttgatggtattcttgtcattttctcatgctgctatagaattttgtacaaattatatatatatatatatattttcttaagaaacttagtttatccaacaaaaggactataacactattttacattcttaattctgatataaagcaca

SEQ ID NO: 82618 - DNA, 1040 bp, Homo sapiens
caattatttatggtctgtatgataactaagtctggaagttggatatgagagaattgcattcttttttttttttttttttttggagacaggatctcactctgtcgcccaggctggagtgctgtggtgcgattttggctcactgcaacctccaccttccgggttgcagtgatcctcctgactcagcctcctgagtagctgggatgacaggcacgtgctaccaagcccagctaatttttgtatttttagtagagacagggttttaccatgttggtcaagttgatctcaaactcctgacctcaggtgatccgcccacctcggcctcccaaagagctgggattacaggcatgagccaccgcgcccagcctgagaattgcattcttaaagacattaatctgtttgtaatttaggatgtcttatagtgatttggtggtgagacatacgggaaggggtggtaaagagtgcaattgttggacctgtgctttttacgtgaaatagcggaaatgagtattactttacaaactggttttggaaatgattcattcattaaagaaagcaaataaaaatagcaataaaactaggacataataactggttgttaaatgaactctatgtcctttgaaaaggagatgattaaggaagaaaatatgtaaataacttgggtacacaagctgctatttgaaattctgctgagtaaaaatgataggaggagttaaactgttcaggaatttagctcttgcttaaagtattcgtgtagcaagtctctgttttttttaaattacagtgtttgaagatcctcttcttgaattaacagaatcaaagtgaaattccattttttaaatcactcctaaactgtctttagtgtgtggctttaaaatataattctatgtaatatactagagaaattctcaagaaaatctaggactaggatttcaatataattttaaaaggaagtaaggtgggcaatcagattaatttgaaaaagtgctttatatcactagtaagaatgcaaaactgtgttatagtgctttcattaggttaac

SEQ ID NO: 82619 - DNA, 1055 bp, Homo sapiens
ctctctttcaacatgtggggattatggggattataattcaagatgagattttgggaggggacacagccaaaccatatcaatggggttttccccctttgccactaagtagccacagaaggcaggataagaaattgacaaattggccaggtatggtggctcatgcctgtaaccccaacactttgggaggctgaggcaggtggatcacttgagctcaggagttcgagaccaggctgggcaatatggtgaaaatgtgtctctaccaaaaatacaaaaatcagcaacgcgtggtggcacatgtctgtggtcccagctactcaggaggctgagacagtaggatcgcttgatcccaggaggctggggttgcagtgagccgagattgcgccactgcactccagcctgggtgacagagtgagactctgtctcaaaaaaaaattgaaaaattggactcaaaatataaaacatttgtccttcaagagccattgctaagaaaatttaaaagcaaggctatgggggaaatattggtaaaacacatgtcagaagatggacttgtattcagaatatttggaatatataaagaactctttaatcattggacaacttgacttttttaattgataaagattttaacaggccagagatggcaagtaaatacatgaacatatgttctatatcattaaacattagggaaataaaaccacagtaagagacctctacatgcctacctctacatttttagaatggctaaaactagaaagattgaaaatacaaagtgttgatgagtatggtgaacaactagatttttagatattgctgctgggaatgtaaaatagtacagctggccgggcacggtggctcacacctgtaatcccagcactttgggaggccgaagcagtccagtcagttgaactcaggagttcaagactagtctggccaacatggtgatactccatctctactaaaaatacaaaagttagctgggctttatggcgcatgcctgtaatcccagcaactccagaggctgaggcaggaaaatcacttgaaaccagcaggcggag

SEQ ID NO: 82620 - DNA, 1011 bp, Homo sapiens
acagccaacaggatgcaaggaaaaagaaaatcaaacttaaaggctaatgatcattttttacttgttatataacaaacattttgttatttcattataatagcaaagctttctcaatctccaggcttccggcattggtattacaataaaatccatccccagagcttctatttcagcaagcctgaacttgccttgtgtgtggtcatcaatctgaataatatactaaaaagttgaacagggaagtaatgtcctgactactttttatgaccaatagccttagcaccctttttatgttggaatgcaagtttcatgagtacactactgtgttaaattggtgtgtcttgtactgtcctgtgtatgttttaacaaaaaaaaaatatatctaatttcttttcctgaaaactattattcagtgcttacagttctgattgccttccaggtgttatctcattatcttgtttaattctcacacagacctaaatggtggttgtactatttttttgctgaagcaggcttggaaagattaactgacttgcccaaattagtgacaaaactgaaattcaaattgtgacctgttgttgagtttaatttctggaatggcaaagtaaggacctccaaaaatctgctcctctataaaagcaacaagtacactggcaaaattattaggtcaaccttttcagaactctggaaattaaagcttgcaacaattgaaggagcattcgagaaaattgcctgtatttgggtaagaaaagcaaactttgtggcagtttcaattgtgctaattccatctacctgtccccagtacccttgaaaaccagtagcctcacagctatagtagctgtgaaaactagcagcttagcaaccaattgagagggcagggggtttggtactttttaaagccccatccccagagaattgtcactatttgatcggtctggcagctcactgaaaatttcaatttttagggcttatctttgtttgatcagattcagagtttgctctgttctattccta

SEQ ID NO: 82621 - DNA, 1016 bp, Homo sapiens
caataattttgccccattgttttttaaattagattgtgtatagttacctaaattgtggtttcattttactcaccagaccatattaagctgtggaaccattagaaattggtgacagacaacactgataagtgggcattggcagcactaatagttatttgttgctgactatgcaacaaaaaagctaaaagctataaaacataatgcctgaatttttcatttgttctatagtagctatctaaaaaaatccaagtttgcttatgtaatattatttggtgtggtcatttgcccaaaatgaaataagctgtaagtttgtataatataaaataatctacctaaatcgtacaagtaagagtgctgttgtttcttaagctgatgtattacttaagcaaatgttttttctcattgtattgctggagttattccttctggaaggggttcctaattgacttttttaaaactctgaaagttttgttgattggttaacacacaaaaaaatgtagagacgagtgtcagctgaaatgtttatccaggactctgttagtattgctgggggatagttttcacctggaggtgaaaacgcattcagttaataatggaaggtccaactcttcatgtacagtgcctagtaatctgtcctcacattacactgaagaagtatttctgcctccagagaaagttgaaggacaatgaacacttgagcaatatgctttcaaaaagcaaaaatattttcttggaaaagctagcctatctgtaaatagtttgtgttcactaagaagaccatttctttggtagcacaagggagcaggccatttgctgaaacactggactgtggaatcacttttacccggacattgggttttctgatatccttttaaaaacattttaacaaataatatactcctttgtgtttacatgcaaaactcaaagaaggttacctatcctccctgactttaacctacctctctgggtattcagaaaccagacagagattttattttttggaatattatccatga

SEQ ID NO: 82622 - DNA, 3272 bp, Homo sapiens
tatccgcccgcctcggccccccaaagtgctgggattacagacatgagccaccatgcccagcctctactagctgattttaaatcagagtaagataagtgatgcttatttatatgtaccttttctccaattccttctcactaacactgagaggaacagagaattgtcagaatagtaactattgtgataatggtatgcagcactcattcagcacttactgttacctggcactgtgtcagggactagacattattttatttatccttctagtatttcccccattttcagaagggaaccagaggcttaagattacacagctagtaggcaatagagctggaattgagcccctatctgactctagctagtgcccttaattactattgtaaatggctaggaatcgtatttgtgaggatttggtaggtttggaaaaggactttcttaatcctgatattcagaattgtcctaaaacttacataaaagcctaacctagcttttactgtattgttaggcttcagggatactatgtgacctgaaatatatacacatttttaacaagtggtccatgttttaacaggtttggccagcccttcttacaagcttcctttgtgccaaattttcattgttttttgaaatcaccaaaccatgttactaatgttgtgttttggtttgttttacagtgatccttttctgtatggctgccctaatatttccaataggattttacatcaatgaagtcggaggtcaaccttataaattacccaacaacacagtagttgggtcatcatatgtactttttgtcttatcaattttctttacaatagtaggacttctatttgctggcaaagtttgtttaccaggctgatgaatgtctaaattgcttgactcttattattttttattttattttatttttttatttttggagggtggagaggacaaaggcgaggcatctgagcaggcctctcatgggaagatgctcagatgaaactgatgctgagaaggaaaaaaaaatgctttggtttgttctcactatgcactttggatttaaaaaaaaaaaaaaaaaggagagccttttccataaccaaatacagacaatattgactaaatctcctgagcatattcaggcagtcaggtctgcactgtgatagcaacctagagaaggagaatgctttataccgaaaagcatgtggccctttgtgactctgttattccgtttttaatgtctaatgattcattagaggaaaaaaaaaagtctaagtatttatgtgtcatggtggaccagagggatgcaagagaagttcatgtggggctggcctcacctcctaagaaattagtgttcacaacttccttgtaatagtatgagcctttggcaccagaatggattgccgttgcattactgcaccaagaagccaatagatcaaaacttgtttgctaaaatgtatgtaaaaattctgaaattccctctctctgtgtacaaaaaaaaaaaaaaatcaaacactaagacacatgttttgggtgggtgggtgggggaaatcttccttatatttatataaatatatataatatatatattttgctgatgcagtatacagtgtgtatatatgtgtgtgtgtgtgtgtgtgtatgtgtgtgtaaatttatatacacacacatgcaaacagttcctggaagagaattctgaatgctttgctagcaaaacactgtggtgtgcaaacctagaacccaatagaaaaaaaagccatttatctgaaggctgcatagtggagagagtcttcagtttacctcattctttgtagcagcccttgattttaacaggtttttgtaataggtacagataatcccatacctttctaggtgcgattttaagttaagctaaaaattatttgtagggttaatttatttgtatatgatagtagaaggtaagatcatgtcaaaccttataatttggggaatctgacactatttaaattattggcaactgttgtctgttgtacagagattctttttctactggctcagtctgttacattaataatgcattttatatgttcaggcacactttacataaatacaaagttcgctagtaaatatctggctattttggctatttacaacactaatttcattatttttatctgtaagcattattaatacatctttaccaaaacctgagcaatacaatattttctttatatgttatatgcctttgtttgctaaaagctaatatttttgcatttactttaaagggctgtactaaacccacagctttaagttcttccctaaaagaagcattgcagctaacccttgaactcacagttttaaaatacagtatttctcttctccacatctccatgccttcgcatcaatgcttgtttttcctggtgaacactatagataatctcctgtttgaaatgtgggacagggtgtttcatggcagtggagctaagtttctcctctttatagtgaactggtgacccaaatgtccctgtcatttatagtgaactgatgacccaaatgactccctgtcagtagagtcccatgtggcccatgcttcacacaagcagaaatgaacgcactgtttttaaggctagattatcagttctagaatgattacttcaaagatgggagctacctcctcagatattcacactatgaaatggaggtgcttgatgtgtttcacactggcttgtttgacagtcttctatcttactgttaattcagcagtattttattgtgaaagaaaaccccagtgtttgagctcactcaggaattggggagagagatggaccaccactgtggtgcatttcttaagtgttctgggagaatgtcatacttttccttcccagagtaaaagaaacctttgggagatcctgagggagactgtttctccccaagtatgatgatgtctagtcaagtctaagaataccactggacatgttctatggacatttgggattgcagttgctattctgatttgattggtcctcagtcaaatggatcactttgaaggaaagctttggttgtcaccgttatataccactgagataaagtgttagcaaagtatggttcaaattaacttatgacatgaccaagagcttttctcttccaaaagatgaattgtattgtaaatagtttctcaaaatatttttaactggatcatgagcatggggagagaaagtttctcagctgctaagaatttccccactgtttacttctttcacttatggtggtattgcatttaagattacaaaatttaaggttttatttgtatctat

SEQ ID NO: 82623 - DNA, 1047 bp, Homo sapiens
ccatcccatcaagtagtatgtgaagtcaagtcttcgtactcttgcagaccagacattgaaatggattcattcatatagatttctataaatcctataagtgaaaagatagacaactgtccgcagttgcttttaaaaaaggtcactataataagtactatatagtacagtattaatttatagcaggaaatcgtatcttgtaaactgtatataaaacactgttttatggtgcaatcatttgtcaaacttttgtctgtttcattgtttttagagtgtgtgcattcttctcatacctaagaatatcactgtaaaatctgctgaaaactatttttaggttttatttgcacaagactgaattagtttgacatttttggaagctcctattgaacatacccaaacatctgtaaacatgaaaaatcttcaatttattaaaagcaaacatttcagtatgattctttccaaaggtaatccatgttctatgttgttaatgtgtgtatgtaatttttctgactcttccacctcttataaacctattttctgtttcatttgttttgtttttgaaggatggctcttttttctttttaatgttctagatgaccaaaacactattggtttttacccttttgcctaaagctttgatatccccacttgatgttctgtgaattcactgtttaatctattaagtgaaataataaatagtcctggtgacaaacaatctgttgatttagaggaaaggccctgaaaaatacagtattggaaactaactttgcatatgctgttagctattattttgcatcatgggcttcatgggaagaacatgttgcatttattttgtctttattaaaagactactagccacaagttactctgattatagtaactgttttatcaacccacttcatctttaaaaaattaaatttacattcacaattcaaaacagtaagctgtctttcagaaaatttttgaaggataaaaacatgaaggaaaaaagtggcccgtgtaggtaggattccctacacaggacttttagttgtatcacctcaagagatt

SEQ ID NO: 82624 - DNA, 1058 bp, Homo sapiens
tggcagagtggctcagagcagagttctggagtcagcaggaccaggtagaatcatgccctgcctcttactggtggattcccacttaccttatctgtaaactgggggactgtgaggatgaagcaaggcagcatactcaaagcacttagcacaatgccagggaaagatctggactcagtaaatggtagctatagctatttctgatccaagcaaagccagagacctggcgggggaggacacagggtgccttgaagccatcttggagccccatttcctggggtggagtatagctgaacttgagtgtctctaagccaagctggacagctgtattgcaagaatgcatgcagctgctccagccaacaagccaaatgttcctcagctgcggcccagccaacgaaagaagggatgatggaactgaggaggaagaccaagtcaagggaagcagagacatctcttttactgttctacacagagaaagggaatgacgtgggtaagttagaggctatacaggtgtctggacagccccctggccctgggggagctgtaagggcagcaggtaccgtgggaaggagacccctcctgctgtcccaggacctaggcactggtgcctctggagcaagccgtactcaactcagttctcccagccctgggaaatggacatgcaaagttttgacaacaaccagggaatgagagaagtcaatattgaagatgagacctcctgagattcttgggcactccagctctgtccactaggggcagtttccttagctctaaggcagatggcaagggatggagatgattcccctaggccagcctgattcactgctgtgaaatggtgcagatcccaagaacaattcattgctaggcaggaggtcccaaacagcctttccccatccacccaacagctccctttctacctctcagcaaattgcactaaggacttttacaactgacttgattgacagagaaattgacatgaaaaagggagcagtgggagattcagggggagggaagagaggtacacagggtgaccatcttagttcatttgtgcttggaatacc

SEQ ID NO: 82625 - DNA, 1106 bp, Homo sapiens
tccctctgccccagtcacctctgtcacatcattctaactttttttttttttcctgttctttggagcagttagtatgtcattcatttagttaatattttaggtgcttctctcccctaaaggcagagattttattttatcatgttcactgctgtctcctagtgcctaggtgtccagtaaataatactgtggtaggcctggcacagtggctcatgcctgtaatcccagcactttgggaggctgaagtgggcggatcacctgaggtcaggagttcgagaccagcctggccaacatggtgaaacccccgcctctactaaaaatacaaaattagctgggcatggtggtgcacgcctgtaatcccagctacttgggaggctgaggcaggagaatcacttgaacacgagaggcggaggctgcagtgagccgagattgggctactgcactccggcctgggtgacagagcaagactccatccccaaatagtagtagtagtagtagtagtaacaataataataataataataataatgtggttgacttaagggagggagagagacgtggttgtttgagaaggtgctggttgtccactgtggctgtaccactgcccctcgcccagggagccctctggcccagcaggtggccctgctgtaagtttccttgtagggatgggaccagcctttgggcagaaccctctgagaaccgccgctccctgccttcccctcaggccggttctcagaacccattgaagccttgtttggggcaagttctcacctctcagatcaggaccccttcggcctctgcatctgttgtctgcatgtctggtgacccactctccatggatggtcgtttccttgggaaacctggacctaatcctcccaggaggtggcattgaggaggacatgggaaccaaggatgagtccttgtgtaacagggcaagaggtgcaagctagagtccctaatctcccctactccactttacaaaccatatgcactatttatacattttcttctgtgtacaaaattaaacatagactttataaaaacaaaaaaaattcggcaaggaatgtcaaagttccctataatttcccattgcagggagaaaactgctg

SEQ ID NO: 82626 - DNA, 1070 bp, Homo sapiens
ttccttggtgggtctcatcttaatctggaactacctggtctatttgctcaggtgttgtttgtcttctgcaatagaacgtaagctccatgaaggcttctcagtgcttcagtttcctcaactatgaaatgcagacaatcatactttacttcatcaaagctgttatggggagcattactttaaaaaaaaaatccagtgctggttctctcaatacctagaacagtgcctggcacgaagttgacactcaatatagtacaaagaatactttatatttaatcttctcattagccctatcaatagagatttatcatcttcaatttggaaatgacgagactgaggttcagatataagcaactcatccaaggtggaatgaggacagaaacttgggtctcgctatgtcaaagatccttattcttattcttaaccactatactgcacggttttctgataaacggcagtatggttaagtgggtaagagcttggacccgagaacaaaactgtgcaggttcaaatcccaccacagctgcttggcatctgtgacccacctgagttgtctgggtttggtattcctccctattttcatccctaaagtagggaaactaagtaccgacctccagacccctgcggggaaggagtaaggacaggacgctaataaacgtaacctctgggaaggtttgttattacttgacaacatgttttctgccaacgtaagcgggtaatgacgctaagccacaagtcaaacgctgcaagcaggagcgtcacccggtttctactgagccgtcaccacaaccctatgaggtaggaatttctattatctctatttcacagatgaggaaactgtggagatcgctaagatctcttctttccgcctccaagcccaaggaattctaaagctaacccaaaggaacgaccttgtttgtttactgacacctcctcggaccgaatggtcagggctgtatccggaacacagagttggctcggtaaacactgaatggttgcctgaataaatgaatgaggaatccctggcctcgccgggcagaggctaatccggttcagctgcgaagtgggggctc

SEQ ID NO: 82627 - DNA, 1197 bp, Homo sapiens
cggattagcctctgcccggcgaggccagggattcctcattcatttattcaggcaaccattcagtgtttaccgagccaactctgtgttccggatacagccctgaccattcggtccgaggaggtgtcagtaaacaaacaaggtcgttcctttgggttagctttagaattccttgggcttggaggcggaaagaagagatcttagcgatctccacagtttcctcatctgtgaaatagagataatagaaattcctacctcatagggttgtggtgacggctcagtagaaaccgggtgacgctcctgcttgcagcgtttgacttgtggcttagcgtcattacccgcttacgttggcagaaaacatgttgtcaagtaataacaaaccttcccagaggttacgtttattagcgtcctgtccttactccttccccgcaggggtctggaggtcggtacttagtttccctactttagggatgaaaatagggaggaataccaaacccagacaactcaggtgggtcacagatgccaagcagctgtggtgggatttgaacctgcacagttttgttctcgggtccaagctcttacccacttaaccatactgccgtttatcagaaaaccgtgcagtatagtggttaagaataagaataaggatctttgacatagcgagacccaagtttctgtcctcattccaccttggatgagttgcttatatctgaacctcagtctcgtcatttccaaattgaagatgataaatctctattgatagggctaatgagaagattaaatataaagtattctttgtactatattgagtgtcaacttcgtgccaggcactgttctaggtattgagagaaccagcactggattttttttttaaagtaatgctccccataacagctttgatgaagtaaagtatgattgtctgcatttcatagttgaggaaactgaagcactgagaagccttcatggagcttacgttctattgcagaagacaaacaacacctgagcaaatagaccaggtagttccagattaagatgagacccaccaaggaaagaaaacagagatgtggtagggcctgggaggaggctgggggaggcttttaaaatagggtggtcagggaacctatcctctcctgcaggcggtgatgatatttaataaaaaggagcaaccttggaaatccctgtgggagaatagatgatgtg

SEQ ID NO: 82628 - DNA, 1064 bp, Homo sapiens
cacagaagagtcatctcactcaggattcgagttaaagtcagcttgaaaatcaaatatcagagagctttggactgtctgtcttcctgttcaacttctggctcctctttaaagcgtccccagggccctcagttctccagtgttttaatcatggctgggaccagccaacctctatccttctgtctggcagtgaattctctgtgagcagagaagaaaccattaaagccagtcatttgcctttccccgcaggtgcagcccacacttgttggcttggtctacccgcttgcacccgctgcttgagtgtttctttttttctttatttcttctggctgatggggtatagggttggtcatccattgttgacttcaatgtagatgtagaaagaaggtcagttggttggttgtgggctccccctcccagtgcagggcctgttgcagaataggcacaaggaaatgttggttgaacgactgatggtcccagtctctcgccctcctttgcagatcgagctgaaggactgcgcggctggctctcctctagtatggccaatgaagaggatgacccagttgtacaggaggtaactgctgctctctgtcccctgccgccggggctacaggcagtggaattgggtcctttccatgtgtcctcaggccagtctgggacctgttgatgttctgggacccctaacccttgctgttccctctgcctggtcccctctgctgtcccccagacccctgcgtggctgacctctcccttccttcaggtctctgatctggcatcacctcatcagggaggccttccctgactgcccttccacacccagctcccctcctgcaccctcccgtgcctctctctgcccttaccttggcggtaactcatacttggcctagcccccgtcatcccctagatatcagttgattgctttctttcccgtccactgctgtgccgcaaagccgagtatagtgcctggcacccaggtacccggcgactatttggtgaatgaatgaatgaataaatgggctcagcagtccctccttcccaggcttacgcagatgtagtcattcagcagc

SEQ ID NO: 82629 - DNA, 2159 bp, Homo sapiens
tttgtttttgtttttttagtagagatggggttttgccatgttggccaggctggtctcgaactcctgatttccaagtgatctgcccacctcaggctccctaagtgctgggattacaggcgtgagccacgaccacctggccctggtgcattgattttagaacctaacccttgaaactgtgtactgagtgagggatgcttccaaagacaccatgggccagggctcccaatattttctggggtggggaacaactcctgatttctctggaaccttcttggaagagatttgtgttaacagacccttagactcggggtcaaacttctagacactgctgtttcctgctgtgtgaccttgggcatgttagctaacctctctgagcctcagttttcttaattataaaatgagagtagtaataatagtacctaccttgccaagttattttgagggtgagatgggttagtatatttacagtcagtggaacagagtccaccacatcctagatgcccagtgaatgttagccatcattttgtcattgctggtggtgtacctgtgttacagacaaggcatcgaggcttgggggctggggctgggcaggtcataaggccaggaagatgagtggctgaggccacgtcagaggccttgggtgccgtgctcaggaggttggatgtggtcctgtggctggccatggagtggaagacgggaggccttgggggagggggcccaggccagggccatcagctgaggctcctctcacaccctgccctcctccaacaggacagtcgctctgagcatgagcgtcagtacctgctgtgccccggctcaagcggggtggagaacacggagctcgtcaagtcacccaggtgggatgggctgggccagcatgcaaactggatgcctgcccagggtccccaggggtccttggtgtggatcctcccagaggactgtggcccctcctgtagcatgagggtggagcccattgtcccctggagaaggccaggagggtgggcctggaaagagatggtccacttttctgcaggggctcagggctgctgggggagggcgggggtgggctgtctgcaccctctccccagaccctcacttgggtggctggtgaggagggtccagcctggatcagccctgagcctctgcccctgccatgtccctgcagtgagtacctgatgatgctgatgccacccagccaggaggaggagaagtgagtagaggcggcaggacaccctctccctttccgggctggctgcctctaacccgtcccctctgcttttcccagagacaagcctgtggcccccagcaacgtcctgtcgatggcccagctgcgcacgctgcccctggccgatcagatcaagatcctgatgaagaatggtgggtgcctaccccctgcccacccgggggccccagtcccagtggctcctgaggaatggactctgtgggacagtgaggaccaggggacaaggccagaggcccctgctgcccacagcctgcccagctttgcagctgcatccttgtctggaaagataacgcaggacggcagtgcggccagctcccgcaggcagcccgggttcccgtgaatgtaggacagtagtgtgtctggcccccacaggcgggctcgggttcctgtgccatgctcaccacttgtctgccatgctcttgggcaggtcatgaacctttctgaggctttgtttgtttttctgtgaaaagagactaatgatagttcctgggggccaatgtgaggaatcagagagaggaggcttctaaagtacagggccttgcaggcgaacacggactaggggctttttgttgttgttgttgttgttgttgttgtttttttttttaaggtttttttaaaggttttaaaggttttttttaaaggttttgctgtgtaactcctgggcccaagtgatcctcctgcctcagccttccgagtggctgggcctacaagcagacgccattcactgcaccggctcaactagggtcattttcatgacaatgtcttcactggcattgcttctgggtactcttgccagacctggcaccataaggactggtctccttttctcagaggactctgagtgccagaacctttagggtacccgtggctggtgaacaacagacctgatccttgagttcagaatggagccgcagaa

SEQ ID NO: 82630 - DNA, 1084 bp, Homo sapiens
tgcctttcagtggtttctcttcggcgaatcctcccctagaccatgtgctgcctccacgagaccatcagtttcaagggattagggatgtctgttttgactcctgctttatgttcccagtacccggaataatgcctggatattaccagtgcagacccttggtaaataatgtggctacgttttacttgaattatattgattctgaatgatgtagcattaattgcattaataactcactttttaagtaatgtagtttaaggtgagcaatgtgacaaaatgtgaaatgttgaacattttaagaaaatacaatgccttgaaagctcctcatagttgtagagtatattcgtgttactgccacctggtggcgcccttgcactgctccacaggtgcccagcgcagtttgtcagcaccttgcggctgttgtcctttgttacacgttttcatcatggaaggcttttgcaatggcgcatcgcgtattacataggaccacgtgtgtatatttacaccataagtgaatgaaagccaagaggggtcctcccgtcacacacctgaggacactggcccagagaggcatgggacttgccaaaagtcttgcagcaaggcagccgcagagccctgttaaaacctaagcctcatggctcagccctgggctctgcacccagcactgcatgtgtcccctggaggtgctgccccttttagtttcgccctgtcctggggactggaaggtagggacttggggactgtgggcatttcacctgccccggcacttctgtaagccctactctgctgctgcccatgctgccatgtcaggggcccctgggtgagggtcctgtgtgtgcctgtgaggagacaatgcaaaatccatgcctccattcagtcactatggctagactgctcgttctgtgccatggaccgggctctcattcagacactgcccctggggatggcggctgttacatttgagctccctgaatgcagagatcatggcatggaccaggtttgtttggtcagcacacacttaataggtaccttcgctgtggtggcagcgatgagccacatcggcagagtccgtgtccccacagagcgt

SEQ ID NO: 82631 - DNA, 1096 bp, Homo sapiens
tgagctggtgtctcccttcttcccatcaccccacccatggcctccctcccaaggcctggaactccatgcagctgggagccacagtcttcctaggcttggtgctggctgaaacgtgctgcccaggagctgtcccacaccccttggcacgctggtgtgccgtcccagtcacaaggcagcccttaagctgaaggaagcatctgcctcttctcttcctgaaggagcctccccaactcctctgggcagtcggtgtccaggtgcccgagcagcatctttgctcctaggggtcagcatgtaacaatcaccactcccaggcttgcctccccagatacagtgccgtttgcccccagctgcccctgcccgccccgctccagtgtgtagacactgtcagaactggcggcttggtgggggtgtggtccagtctatgttagcgtaggtgatagtcatccattccctgtgtctctcagccagccacccttctctctcccagtcaccccacaaatctaatcagagtgcaggggagctgttgaggcagagtgggggctgcagggggctgagagcttctggaaggatgggcggcctccaaccagccattagcagccaccactgtgaagtgccgcctatgcagacagcgtgtgtctgtgggagcccctcccagcccgagtcctcatcgtatcctcggagctgggcagggcatccccagggagcgctgtggtctaggtggggtgggatggtcccatggtccccttggaagagatgggcctggagctcctttatggaggagaaaaggagggaggtgcagagctgaagggactgcctgaggccacactgttgggaagaatcaaggccaggagcctaggactgtcccaggctccagctcccaggcctgccaggtgagttcccgggacagtcctgggagcagtccgtggccgcccctggaatgtgctgcttcttctccctcagatgtggaagttcacgcagagccgctgggtggttaggaaagaggtggcaaccgtgaccaaagtaagtggcgtttttgtggtctgaggcccaggctgctgctggaggggagggggctggctgtgcctcacgctgggcc

SEQ ID NO: 82632 - DNA, 1051 bp, Homo sapiens
atcttgtaaaggaaaccatgccaaagaagccggatgcacaatcaggtgtgtgaggggctttgggctgggaggccccggctcctacactgtggctccggaagggctgctgtgctagagcttgtcaggcccggacctggagagggtggagggctctcaccgttcacccttcaccctccttcctttcctgccacccacagaccgcagctggtcgcttgcccagcagcagagcctcagggacggaggcttgcggattccagggctgagtctgggttccaggtctctgaggctcactcaccctcttgggtcaacaagcgggcccggaagagctgctggggggaggaactcagcagcacccttccccgcatgactctcggcacgctgggacggttctctcttccactgatggggtggctgattttcgagaaaggttggggatgagaccaggacgggaccacttgctgcagccccgcggtcccctgctgggcttttggcttcagatccctgtgccctcctgagcagtgctgcctccctccccgcagggcctgccgggctggtctgtggggaccagcggatccaagtagccaaaaccaaggcccagcagaaccacgcgttgctggagcgggagctgcagcggcggaaggagcagctgcgggtgcctgcggtcccgcccggtgtgcggatcaaggaggagcccgtgagcgaggagggcgaggaggacgaggagcaggaggcggaggaggagcccatggacacttcccccagcggcctccacagcaagctggccaacgggctgcctctcgggcgggctgcgggcacagacagcttcaacgggcacccgccccagggctgcgccagcacccctgtggctcgggaactgaaggccttcgtggaggccacctttcagagacagtttgtgctcacgctgagcgaactcaagcgcctcttcaatctgcacttggccagcctgccccccggccacacactcttcagcggcatctcggaccgcatgctacaggacacggtgctggccgccggttgcaagcagatactg

SEQ ID NO: 82633 - DNA, 1089 bp, Homo sapiens
aatacggtgtctgaaggcccggcctattgcctggcctgcagcagggcctagtgaaacagggcccctgcctggtttctcaccctgtcccccaccaagaacacctgtttcctactagctttgccattgtttggaatgatttaacttctaagatcgtttgatcttctttgcaatctgcagatgaagaaactgaggctccaaggaatgaaatgtacgtttaaaggtcactacctaggaggtagtagagctggaatttggacctcagtatagtggcctggagttttgaatcctttctgctcagctaagatgagctgcttccccacagctgcgccacgccccagcttgggcctgggtcctggcggcctccctgtgcatcagaagcaagctgaccagctcagcgctgtgctctcagcacttccagtgccaggccttgagtgtggtattgcaagcctcctgccccttccccctgggctgcttttctgtcactgggaggggccctgacgggggagcagagtgcttgctggggaccgtttccctgcgctgaggatagagagcgccaggtgctgcctgaggcacgcctttcccgtgctccttttccacaaggctctgcccagacctggcagcaaaatggggtgaggtggggctgtggtggtctctaagaaagcattgatgttttcattgccaaggtcaggagcgggcctgcagccttgggtgatgatctgaggccaaggcccatccctgtgtatgaggaatagaaactaggacaggaggccttgtggagcctaggctgtctcaggggatcggccctgctggcaggcagccccctgtgggaggtactggcagagttcggagctcctgcccacccagcacatgggtctgggtctccacaagctcacctttcttcatgagctgggccaggacaggcaggacacctgcctgacattagttgttttgggccgctggagtggacagaggtgaggggtgggacatggccaccctcagacaccctcacccctccttccggaccccctctgtccatgttgctttggggtggggccagcgtctccaggagacaccatggccctaactgta

SEQ ID NO: 82634 - DNA, 1493 bp, Homo sapiens
gaaacagacgcagcttccccactgtacggaggatatctgcagactcgaagccgggcatttcactgggcccatcacactccccctctcgctgaagccctgtcaggccctggggggtgtgctggcctcctccccatggtgaggtgagaggcacaggtttgtggctgcccaaggccctcagagatggtgagtagcagaagctgggattggaacccatgttcctgcatctgggctggggcagacagggagggatgaggcaagcaaatggatccatggggtagagatggacaagcaactcacccctgggccttggtcagtttcccccccagactgctgcttccccggatgagcagaaggtgtttgccctctgggagtctggagacatgagtgatcaggtgaggtgaactttgctgccatcttcccgaagagccaggggggtttcctgcagcgttggaggccttgggggacatgtgcacccaaagtgcagccacacatttcagattttctggcacactcggttttaaatatcctgctccaactctgtacgctaacaaaataagctgtatgtgccaatagtttgaacctaaaccagtggttcccagatgccagtctgtgagccagctccatcagaatcatcttttaaaaaatacaggctgggcgtagtggctcacgcctgtaatcccagcactttgggaggccaaggtgggtggatcacctgaggttgggagtttgacaccagcctgaccaatatggtgaaaccccatctctactaaaaatgcccatagtcgtgggaggctgagacagaattgcttgaacctgggagagagaggttgcagtgaaccgagattgcaccactgcactccagactgggcgacagagcaagactgtgtctcagaaagaaaaaaaaaaaaaacatagattcagttctgttcagtaggtatgcggtactgtcctaggtatctgaatttctgtaaagcttcctgagcaactctgatccagccaggcttatagagcactggtgaagcacatttctcaggcggcctctggcagcaggaatcaaaaggattccttgtcagatgtcaggtcctggacttttaggttaaagaaattggtcattttgcctctagtcatactgtgatggggagggtcacaggtgtccagtgcccagaaatgtgagtggaagcagcagcgccttgcgtgtgtgtggtgtagtcatggaccctgcatcccagcttttcttaggccgtgaacgtacctaatttgatggtcgaaacgccagtcggtctgaccgtgtctaggccctgctcctaaggtgtggggagaagggagtcagcagaaatcccactgagctctctgtccccagctgcctcttaggggagccaactggcaggctgaggatctaaggggctggggccttttcctgagcaagcttgagtgcttttgtccagaatagagggtatctgaaatactttgataacaaaaaggcaaaaaaacaa

SEQ ID NO: 82635 - DNA, 1048 bp, Homo sapiens
agatgcaaacaaaaccagctaagtatggaacaatgtgtgaggttatcaaagtttctatttttacgtgatcaaatgatttgcctctcaaaattctagtcctagacaaatagtgatacatgaagcatccttttttttttttttttttttttttttttttttttgagacagagtctccctctgtcagccaggctggagtgcaatggcacgatctcggctcactgcaacctccgcctcagcctcctgagtagctgggattataggcgtgtgccaccacgcgtggctgatttttgtatttttagtagagacggagtttcaccacgttggacaggctggtctcgaactcctgacctcaggtaatccgcctgcctcggtctccccaagtgctgggattgcaggcgtgagcctctgcgcccggcatgaagcatctttaagagagtttccattgtttaagttttcagagttgttgaaattccataacattctccttcttggtcttttaaatttggcctgtattctttcctttatgccaaactgcagaatttttcattattctgtatatcagtcagtgccatttcagctgtgccctggtgcgggtcattattgtactagacaattgagttcttataaaatcctgtgagttgttacttttttttgtttttttcagaattcttatgacagatattagacatactgaatccaatcttttccatttttattttggggtgtaacgtattttacggcatcctgtttcatggatgcagtggcatgtttgtgcattaagacttcacaccaattttgacaccctcttctcatctccgtgcagcttagattgtcgcttcacctgcttgctaagtccgatgcacgcctgcattttaccatgcagaaatatgttcaagccactcatcctctcatgtctcttcaccagttcttttgttatgctggcatatacctttgtttttatttatattcaagtttccagacatagcattaatgcctttacttttgtgtttttatttctgtacactgtcttgctgggtctctagagatg

SEQ ID NO: 82636 - DNA, 1376 bp, Homo sapiens
agggtggctggtagtagccatggtggtatggttaggcagtttttgatttcccatttgtattctattcactaatcataaatcgagtgttgacattgtggacagaatgtaattagctccttttcctgcaaaaatctgtgcttaccctgtttctctctcataggactgctgtgtaagctatggtggcatgtggtaccttaaagggacagtacagtcttgacaatagtagcaaactactaacccagcaaatctaagcccaaggaagaagggcggaaccagaagtagggcctcgacttgcttcagacgacacagagcaagaggaactgaccatctcatgacctgtggcattgcacggtgcagtggacagaagggattatcctcagccagtcgcagggtcagcttaagttagttagatcactcccagaagagaccagctgggaccttctttgcagtacaatttgaaattcctgatgtattttgcttattatttggtttcattctcataataaagagagtgtatactgacatgggcaggatgataaaaatcatggtttaatattttcttttgtaaacttaatgccaacaaggtctaagttatgtttacaacatgaagaaaacctcaaagttcttaatttttaaaatgcctagaagacaatatttagtcttggattatctatctgctaagacctccaccaatttcattaaaccaaattgaattattctattcttgggattctgtggccacttcacctttgacaacaacctactttatgtagcagtctcaactgtttacatgaaccatagcaaaaaaatcagaatcaaatccatctccttttaatgtttgcagaaagatgcaaacaaaaccaggtaagtatggaacaatgtgtaagtgaggttatcacactttgatgtaaaaatttctattttgtgtatttttaaaataaatgcaaacactaaactagcatcatggtgctatcttcaaatggttacaggaaggcgatcttgttgggctcagcgttacgtgtatctagagggaacggagctaatggaggaagacagagcagcactgtccactagaaagaggcgagtcacgtacataattttgaaagtttctagcaaccacattagtttaaaaaggtcatgttagcatattatttagctcaaaatatctaaaacatcaacataaggtaaaagtcttcaaaatctggcattttacactttcctcaacactcagtttggactagccacatcataagtgctccgatgccacatggggctatttgcgacagtattggatagcacagccctagaaactgatggaaaaaataagagtaagctaggttggatgacatgtgaattttggtatctagataaggctt

SEQ ID NO: 82637 - DNA, 1048 bp, Homo sapiens
actgtgaattcattacgaagaatgttcgagagaaagcaggggtctaatccaaaagaaatgtcattaaccaatactccaagtccttgagttttgttatatctgaactagttgaactgtgactgacaggtaatcctaatatatccaaatccaactgaataccaaattgagatggcaaatttttgtttgatataagttagcttgttagcatatgccctagagggcctccatccctgtattctaatgtttttactcaaagctctagcctttaggataggtgaatatgtaaatcttttatcactttctcaaattcaaactaaaggggaaagatcaaaccccttcccttcctacctgttttctgagctggctgacttgccagccacaagctgctcttgcagagttcttaccattcctgtaaatgttttgacttgttgcagaaattcctatctactttattaagcagtattgatctgactgtggaaacatcctctcacttgcattcttttaacttaaaactatttaagaactgatgttccgattattgtatatatttttctaaaaaccaaataaagctacctatgaaaatgaacagatggatctgtgtcttactttcaatataagccatttcgctcttataaccaactgttcactttttttcttccaacaaatatcgcgagaaagatttgcagtgattttttttttcctattttaaacagggaatccttggatttgtgtaacttaatagcacaaattctgctcatattgctaaatgctcattaaaactactctggacaaacattttcaaatttatatactctgtaattttcactatttcagaaatgtcagacttggttctgaattaatagcatttgacaaattgattctcaaaacatttgatcaaccatagcaaagaaactatactattcaaactatactattcaaactatactattaatgtttgaatagtatagcttatttaaaaacagtttgcatttctattaataagacaatattttttaatctgttagccatttgtagtctcctttgccta

SEQ ID NO: 82638 - DNA, 1050 bp, Homo sapiens
aataaattttagtccccttaggagtccaggatatatgacaataaactttaacagttgtattcacagcaggcaaattcatgggaactttaaagatttttgaaagctccacctataccttggctcaagggtccattcaaaaaagtagactgtcaggatatgaatacattcattgtactagcaaataggattttagaagtaacactgcggaatgatcattcctgaacaaataactgcatctccataaagtagatgaccatttttcacttcttacaagtatgggtacataagagaatacattacctgctggaggcgtcagtttaactgaattttaagtagaactcgggtttccttctgtgccactccaccttccattgggatgtgacttaaactacatgttcttttttgaaggactgggttatataaattgttgatgtgagatcatttgtattattctaagattcatttgttgtgctagatcttcaacttgctgctgagcttgggaagacattactggatcggaacacagagttggaggactctgttcagcagatgtatacaaccaatcaggagcagttacaggaaattgaggtaattcacttggcaggagagttacacttttgacacttcgatgtgttgctgttatgccaatcacatactggtaaaaaagcacttgcaattagatgcagcattttattttttaacacaaacttttttgagaatgagaaccgcctcccgagtagctgggattacaggcgcctgccaccacgcctggctaatttttgtatttttggtagagatggggtttcactgtgttagccaggctggtctcgaactcctgtcctcagatgatccacctgccttggcctcccaaagtgctgggattacaggcatgggccaccacacccggcctaaaacatgcaatatttaagatatacagaatggggtaagagaacaatacagtgaatacccatatatccaccacctagcttaaaaaagaagactgcccacactcttgaacttcccaccggagagggaacttatacctcctcc

SEQ ID NO: 82639 - DNA, 1177 bp, Homo sapiens
ttacaccattaaaaatatattattacctgcaaagactcattagtgaaagaatattcaacatatgaaggtattgatatgttgaaattctcaagcctgcaataaatctacagtatttttagtagttgcctaaaccaggccagttcaataggatttagagaagaccctcttaatgaaaattcattttgtaatcctgtagagatgaacaggtgtataaggcttcgaaactatattatttccttttcttttgtgccttaattaaaactataagggacattcaatattctattccctccactaattatttagaaaactttcttgggcttactgccagcttttggcctcttttggttatggaagccagctgctactcaacaggaaatgaactttttttaaagacaaagtccggtgtctttaagctaacagatgaagtaatatcctgttatacagtgtgacttcacaggagctttcttgtagttgggacttgttaaaattctatccttaacagcctataaatatttaggagatcgagacttcaggtttctgagccaggctggtgctttgttttactggaaataaggtttgagataaggacaagtctcaaattcttttttgtttgctatctactaaagagtgctgtccttggtatctctttctgcaggagcagggaagaggttcctggctactcttaagtagcacaggtagttccataactgaatgaaagtggtgatagtctcaagacagtctggattctgggagaggtttcagcccagttgggttttgttttttttcttttttttttttttcctgctaagagacaaggtcttgctatgttgcccatgctggtctcgaactcttggcctcaaacagtcctcctgccttggcgtcccaaagtgctgagattacaggtgtgagccaccacacccggtccttggctcaggctttgattgctggttaagagcatctttggtgaatctgagccttcccagtgaggaattaccacttcacacatttaagaaggaaagacttaagtaatacctaggtaatgtttttatactttgtctttaatacagtgtggtagcttccatatgggtctatgtatacacattacacactctgtgagtacaaaatcattttttctggaacatgttgagccatacatagttcctttttcatttgg

SEQ ID NO: 82640 - DNA, 1053 bp, Homo sapiens
cgcaccccttcactctttccccgccttctttgtttattccggacccaccattggctgcttgccctcgataccgggcgagccgccggtctttggagagaggcgattggacgaagtccctgccgctcggccagcagcccgctcgcgattggttgaggcgccgccgggggtttgaatcgcatccccggccggggagggttctgccaaagtgccacgttgggcccggcggcggcgtgaagactggcggctgcgtgagactccggctccaggcgttcgcaccgtaatgcccggccgttggggccgtcggtaggcgcgaggcgagtcgaggcagccggccggtcggcggccgccggcgggaacggggctgaggcggcgcagcggagtctgggcggcggcgcgtcccgcccgagggcggctctggctgagggcggaggggccggggaagagcccggggcagcggctgaggcgggacggcggcgggggccgctgcccctagaagacccagccgagatgctggcggaaaacctggtagaggagtttgagatgaaggaggacgagccgtggtacgaccaccaggacctccagcaaggtgagggcgggggcgccccgcgggcgggcggcggcctggcccgggaggcccccgctgcgaaactgttaaaaagttgctttttgtggcggcggaggatgcaggtgccgggaagggctcaggctcacctggcggctgggccggccgtgcccgcggatcccgcccgcaggaagcctcggcacggggcccacggccttgctaatgcgcagttgaatatcagccccgaggcgcgtgggggccagggacgagccaggcaccgttttaagcgctttccgtggattagctagtttaatcctcactgcattcctccgaggcagacccgggtgagccagtgtgtcccgcagtaagtggcatagcccgagaagccgccccgtcgcaggctgtctagcccagcgcctttcatggccagcgtggagggccggctgctgcaggtggtagttgttttgcggcgtagcgggagctgtgcgctc

SEQ ID NO: 82641 - DNA, 1896 bp, Homo sapiens
tgaatgacttgtctgagatagtgaagacccacattaactagaatcagctggggaactttaaaaaatacagtgcctgggtcccagtccctagcttttgatctaattcatgtaggggtgggatccaggaattaccatgtattttaaaagcttctgggtgtttctaatttgcagacagattgagaaccactatgatacgtcatccctttactgagaattatggcgagaatcactgccatttgaattactcaggagtgactgattcctcagttgtgtaggagaagcagaaaaaataagaataaaaagaattgagagatactgatatcaaactcccatttgaaatacaagggcccttctgattcaaggcccagttggggagcttggaccatgttgtgaatggcctagcactcgccagtctggtggaaattggtggtcttagttgctggagcaggctgagtgtccccgcggggtttgcatctgtccccagaaccttttccccaggcccgtgggggaatagggaagtcactctgagctagaaattgtcgaagaagaaaagaaacaaccttcctagccttggaaagcctgtccctgcttttgatagaattattgcctttttgtaggaattacagtagcaaaccccaggctgccgctgaatttcctacttttgctcattctctaggatagttcttatccagaatgtggtttcaggaattcttttttttagtttgaaaatgaatgtgaaacattttctttggtgtcttttttttaaaaaaaaaaaacccttattgctattttttcgtgtttttgttttgttttgttttttgtttgttttaccattaagtaatacacatcccagaatttggcactctgtgttaactgtggaggcaaataaaatttagttttaatctgtggtgagctgaatgcactacaacaccttcgaagtaatctgatggtttcattctgtcgagcctcatgctgcctacaaaacaccacaatttacctggtgttttcaacattttaaggaatgaagatacaagtagacatgcaagttggaaatgtttctttagaaaggccatccagaataatgatatctgttgcagtcgtccaaatgcaatatgaaatttcctaggtgctattataaacggtgtggtgtcataccaaatgcaaaagcagttacagtatttccgaagttggagttctctttgtaggcctttcaaatacgtgtttgcattccatagaggtctgctcaccaactgtgcctctcaccactggttaaaattgaatttaagcctcattgacataagtcgtttcttgattgaactcttcagtttttacactggaatttctgtagttgtcttgaaagctgcatgtcacatcactgtacacaaagtgctttggtattactcatgcaccgtggatagtgatttctgtgtcgttttcattttcagttgtacagtaatatggaaggcaggatgtctttcctagaggctggaagaaaagtgtatcgtacattttaaatttattttagaacaagtgcatgagatgtgtcactgatttctgttatttatttgtatgttttattattcaaagtgtatgcacttttaagaagcagaatttatatttttacgtttgaaacgttttatttctgaaacagcgttgattatatagtatacagttggaattaagagaaaagtggaaaatgtaacaaaatacaataaatttattacaagatgtcctcttcaagccacatttctcctttctcccccttgccaactgatatctttttggtgttgactataataataattgtactgcatcagtctttacaaaatgccttaaaattgcagtgtttaaaacacaagttacagaaagatgtatacatatgttttctgtgtaaaa

SEQ ID NO: 82642 - DNA, 1055 bp, Homo sapiens
tatcattccttaagacagccctacatcttgccttggtaatcccttagataatgtggaaactcaaaccgttaggctccagtcatcttagaccatttcccatccgttttgtattttctcgtcctgaaagcagctgaactgaaagtaagtaataatatgctggaccagtgggaacggatgtgggagtatttgtggtgtgctaaaatactgtaattatctgtgaggctgcctgacacgcttttgcaatcttgttttcatcattcattctgcaaacgtttatggagggccttctttgagcacagaggcaaaactgaaagcttcagggatttgctgtagctgaggagccctgggagcacagcccatcaagcaagggatgtgatggtgtcctaaatggagtgacagttctcctgggaaaagagatcacgtggattccggtcaaatcggctaaggcttgtggttctcttgagcaagtctgttccttctggaaaccaaaagtgcccttcatctttagagacattttactcttccatccaccttttcagactgagctgtctctactatttaggggttgaaaatccattacacagtcactttacgttaacattgggtcatcttatgtttgtatgagacggatgtgggatttgaggggaacattgtcattcccttaaaataactatcatgaaaaaaatagcaacagtatgtaaagggaccaagagtggcagcctttagggaaaatggagcagagaagagctgtgaacaaagctcatttatttgaaataagcgtgctttatttcacatagaggggcatcagacgttacatttcattcggacaaattactgaacagccgaagtgattgtttccaatgtaggttattataattattggatacaaagatttaactagtgtttctgggttggatttttgaaatagtatgcaagtcataagcacagtttcaataaaacacgtattctggaggtgcgtggaactttgtattatttgtagttgagaaaggcaaactttgctgacaaaccagtacctatcacaaacgaacacaaaa

SEQ ID NO: 82643 - DNA, 3571 bp, Homo sapiens
acagtattctctttactgtgttcaggaggcttttcaactcgaccatttgtgagaagtgtccagcgtcagagtttgtcatccagatcttctgtcaccagccccttggccgtcaatgaaaattgcatgagaccttcatggtccctgtctgctaagctgcagatgcgctccaattctccatcccgattttcaggggattcgccaattcacagctctgcttccaccttggagaagattggggaggcagcagatgacaaggtctccatctcttgctttggtagcttgcggaacctttctagcagttaccaggaaccaagcgacagtcatagtcgccgtgagcacaaggctgtgggccgggcccctctggctgtcatggaaggcgtgttcaaagacgaatcggacacccgcagattgaactccagtgtcgtagatacacagagcaaacattcagcacaaggggaccgcctgcccccgctctctggtccatttgataacaataatcagatcgcttatgtggatcagagcgactccgtagacagctctccagtcaaagaggtgaaagcccccagccacccaggctcactcgcaaagaaaccagagagcacaactaagagatcccccagttccaaaggcacttctgagccagagaaaagcttgcggaaggggagaccagccttggcaagccaggagtcatccctttcaagtacatccccttcttctcctcttcctgtaaaagtctctctaaagccctcccgctcccgcagcaaagcagattcttcttccaggggcagtggacggcattcatcccctgcccctgcccaacccaaaaaggagtcatccccgaaatctcaggactccgtgtcatctccttcgccacagaagcagaagtcagcctcggccctcacctacactgcttcctccacatctgccaaaaaggcctcgggccctgccacaaggagccctttcccacctgggaagagcaggacttcagaccacagcttgagtagagagggctccagacaaagcttgggttctgacagagccagcgccacctccacctccaaacccaattcccctcgggtgagccaggcccgagcaggggagggcaggggggccgggaagcacgtgcggagctcctccatggccagcctgcgctcccccagcacaagcatcaagtctggtttgaagagggacagcaagtctgaggacaaggggctgtccttcttcaaatcagccttgagacagaaggaaacccggcgctcgacggatcttggcaagacagccttgctctctaaaaaggctggtgggagctctgttaagtctgtctgtaagaacaccggggacgacgaggcagagagaggccaccagcctccagcttcccagcagccaaatgcaaatacaacgggaaaagagcagcttgtcaccaaggaccctgcttctgccaaacattccctgctgtccgctcgcaaatccaagtcttcccaactagactctggagttccctcgtctccgggtggcaggcagtctgcagagaaatcctcaaaaaagttatcttctagcatgcaaacctctgcacggccttctcaaaaacctcagtgatatttctgcaatcaaagtgttttatctgtaaagatgtttatttatttagaacccctgccctcccaccaaagcctcctgtgcttttgttttgtacttttttgagtcacgtgcccgactgtgtgtgtgtgtgtgagtgtatgcgtgtgtgtgtctaattcaattgcaaattgttcaaagcgtcgccttattctgccattgaaccaaataacagccataggcaaaacattgacaccaagctaactggaataattgtagacgatacccaggacggtccctttagcaattgtacatatttctttctagagaactctaatgactttctttggatatgagggttttgaaacctgtgaaccagaaaagctaccattagtgcgtagaaggaggaaggagctgactcgtgtttcttctgagcaggacttgtccttactgtggattgtgggtggcaccaggagctctaaaaactgtgactctaacaacgaaacaaatcgagggaaaaactcttgctttctgcactttcgccccatctaccagtctttgtaaagggcaatattttaacactaatgtttctcaggtatatactcagctagtctaggatggttgcacaccagtaaatggattaaagaggaaggtgccatgtgggtgactgtgtcatttctcctactgccacagatagacattttcgaggtagaaatgaagcctttcaccaccttcctatctgtggtgacatgtgcaccaaaacctgtcttgactcttgggataggtcctaggaagtggcagattggatagccagaaagccagtcactcgtttaattttttttccttctgaaattactagctaaggctcttggaattttgcactgtagtagagcagttaacacctttgacagattcctggaaaaaacttctagattctaaactgggtgaaagactggacatcattttccttgtcaggtgttgcatttttccgttagaggtgggaagctccacgatgccctgtgtctgtgggctcatgttccctcatcttgtagcttggagaggaaagaagttgccttctgccaaaagccaatggtggtatgttgaagcgttgtgtgatcaagtgttacatatgcacttcagatcctgtctgtcagtctctgttagggctgcctttcagtaactcatttattatttcttctttgttcttaagatttcatctcatgcccagaactcacaagcaggttttggagtgtgttccatctggccgtgtcagtgcaaattgcatttcttacaaaggagaacctcaccaaaaaaaacctcacagataagcaaagtatatagttttgcaagctttttcaaggtctcctggcaatactttcctgctcaatttttagcttttcttttttttttaaatgtcaagagagtgaaggtcttgattctctctgaatagcatttgtcactttgccagtaaatacagcatgctaagtttatgtgcttttaaatattagcgtttttcgtcagactcttcaagttcttcttgaacccttggtgcacagatccatatataacctcccttttcagtattgctgtgtgtgaattaactacaacacatatgcatgcatagctgtgaattctgcactactttttttttcttttttccccccaagaatatctcttgggaaaagtttttagtacgttacttaactttattttgctgctaatttgcgcattagccggtaacttgcaagtctggagaccacttactgttgagggtagctggaattttagacccttggcagtatttaagatttagacatttagccttgtgaaagttaccacagtgctccatgtgattcattgactgtgagcctgttgtccattgcactcagccctgtactcacttcttcactcgctgtcctggttttactgttcagattttggtgggttctcaaagcagtaccactctcatctgctcagtacatctgcggcaactggctgc

SEQ ID NO: 82644 - DNA, 1036 bp, Homo sapiens
aagaaaagcaagtagaattattttgtaattaatgagtttgctgtgctgtctcagtttccacactgtgactgagaagaggccattctgaagaggagcaggctgaaaggaggcaaggctgttctgtctccttctcttgggcatgtccctcacagctctgctcccactcaccactccagaagagcagctactccccagctgggtcatgtgtgcatcaagcctgacctgacgccactggccaattgctgtttccttagagctccatttgctgcttacattttaagttctttcccttctggttccggcaagttctcagctgcaaataacttccctgcctccgttcataggtccttattctgctctcattttgggggacttgtctggtgtagccctttctcacccgcgtctcttttatcccttaagtctccatacttgcggaaatggttatggcccattgaaggagtcactcctggtgcctctcaggaccttatctgccccatccctggggccatcctgagtctgttccagcattcagctaaatattctagcactcgtttattctcaccccaaataaatgcatatttttagaaaatgtgatcataatgtacttttctggatcaagcttataacaccctttgatatatccttgcaggatgactgggtttgtgaactcttaagttttcgtctgtttttgctgctacttgaatgttctttatttctagctcaggcttagaatttggactgaaagaagtcctcctgcgttcatgagctcatgtgttctcagtctgccagggaacttccatggagcctggtttgtgctcctccctgagggaagcagggcaggatagggcttcaagtgcaagccaaggacttgataagcctgaaatgagctgggctcctgcctttcaccagctgcacgaccttgggcaagcagattaatctttttcaacctctggaaattgggagtaataagagaacaaatctgaggattaaatgagatgcttggcacataataagtgttacatattatatttatctg

SEQ ID NO: 82645 - DNA, 1001 bp, Homo sapiens
gtttggatcccagcctgctgtttctccttccccagacacagagtaatttcctgggctttctgttttcttttgaaggcatgtcaccacccttccagcaatccagaggcaaacctgcagtgtcctctttgactcttctttcttgtccctctcatctaggcatggccatgcctcttcatcgactcctgtgtgtcccctccccattcttgctgtcagacagcgtgctggttcagacattttgttgcttttcagctggtcactgttgcaatgattttaattgatttttcacctccattactcctatttctaacatgttctgtgcactgcttacacagttcttgacccacaactctggtgacatcaccttttccataaaagccacagaggatacactccagattcttcaggctggccttcctgaccacccaggacccatcatccctttctctcatgaacatttttcttcccttcacagacctatacgtagctccttagggtggacatatctatgcctggttaattttttaaagttcccatagacacaggaaacattcagtcattatctcttcaactgatggttggatttcaaagcatttccctataggtttaatggaaaatacagattactaaagattgccactgagtggatatattaagctaagacagtgttgccttgtgatgtgcctgttggaggatgtggaggggaacaggcactgcttatcaagaggctcttctgcaccaggcgctgtggtttgcccttcatggagccatcacatcattagttttcatgtctctttgacagaggtatcaggaagagccacctgatactgtcatttttttttaagtcaaatgctttaaagccctttaacagataaggaaaggaagactcagagaggctcatttaccccctctatatggatccttactggttccaccttagctgatattaaaacctgttcctctagatagctaaaactatcatctgtttccctgatttgtatgtc

SEQ ID NO: 82646 - DNA, 1030 bp, Homo sapiens
ttgattgtgttattccattgatgcccagcatctgcggtttacagagagattttgagttgcaccatgccctggctaaggcattagtccagctgtaacacagtcttgcattaagtggcacttaacgggagtcatgcttctgttttcagcttgcccccgatgatgcctggcgttgcccacactgtaagcagctgcagcagggaagcattacgttaagcctctggactctgcctgatgtgcttattatacatctaaagagatttcggcaggtatggaaatcctttatcctcaggaacaaacaagttgtgacaagtttcttatgccccctgctgatgggctctgtgagggttctttggtatacctgtttgatccagtgagtcctgtctgtgtatgttatagacacacttttgcccctgtgtttagggtaatgttttgttctttcccaaggcaaaatttgattttagttcagattgcagatattttacttgacttgtaaatgtcgtgcctaaattttgttaagtgtactctgggatttaaaaagaactaagtagagatcctttctgggggaggtagaattctgtttctacctaatgtaatatgggtgttctgctcctgagaagctgttgtatggttggggagatgagtcataaataaatacaaagaaaatctgctttgaattgtattgctttgtgagtcagtttttccaaaaaggctgtctattccctgaggttaggattgtctagacagtctcattgtaagaggtaaatgggaagtaaacattagcggactccacaaggcctggctcttagtttgtatctgaaagatgagcaagcttttactaggtgaggtggaagcagggatctcccacacgggggcagagagagcagtgtgtgcaaagcccgacagtggagaaagcacagcctgcacgagaggctgggagcaggccaggtgggcaggcagtccagaggggtgggcagtggcgggagttgatggaagacgtgggtggatgctggttgtccaaggaaccctttgg

SEQ ID NO: 82647 - DNA, 1685 bp, Homo sapiens
ggcaaggagccagtgaacttgggacgggggtagctttggaggaaggaggaagaagggtgcagtctagagcaggcatggcatgttggtggagaggtggaaaggtgcaaggggcgactttgttcccaggggactaccgtccagtgtctgtttgggtgggtgaaaaattgggcaagaaattgggaaggtcataatgactatctgagagtgatcatcaaccttatgacactaaatttcttccaacctctttattattagtactgtattgggctttttaatttaagggtttttcagtttagttgaaatgtagttattaaatcagtggttatagtggtcttgctgaaaacttttttctgatggggaactatgatgaagattttcattaatcacctgaaattatgattttgggtaggacataatcacattaagtaaaatcatttgtttagaaaataatatgtggcttccctctccacttccctggttctatagggcattaaaatcttgtggaccaggtggcactgctcatgtgaaattagtagtcgagtgggacaaggagacaagagatttgtgagtatttttaaagttagtgtttatagaaacattgttttaattatcatttttatagcacacctttgatatgttaaatgagctgaaacacaaatctctcttctctttagctaagtatccaggtgtgttgttaaccctttatttaagcagtttattattcctttcctatacattctctcttcccaatcccagaaccttagaacatttgttcactgctgaaagagaagctgtatactcattagctactatataggttcaatttactttgatttttattacaggcccattaattctagaaagcaatgtcagatgcatgttcttagatgtaaaggacaggaatatgtggtttaaccagtacagttcatggccaaacccagaaaaatcaagttagttctggaaataactttgtatacagagaacttttcaagaacattttggaatatagaaaagttgggtcactacttttgttttcttacacattgattttttttttccttcggttatgagtttgtagtcacttcatgaagccataattgtatttttccttctgttttgcaagacattccctgatagatgcttttccccctaattgcagcttatttgtaaatactgaggatgagtatattcctgatgcagaaagtgttcgtctgcaaagggagcgtcatcatcagcctcaaacctgcactttatcccagtgtttccaactgtacaccaaagaggagcgggtaagagactgggcagcatttcttggttgctcagggcagtggggagtggggcatggcaaggtgatagtggagaaacaaatcacgccccagaagtcgccgcaggattttgcatatatgtaagtctgcacatgtaatgagcatcttaatgctcttgcttttaggactttaacaagaagttgtaagtttctagaaaaccgtgattaattgaagtactctggaaatgaaccttcatagttctttttaatggttaatgatcaagttttggtgattttctttctcaatttagaagttttaagatcttttccttagtaacttaaacagtgattcttgactttttggtactaagaacataagtgccaggacctatttaaatttaaattaattaaatttaaaaaa

SEQ ID NO: 82648 - DNA, 1084 bp, Homo sapiens
tctcctgatggctctgagtctagtaggtgtagtgtgtaatttaccttttatttcttataagtctggctctttaatcagggagaagaaactgctattgaatattgaagaacattccacatctttattttttaaaaatttgtttgattactggttgcatgacctcactaaattttcttggtgaatcatctcagcacacatgcccttctaaaactgtatctaaccttcactgaagtgcagttttaattttcagtttttaagataggtaaggctagtttaaaggaaataataatggatgctaaagaaattctctaacggctagatgagtaatctaagtaggatgtttctttttttgattgcagtttaatttacataatgacatttttaaaaaaaattttctctgttgggtaaatttcttcataacgagtgaataaaaataattttgaagagataaaatgagttgtttttattctgtttcaggaattcatttaaacaacaacctaaaccacttgaaatttggcttggattatcatagactgtcttctcctacacaaacagcagcaaagcaggggaaaatggattctcccacatcaagagcaggcagcgacaagattgtcctgttggtgtgtaaccgagcctgcactgggcaacaagggaaaaggtgagaaccagattattttccagtaagtacctagactgtaacagttcagtattttcaaacatgttaaaaagcatgggcaaaaagttcttacttttagtagttaatttttgattctgatatttagaaagaatacatgtacaagttgacctgatttggggggttggtcgggggagagtaaaattaggaatctggggttttttgttgttgttgttgttgtttgtttgtttgtttgttttttgatatggagtctcgctgtgttgcccaggctggagtgtagttgcgcgatctcggttcactgcaacctctgcctcccaggttcaagcgattctcttggctcagccttccgagtagctgggattataggcgccagccaccacacccagcggattttttatatttttagtagaaatgaggtttcaccatgtt

SEQ ID NO: 82649 - DNA, 1919 bp, Homo sapiens
cgcccacccctgcctctcaaagtgttgggattacaggcatgagcccctgtgcctggccaatattagtacttttaaagtggttggggattacttattagaggagattgggatgggggctttgagaattggaggggaactggagcatcctggggaaggggagctgcccggctgagtgctgtgcagagacgattgctggcagagtctgtgtgaggggatgagtccacgtgacccacatcctactgctgtgttctggctcctttagcaggtgcccgtcactgaagtatctgcacttgatgcatagcttgtaaaggaagtcaagatcatatgtgattctctagcttcatcttcaaccaagaattggtctttctagtctgtgaagttgtactttcttttttttttagccaccatcagagactgatatgatgcctgagggaccatctttccctgtctgtagcacttttgtacaagaactctttcaagcgcaatacaggtatgagaaaatcggatgtttccacttattttgtttacctgacatcgttctgggtgattttaatgtcaagcgtcttacctttttgttttgaagatcttctttgacgtgtcctcattgtcagaaacagagcaacacttttgatcctttcctttgcatttctttgccaattcctctgccccacacaaggtaagaatggatttagtaaaatgaagactgtattttcttatggtatccctttgcctctgtaggctcctattaggtcttcttacttatttagacaggtaatgggattaataatgggattgaatacagtcattgctacaaccttacaagaataaatgccctcctgagtttgcagggtgagcaggcacatgaggcaagcaggggctgtgtagtctggcccagttcgtcatccacacatagtatcggggttgggggacgggggctgctgagtgacttcaggattctctagagaccttactttacatttcttgtttcttcgttgctttattttgaacaatttctcaacatttccaggagttatgctgttctaaagaaaatacaaagcacagaatcaagtgtagatatatttttgtttgcttcatagaatgttcattttatgaagattgccttttccaaagatcttgatgattgtttgacagttctgcttagagccaagtgaaatttttccatttgggcttccgagtaacagtgtgggttagctttagttttttgttgatttcgtctcaggtttattttgcatcttctatattttagttgaaataagtgactaatgagaagatctgactttgatctgtacaggcctctctatgtcactgtagtgtatcaaggcaaatgttctcactgcatgaggattggtgtggccgtacctctgtctgggactgtcgccagacttcgggaagcagtgtctatggaaacaaagatccccactgatcaggtaataagtctgctaagaccagttacacatgagccacaaaagtattgctttctgttctcttagaattttttacagttctttgccaagtatggttggatagagatttaaaaccagttgcatttagagtttagggaaaaaaatcaaggccccaaagactaaaatgtatatagaaacttttcatgtttcatttaattgtgtatataattttaaaagaagctgtgactttacaccaagaccttcttgtagctttgttcataaggtataattacttaacccttcttaaatcattcctgtggatgtgtatgtgggcagtggagcgtcctcgcagtgtttgagatagtcaaagaggctttgaaaacttgagcagtgacgctagaaaaccccttcccattgtgatgataagagtggatatcttgctagtacaatgttctgtacgtaatagatgctcaatacgttttgttttctcattac

SEQ ID NO: 82650 - DNA, 1386 bp, Homo sapiens
tttccccagtggttaagatccagaggttggtttgggctttgggtttagagttactataaatggaaaactttcgtttaaagctccataggtctgtctcttgtttttaaacagcctgagatatcattgacatataaaaattgtgtatatttaaagtgtacaacttgatgctttttaaaccctcaaccatttgtaatgtttcatgacaggaatatataataatttattagatatttagatggcttttcagttttaactttaactctttcagattatcattcttcctgtatgatgaccaacttgcattgggactggacgtttgcttttttgtgttgattgtaagtcaaaatttccccccttcctccttaaaaaaagggtttgttttactatagttttgaattgtagattgtgttggaaaaatgagaaagagtccaaaaagaagatacatttgagttacttgagttagttgattgggtagttaaatacattttggtgacctgagctgactctaaacttggagtcagcaagtcttggccacttaagttgtgcggggaaggatggactattggtggaattaatctccaccagaagagcagcttgagcatttaaggtgaagaacaccccctttacattactgatgaaagacagatggagttccctaaagccagatctttgtctctggtgtgtttgctttctctagcatcctgggacacttgggcaggacatagttcttcacatgctgcaacttgatctttctacatcatctgcattcctccttatttctcaaataacatgccaattagataaacggcatttttgtttctgggccatatttcagtcataggaagaaatacaaattgcaacaaaacaaaaactgctaaacaaggagttatttaagagcagataaattccctgaagcctcaaggttggtgcagctgtagctcagtcgtgctttatgtctaactgagaattgacatttagaatgaagaacctgagccctgtatgatgctgagtcctatatggggacaaatcattttaaggtactttgttgaagaaggattatgggcaaaaatattttaaagcttttttaatcagctgaggttgaacaatagtggtaattggccgggcacggtggctcatgcctataatcccagcaccgtgggaggctgaggcaggcggctcacttgaggtcaggagtttgagaccagcctggccaacatggtgaaacccatctctacaaaaaatacaaaaattagctgggcatggtgatatgcgcctgtaatcccagctgcttgggaggctgaggcagaagaatcgcttgaactcgggaggcggaggtcgcagtgagctgagattgtgccactgcactccagcctgggggacaaagcg

SEQ ID NO: 82651 - DNA, 1053 bp, Homo sapiens
tatataaaacgaggaaattcctttcagtagttacctatttcaaaggctcttaaatcatattattaccttatttacagaaggattttaccactagcattgttaagaatgtgtggtaccccactgttgtaattaaaaaagaaatctttaagttgttaagtagaaaatagcatttcattgttttaatttgcatttctttggttagtagtgagggagaacagcttgatctattctttgaagttactatatgatagtaacattttgatactagggaattgccgtattttgatttcacactcttctctttgtttgctgtctgtatattcacacactcatccatttagcatccacataagacaggcagatgaccaaggcctgaactgactagaattggtaaagattgggccgggccaggccaggcctaggctgggaaggttctaaattgtactttgctaggagaagactggagccaggatgagctggaggtgtctgtgttggtttttaggagatctgattcttgtgtccaggattgaaagaatgggcggaggctgtgattgattggaggcctaagagtcagcctggcttgcctgtcaagtatccatagggttggctgtgtagagtgccacagcaggtctgtgacttgcaagcgtctcaggcagttaaaatttactgggagtactctgggtttatggcgatgtgaatgcataatttatagtgaaacttgctggatctgcttatgaataatctcccttagttactactaagtgatattgcagttataaaaatgcaatagcagaatagtgagtcaatgcaaggttatttccagaatattttggatctccttataaaatcggctgttcagttaaaaacattttaggtctcttataataaaatgtcagtgtattcaaaatcaagaggattttgcctcttgtgtgtgtatatataatctgtgtgtgtttatagaagaaatatatggatctttggcttaggggtagttcaaggccttatctcatttttcctctagtccttgcctttcccaccttattctgcctcctg

SEQ ID NO: 82652 - DNA, 1002 bp, Homo sapiens
tattgttcgaattcttatttctgctatgatatttcctttcattgctccctaccatcttcatgctagttttctcttgctttatcctatttctgggatcctgtacctcctacttcctcctgtacttttcttctttttttttttgagatagaatctcactctgtctcccaggctggagtgcagtggtgtgatcatggctcactgtagcctttatctcccaggctcaagtaatcttctcacctcagctctctggtagctgggaccacaggtgtgcgccaccatgcctggctaatttttaaatttttggtagaaaccaggtctctctttgttgcctgggctggtctcaaactcttggccacaagtgatctttctgccttggcctcccaaagtgttgggattacaggcatgagacaccatgcccgactattttgcagtttctaatctgctttttagttaagtaactagataaatagaatcggctctaaataagacttaactaaactgagttagagtctgagcatctgactaaattaagaaactttagtgtttttcctttttaatgtcaactttcttattttttattttatttatttatttatttatttgagatgcagccttgttctgttgtccaggctggtgtgcagtggcatgatctcggctcactgcatcctccacctcccaggttcaagtgattctcctgcttcagcctcatgagtagctggaattacaggcgggcaccaacacgcctggctgatttttgtatttttagtagagacagggtttcaccatgttggccaggctggtctcgaactcctgacctcaggtgatccatccacctcggcctcccagagtccgaggattacaggcgtgagctgccgcgcccagcctaatgtcaactttttgaacgaagtatgccatacatacagaaaaatatatatggcgttagtgtacagcttgatgtattatcctaaagtgataatttgtcacccagatcaagaaatagga

SEQ ID NO: 82653 - DNA, 1022 bp, Homo sapiens
tctgaaaataggatgagttgcctcacataatagtatttttcctatcatcacacaagcttaagcagagtcttgggtgatactgtaggggggcagtcacatgcttcatagtggattgggctggattcacttactttcttttctttgtctcttgctgctttcttctgacttttgagcttataaaaatgtatgttagaagcagtgttgacagtgtttggcagctttatgggtgtgtgaagagtggataaggaggaggagatgaaaataacgtagaggttttaaaacggtgtttggggatggcactcttgacgattggaaaaataaaatggaaagccattctggaggtgggtggataagtttcgttttggttgggtcatacagtatttgaacctaagaatcccaagaaaacttttattaaaagctatatttattgaatgttaccattttcaggtactgtgcaatgtgaatcatttaagtttttggtgacccatgtagaaaggaactgatctagtctaaacatggaactatctcttaaatcaagataacagctgtaatcatatagatgcttttcctgagttagttgttttatgtcttcctttgtgtgacttaaagtttttagtttgactctgctacttttgttctatttgtgcgtggcttgatggatttttcctgtccccatctatacactcgtcacaatgaggggctactaaataaggcagtgttctctgtttgtgtagtccccacagctgtttcctatagtaaagactctggaaaacaatgacctcatagtttccacaaaaaaaaaaaaaaaccttttatatttagtaggggaaaataaatcattcaaaattcagtaatttaaagttatgtcctctgttgcttcttccttcaaaaatattattgtttgctctgctaattaattgttcattggctgttcctcaaatgaccttttatgtttaacaaacaacatttttgcagtggagcacgtcgggatatcttgtctttcgtttgattgtgatctttct

SEQ ID NO: 82654 - DNA, 2392 bp, Homo sapiens
tagttaccttgaggttagaaaagcacttactatgtctttgtgcttttattatcttaaaactttaagttactaatgcttttctttgtaagtttttcaattagagttctttcttcctttttaaccacattgatttgagttttaggagcttgccaagtagatggtttttggttttggatgggctagatggttgttaaagttgggttttcatttcccaggatgaaatgagttgactagctcaaccttgatatgctgtaaaaaatgtctctagccattacctttatcctttctcttttcacacagattttttgtttgtttgtttcctactcttagagcactggttttcaacacgggcacttttgcctgtcctcaccccaccctgcccccaccccctgggacatttgtcgatgtctggaaccctacttggttgtcacagctgggatcagggtgctactggcatgtggtggtagattccagggatgctgctaaatgtcacacaatgtgcaggacagccccccttactaaagggttttcaccccaaagtgtcagtagtgctgaggctgagaaactgtttggaggaaagtttggagactcagcgcaagtttccttttacttccccagcctttaaaatggttaccttgttatctctcgcgctctctctttctctctctctccccccccccaacctctccctctctctttctccttctctgtctctgagtgtgtatatgtgtttgcagcagcactagggtaaaacttgggcttcactggcaggacccttgcatcactttcctagtaaaatagtgagagtaaataaatcactttgaatacataatatgccattttaaagggaatcagcttattgctttcataggagcatgggtgccccagattcttacaaatgctttctgagttttagagctcagagccgttttgcagcaagtaaaaagatggatggtcatctttcaagcaagaaagataaattttatggcagcagtttttaaattgtgctggcaaagaacagctagcacagagtgatctattgataaaagaattgtggggactccttccagatttgcagtgaaacaaatggtaattgatgaatagaattctctctcccatttttttttccttgaactttggtgccttgtggtgcttatttattagtgagaattctcaagtcacaaaaggaataaacttgtataagagactagtggtgaacaacctggcaatcagaggctcacacttgctgagtttcccagcctgcttttccatgcactcatgctgggggttctggtgctatgctgcaaacccatggtacacagtttttttcttgttagtgtcaagctctttagtatactgatacttcagtgttttccacaaagcacactgacttcagggtgtcccttggaaaaaatgaaattgtgtaggtcacatttagctttgtgacagagtataaaataaaaagtacatcccttcctggtcagttctctggtccatcaaatgccatcacttgagttttagcaaagctccacacctctgagggagaaagttgatagaatcatgaagttttagacttggaagcagacttggatgtggtgtgagtagttcctagcctttcaggatgtgggaactgagttcacccactagctagaggttgagggagcagaaccagaattctgacttccactgactgtgaactctgtgtacccctgcactgctggtgcacaaactgggtcctgggcctgggtggccttatcagtacaagcaatgaaacgacaggtctcaacataacacgtacatgggcagaggggacgtgctgaaacgtgtaacattttttcctctgagactgtggtgctgaattggagtgaaaataaggtcatctgcagctagcttcacgtttgtgccattgctcctcaggcttaggtgtttttggaagtctttcttaaaacacattcctttcagactgtttcaacacgtatatcaacacatgtggatctctctccagtaagctttgagctgatgtttaccacatcttaccaagtttggtaaaagtgaagtgtaagaattacaataaattttccatgaggactaattgaggaataaaaatacatgggataattatgaactccatattttggacctgaatcacatttgctgcacagttattgttagtttaggtaaaggggctgggaatacaggattaagtacaaaggttataggactaggttcatgccgtcagagaacttagctgcttatagagaagctgttttaagttgtactgatgaggaaagttcactgggagctgagagagaggtgagatcattgtgtatgaaagtgtaagtagaaagatttcatttattcatccttttatttgttgtcagcaattaagcat

SEQ ID NO: 82655 - DNA, 1919 bp, Homo sapiens
agtcgaccagtgattttaaggagattcattcattcattcatttattcactcactcactcactcaaacatgtatttattgagaacttactacatacgtgcccatactctgtgataataggcaatgggagtgacgttgcaatgaacaagactatccgccttcatggaacttgcatttttgtggggtgggagtgttgagcatgggttcaaatcctggttctgccacttactagcaatgtgacgtcgggtaagttaagcagcctctctgttcttacagtttcttcatctgggggacctactttgtaaggtggttgtgagctgcaaacaagttaatatattaaatcgaacactgtggaattacccatatttaaccgttttttatttacagattggcacttttatagggttcaacctgataagtaaaatacttccatatcatgtgtatttgctgctattatttttgttattaaagacttgaagaagttaacgagataatatcagatagtggtttgaagaaagaaaaacctgctgctgtgattgatgtgctgacaggctactttttatttttattttatttttagagacagggtcttgctctgttgcccaggctggagtgcagtgctcacatagcctcaaactcctgggctcaagcaatcctcccgcctcaccttccagagtatttaatagctgggactacagacacacaccaccatacctacctattttttatttttaaaacacttttgtagagacgggggttttgctgtgttgcccagactggtcttgaactcttgtcctcaagccactctccccgctttggcctcccaaagtgctgggattacaggggtgagctatacatccctgggggtatgtatggcccttggccaagccctcctttgctgtttgctggtggggctgcaagtgtagtgagagggtgagatttgagagccgagtggtgggctgggaccggatggtatgggaccatttaggatgcactaagaaattgggcggttactctaagcagaaggggaacatgatgtgagattgtgtaagggatactttcaggtgggacatgaatatggtattaaacagcatggaatcgggcggggcgcagtggctcatgcctgtaatcctagcactttgggaggccaaggcgggtggatcacctgaggtccgggggttcgagaccagcctgaccaacatggagaaaccccatctctactaaaaatacaaaattagacgggcgtggtggttcatgcctgttatcctggctactcaggaggctgaggcaggagaattgcttgaacctgggaggcggacgttgcagtgagccgagatcgtgccattgcactccagcctgggcaacaggaaactctatctgtaaaaacaaaacaaaacaaaaacagcgtgaagtcacacagggagaaggttaattcctttttttttttcctatcctaatcttgcccaggacgaagtctcagcttgatgttagcctgtttttaatacctcttgttcaccccccacccatttttttttttttttttaaacagaacaagcttcaagtctagaagcattggcaggtaacagtagctagaatttaataaggttatgtttttattgggtttccatttgtcttcaattcatggcaaaaggtactggtttcccattggtgctataaagcttctttataacaacatttaagtaaaaggagatgattttgttaaaatatgaaaaggtcatctagctgaggatctgctttgttaaggtcctgctttcttgctgacgaactacatggccagtgtgcatctctccccgtttaatactttttacttacatcttatgctgctcaatgctgtttttcttggaaaaaaatcgttgctgtttgatcttggcaatttgaatggaagtacttgactgagata

SEQ ID NO: 82656 - DNA, 1031 bp, Homo sapiens
gtgggctacacaggtaacagctcatttttgttctagggagaacagagtctgtggtgacaagggaacgggtgactgcctcgggagtggccaccctcaactgcagagcacagctcaaagaacttccccgtttgttgctgtcattcaaggggttaaaaaataaccagttaggccgggtgcggtggctcacacttgtaatcaccacactttggaaggtcgaagtgggcggatcgtttgagcctaggagttcgagaccagcctggccaacacggtgaaaccccaactctacaaaaaatgcaaaagttagccaggtgtggtggcacaattactaaggagaccgaggcaggaagattgcttacgtccaggaggttgaggccacagtgactatggtcgcaccactacacttcagcttggacaacagagcaagcaagactgtctcaaacaaacaaacaacaaaagaaaaaacgataaccagttaaatggtttaagtttaaaagataagcttagaaatccacgtcagtgaaatctttaggtctccactgaaactcttcttaccactcttatctataacttaaataggacctaatgtgacaatgccgcctgttgtccagcaagggagcctgtggaattcctgaaggccattttcttcccatctaaaagcaggaggcccctcgtcaggtggtgttcgaatgaacaggaatgtttttatctttacttcaggtaaaatttacctacctgaagtgagtctcccttgttctcatgatacaccaagaagtaggggaagagataattttaaaggtaccccctgactaggagtgaggagagacagaggaactttgtttcaagtggcaactatccatcatttactttcctcaagtctctaggcatttccagccataaaggttttaaaccgttgttctcttgccttgagacaggaggcacagtagaacctcttgtaagcaggggaagagcctgtcttactttgcagtaatgacttactgggcctgtttctagtgtggcttattttatttatt

SEQ ID NO: 82657 - DNA, 1035 bp, Homo sapiens
ctttattgttttaatttaatttgcatttatttgagtacaggttttttgttttttttttgagacggggtctttctctgttgcccaggctggagtgcagtggtgtgatcttggctaactgcagtctccaccttccaggctcaagtgatcctcctgccttagcttcctgggtagctgggactacaggtgcgcatgaccacactcagctaatttttactgtttgtagagactggatcttgccatgttaaccaggctggtcttgaactcctggcttcaagggatcctcctgcctcaatctccgaaagtgctgggattacaggcatgaaccaccacgatgcccagccccattttcatacttgatgagttgccttttcatgtattttatctattcccaattgaggcagtagggatcatttaaaataaatattctctattctggtcttttctaggacatagctgtgatttctgccaagctaacaggtatgcagaacagcttaatgatgcttgttgatacaccagactactcagaaaagtgtgtgcacttggaggcactgaagaacaggctggaggccctagccagtccacagattgtagcggcattcacctctcaggctgtaggtgagtgctagctgcttctcatctctgtgtatatctctctataaagataaggccttgtaagtcttcagtttttagaatgtcttaatggtgattgaattacatagattagaaggaactctgtaattttttttttttttttttttgagacggagtctttctctgtcaccgaggctggagtgtagtggcgcaatcttggcttactgcaacctccacctcctgggttcaagtgattctcctgcctcagcctcccgagtagctgggattacaggcgtgtgccaccacacccaggtaatttttgtattttgaatagaaacgggctttcaccatgttggccgggctggtctcaaactcctgacctcaggtgatcccctcgcctcggcctcccaaagtgctgggattaacagacatgagccaccgcgc

SEQ ID NO: 82658 - DNA, 1050 bp, Homo sapiens
ccactgcgctccactgttgcccaggctgtcctagaactcctggcctcaagcgattctcccgcgtcagcttcctaaagagctgggattacaggcgcgagccaccgcgtaaatgcgctaatgtatgtcagggctttatagtaagcatatagtttagtcctcggcaaatgttagcagacatgggatatttgtcggtgccgggagctctcagtccggggcgttttcccacacccacctctgctcagcgctccggacgcctgcagtcactatggtaacggccaacgacttccggaagaagaacggcgggcggcgagggtcattcccagccgcaaactgagtgcgctgagcggggaagcgcaaaggggcaagttacccgtcctggcgtttctggggttcgcctcggaggctagcctcggtgctctcgcaggctcgctcgcttctgcatccccgttgccgcccggagccaactcttaagttctggacgccaggcctgaggcagttccgccatggacttctccaagttcctggcagacgacttcgacgtgaaggagtggatcaatgcggccttcagggccggctccaaggaggcggcgtccgggaaggcggatggccacgcagccaccctggtgatgaagctgcagctgttcatccaagaggtgaaccacgccgtggagggtgagccgctcggggccctggccgcgggaccctcccctgctctcggctgggcagaggtcaccgaacttgcgtgaggcactcaggtgggcggggcacgcatggacagcaaataccctcggcaaaagagcaagccccgaactcctgatcacgtcagcgggagtctcagctgggtgccgggctgtcttgaacacttgctaattttgggtgttgtttttcctcctctggctgggctataagtttcctttttcttttctttctttctctttgttttttcttttgaaacagggtctctctacagtggctcgatcatagctcactgcagcctcgaactcctgcactcaagcgatcctctcgcctctcgagtcgctaggactacag

SEQ ID NO: 82659 - DNA, 2612 bp, Homo sapiens
atatgacctgcagtctctacttcttacggtagtcctatgggcaatgttctgctactacctctgttttataagttaacccaaggctcagaaattaaatattttactcaaggtcacagagctagtgagaagcagttagaattcaacccaagatgtgccctggctgttgatgctgcgtctcagatgccggttattgaccacacaactcccgatccattctgtgtgtggaaggaaaggcctcttagatccttttatcaattagtgggagtctgtctgcttgggctcccataggtgcctcggggtaccacgtttaagagggccatttcctcttggaggggtgttggggaggtccagctccccctcacctgatctccatcctagaagctgtggttaggaatgagttacatgttggttttcttcccctgatagtcaatgagagtgaagctgcagccggcatccagctccaagcttcctgcattcagtcctttgatgcctccagctgtgatatctcagatgctgctgcttgacaatccacacaaagtatgttccagtgtctgtggtagcagggagatgggggcccctgaactgtaaggggaggtaactttgtgggtagagagaggcacattgaggccttgctctaaagtctctggtttgctgggcacagtggttcacccctgtaatcccagcactttgggaggctgaggcaggtggaccacctgaggtcaggagtttgagaccagcctggccaacatggtgaaaccccatctctactaaaaatacaaaaattagctggttgtgggggcacgcacctttagtcctagctgctcaggaggctgaggcaggagaattgcttgaacccaggaggtggaggttgcagtgagccgagatcgcactactgcactccagcctgggcaacagagcaagactccatctcaaaaaaaaataaagtcggccaggtgcagtggctcacgcctgtaatcccagcactttgggaggctgaggcagatggatcacgagatcaagcgatcgagaccatcctggccaacatggtgaaaccccatctctactaaaaatacaaaaattagctgggcatggtggcgtgcgcctgtagtctcagctactcgggagagtgaggcaggagaattgcttgaacccaagaggcggaggttgcagtgagccaagatcgcaccactgcactccagcctggtgacagagcgagactctatcaaatagatagatagatagacagacagacagatagatgaaagagagagagagggagggaaggaggaaaggaaggaaggagaagagaaaaagaaaagaaagtcagtctctggtttggttgggtgttaggggtatatgtggaatatccctcgctggagtctgtctttggggctcactgaaggaagatcagatggattgtcatagctggggaccaagggagggacacatgaactctccctaatcctctggagtcctctgaaaggacaaggtctgtcttccttagctggtctctgaattgcagcccatctcaggatttcaggactgcagaattatcgaagggttcccaggatatgtgcctgtttccccttgtttgtagtcccaaagagagtatcccaggtattttgtgtcagaattgtttgaaacactcacttgacttaacattgacccctgttcctgggttgctctccactgatttgacatcttctgtctcttctgtcccaggaacctatccgcttacggtacaagctgacattcaaccaaggtggacagcctttcagcgaagtaggagaagtgaaagacttcccagacctggctgtcttgggcgcagcctaacttttcacaagatggacccttcatttcaagcttaggctggcgttacttttgctgtctagtcaggactaatcacggtgtttcagtgcggagtgccaagagtcctatcctgacgtcaggctctgggtgtcaacctctgacttattctgcagatgctctgtgtgtgtgtgtgtgtgtgtgtgtgtgtgtgtgtgtgtgtgtgtgttcggggagagggtggtagcacagggcttgggatatcggcagtgtgggaaatgcgaagcatttctcatcatcatcatctctgctacagtcatgtttctgcatgtcagcgagcgacactgtccctgcctcaggttggaggttttatcagccaaagtgtttttttcatgtatcgttcgttccattcatccactctgtgccttgtcagcctttgaaaggcttggttgctcccaggctgctgttctcagggaccttaaaagggacctggttagtcttggggcagagagtatctacttgggcactctcttccaagaaagaccttgtctccattttcattagacaatgcttcttgtgtgtgttctggaagatcttctaaatggaatgcttgttgcactgttcccaggcgagtggctgccatgagacctgaggaccacacttgggggaccaatcatgtccttcaccactgtgccttagaatcgcccctggacagagttcctgggcagaggggaaagcagctcccaggccttactcaggcctcaggtccatgggttgggcagccagtctgggcccttctcaggatc

SEQ ID NO: 82660 - DNA, 1039 bp, Homo sapiens
gagtttgagaccagcgcggccaacgtggtgaaaccctgtctctaataaaaatacaaaaattagtcggacatggtggcaggtgcctgtaatcccagctactcgggaggctgagtcaggagaatcgcttgagcctgggaggcagaggttgcagtgagccgagactgttcgattgcactccagcctgggcaacagagcgagatactgtatcaaaaaaaaaaaaaaaaaaggcatataacatctaactctgtgtgtgtgtgtgtgttattttttccttgttctttaataagcctaacccagattccaggaaatcgctacaatttttgctagtctttgatattttttatttctttgtaggaattatgtttcgcagaaaagtgtccccaaggaagtgccaccaggtactaagtcctctccaggttggtcctgggaggctggcccgttggctccttccccatcttcacagaatacacctctggctcaagtgtttgtccctttggagtctgttaagcccagtaagtacaatttcactccccacctttttttttttttccctgggaatctattagactcccagctttttccactccagtttgatagaggtggcccttaaatttggttgataaatgggagagattttgcatgagggcagaaagtaagaggttgtggccaggtatggtgactcacgcctgtaatcccagcactttgggaggctgaggtgggaggatcacttgaggccaggagtttgagaccagcctgggcgacatagccttgtctctatttgggggggaagaaaaaaattgggaggccaaggcaggtgatcacttgaggccaggagttccagaccagcctggccaacataacgaagccctctctctacaaaaaatacaaacattagctggacatggtggtgcatgcctgtaatcccagctacttgggaggctgaggcaggagaactgcttgaatccaggaggtggaggttgcagtgagccaagatcatgccaccacactctagcctgggtgacaaagtgagactccgtct

SEQ ID NO: 82661 - DNA, 1083 bp, Homo sapiens
tgggtttaagcaattctcccacctcagcctcccgaatagctgggattacaggcacctgccacggctgattttttgtatttttagtagaaactgggtttcaccattttgaccaggatagtctcgaactcctgacctcaggtgatccacccgcctcggcctcccaaaatgctgggattataggcatgagccactgcacagagccagcagcttcagattctgagttaaagttaaaagtttgttattgaaagggccttaatttgagtgcttactgctggccattactctggacagtacaggtgtagaaggtgaacagatttgcttccttctgcattgagaactactaacatgttaggactcaggttaactgactaggcctgatagggtccgatgacacaacctggaggcaggaggtgtggataaactgaacatagtctagccatatgaaggctgttttatggaaaagcttagaaaagactgagattgttggttgccaaaccagggggttctgagtcttccctcattcttcagcggaaattctccaggcaaatgacctcctcacccaaggagttctgctgtacaaacaggtgatggagggccgggtcacctttggaaacagagtgaccagctcattgggagacatccctgtctccagaggtatgtttgaaagcttctccttgccttctctgccttggggcagcctgtaattcccagaaaagaaatgggtcctaaacatattctgggttaaggaatagaaatgagagaactcgccctttgttccccttcctgtgaaagtggatatgttgccacacccagccataggaattgtcatgagctggttgccgggctggaccccagctttgactacacacaaaagcagatggctaagctgtgcctgcgtttgaattctcataaatgcttgcatacaggagctagagacaaaagaaatgatcttccttagtggttcctagtgccaggtcagctgtatcagaatcacctggagcactggttgaaatgcggtccctggcttggaccttctgaatcaagactgcttggagctgggcctggaggtgtgcgtctttcaag

SEQ ID NO: 82662 - DNA, 1157 bp, Homo sapiens
gcacaggaggagagccagcctccacgtaacttctttatttacctgtccttccacttcacaagattagtagaaatgaactactgtctttccaaattcctaagagaaagcctcccgagtagctgggattacaggcacccactaacttttgtatttttagtagagacagggtttcaccatgttggccaggctggtcttgaactcctgacttcaggtgatcagcccaccttggtctcctaaagtgctgggattacagacgtgagccaccctgcccggtcagattattttattttcagaaatcatacacttgtagcctgtagtctttttctgaaactctgtcatgttacttcaaaactgcagtctctaagtcaggaccattgggaggccttctgaagccccagactctgccgtctgcctgatcgaaggctcctggggccctggaggggggcgttatggggtgcctgggcgtgtgtcatgaaccaagctctgctctttcaggtcgtgtatgagaggtgtgaaaagctgcggcccacgctgttccggttggcgagtgacaccactgatgacgatgatgcactcggtaagttttctttccttgggtgtagctagcagcccaggtgcaagacagactcggtccctcctgtcacactgctgtgccaggaacaagacagagtggactttcggttccgtggagcttgggcttggggagggtgtggcctgagttgcctcagaactgacttccagcaggatccaggcttcagtaagaaatcagcagcaggtctaaagcctgaaaagaagtggaaattgaccatggagattggggtgtgagaggtagaagaaagatcccactggaggcttcaggaaaagctgaccaatcgcaggggccagagaaacagctgtgggtggtgtctcaaggggatcacgggcttttgtaccttcaggggccaggtaggtcaactaagagggccaggccgatgggaaatggaaggtacatctgtaaggaagtggagaattgtccacagttactaaaaaagaattttaactctttattgtggaaaatctcgaaacatgagagaggggaatagtaaaacctatatattcttcactcatctttaataattaccagctcatagctgatttttttaatcttacttcatctg

SEQ ID NO: 82663 - DNA, 1889 bp, Homo sapiens
acgcctgtaatcccagcattttgggaggccgaggtgggtggatcacgaggtcaagagattgagaccatcctggccaacatggtgaaaccctgtctctactaaaaacacaaaaattagctgggcatggtggcacgcgcctatagtcccagctacttgggaggctggggcaggagaattgcttgaacccgggaggcagaggttgcagtgagtcgagattgcgccactgcactccagcctggcaacagagcaagaccccgtctcaaaaaaaaaaaaaaaacaacagaaaagaaaaccagtggtgtattgggatagtcagagtgcctgcatcgtagtgtccttggaccatttggtgagatggtgcatgtaaaatgtgtgcactgttgttagtgttaactcttctgttgctgctgcttctgctctaggcctgagggagttgtggtctcacctactcttcctgttcactctctgcagcttctgacaaggcttctaaagagcaaccaccccgaggaccttcaggctgcaaaccggttaatcaagaatttggtcaaggaggtgggcattcttccagttggttcagtagaagtagcatttgacagaggctgaaggacagtgcatatgagcctatgcttgaggggtagaggaacggttgcctgggagaaagagtggctcctagccctgaactctggggaacagccatagtctccctcaagggcagcaaggtggtgattggaaccagaaatcccgctgccgtacttctcagctgctttcatccatgctgctcaaagcatttcctagacaccagcttgggtcccagcaacaggtattggtatggacaaagtccaggtttaggaatctgcttttcagaggacttgaggctggtggcacaaaggcagaggtcatggtcaccagtccccaaactgcattttcctccccaggaactctgggcttttgagtattttttcacccactgtgtgagttctcccatgcacttaacatcctggtgatgcccctgagcgagctctctcaatagtgactctttcccatcccttgttcaggcttcagccagggtttctgctccctcactcccatcctcctctttttcccaaaaggaacaagaaaaatcggagaaggtgtccaagagggtcagtgcggtggaggaagtgcgaagccatgtgaaggtgctgcaggagatgctgagcatgtaccgcaggccagggcaggccccgcccgaccaggaggccctgcaggtaatacaggtgtaacacagggggctgcacatgtttactaaagtgggtttgaaatgctttcacctgtttgcacccatgaagccatctcagagtcaagacggtaaacatatctgacacctccccaaatgtcgttgtgctgctttgtcctccctttgtctgtcccttgctccccagtccccaggcagctgctaatttgctttctgttctgattggctgacaactcccagactcttgtataaatggaatgatgcagtacataaccctctatttttgcctggtttctggatctcactcgagatccattcacgttgctgtgtgtagcagtagcttgtttcttattgccgggtactgtcccgtcacctggatgtaccacagcatgtacctgttgatgggccttgcgttgtttccagctttgggtgattgtgaatcatgctactgtaaacaattttgtacgggattttgtgtgaacatcgattttcatttcttatgggtaaatgtctgggattactaggtcatatgctaagtatatatttaacttgttaggaaacaaagtggctaagctatcttcaagggtgattgcaccattttacagtcctaacagcagcatatgcaagttctagctcctccacatcttgagatctt

SEQ ID NO: 82664 - DNA, 1443 bp, Homo sapiens
ccatgcctggctaattttttgtatttttttagtagagatggggcttcaccatgttggccaggctggtctcgaactcctgacctcaggtgatccacctgccctgacctcccaaagtgctgggattacaggcgtgagccactgtgcctggcccatccagatgtttaatctgtgtggtgtcgcatatttggccagtttgaacccagagtttgatcgcactttctgctctagcatttcctaggtatttatcacagccatacagggcctgtgctgctgtggctactcatgggactgggctgggactggcagcttggagtttgggggctgggggttggctgaggggagggcagtgtgccctgggcaggaggaggaccttgggtgctgtaggtgcaaccagggtgggtgcgaggtggccctctccagggcccccgcgtggcctgtttgtcaggcacgctccacctctgcttttggacaccagcccctggaagaaaagtgattttactgagcatgctcagccactcgggttagtttctttttgcccgcccagagtctaggtctttttgtttccctgtagccccacacatgcgccctggctactggcccacaagatccagtctccgcaagagaaggaagctctttatgccttaacggtgagtttggcttgccttgtagcctaacctttcctgtccttgtgctatagagagccgagaggcgctttgcttccacacagatccttttcactggagaagggaggtcccctgagaggtttaccttcacagcaggttggaggagggagatctgggccagggtccccacccttcttcctcctgtttctcgtctgtttcttcagggcagcattgagtctactgtgggagaaggaaaggaaggttttatttcatttgcccttcttagaccagggctggcaagttcatgtgccttttctagagagggcagttctagcacagggcccactagctgttggcaggtatgagtatgggctcagggttgctagtttaggtctttgtatatgtttgagtgtttagatgttggtgactaatttgcagtgttgaaagccacagtatggacgagaggaggggtctgcaggctcagcttgcctcttgagtgccagtgggtgacatccggctggtcttgggcactggataccagatctctgcctctggggaggggttggttctttagccactttctcctctcaaagggtctccttaaaaggtggggtgacctcagggtttgacatacctcactaagctatttcctgggcataaacctcaggcagttatagcaagattgaacaggggacatttttttcttgatctgaaaacgtcctcttcatcaaaacttcagtgtcctcataggcttgaggcagggttagccttggttccagcgcagtctccagcaagtgattaccagcctggaggggagcct

SEQ ID NO: 82665 - DNA, 1060 bp, Homo sapiens
ccccgagctggcttctattattaaccccactacggaagcggggaccttgaggcttaaggagacgcagtcgtgcaagacatgcagtctgtttggggctgagaaagatctctatctggctaccgcgtcaaaaagaaattttttaccttttgtgtttactttggccagacttttttttttaaacacacacacacgtgtgtgtgtgtgtgcgtatatatatatatgtgtgttttttttttcctttaagagacggggtctcattatgttaccctggttgggctcaaaccctttggccagaattcttctgcatgtctcctgtaagcttcacagtcatcttaggggttattattatctccgttttaccaatgagggattgaggttcaaaggggataaagaatattccccttgtacccagctctgctaggtgccaggaacactgagatgcataacacagggtccttgctcaccaaaacattttttagtgggtacaagccggcagtcacatcaccttactaacgggattggcgaggaggaggagggcgttcgtttcacctgtggtggtaggagttggtttacctgggggtcgtcacagccgaccgcattccaggcagaagaaactgcgtgtgcaaaagctggggacaagagaatgtggagcactccgggaacaagtaggtcagtccgctggagtgcaagcctaaagctcaggaatccgggaaaggggctgcacggctaattggggcgagatcttcaagagccttgtgtgctgcagaaaggagtttatgttttatccgagggcggggttgctgtttgggagttttcagccggagaatctgatcaaggaagcctgttaaaggcgtcacttgcagccatatggtgctaaattgggcggagagggtgagacttcaggcagggagagcggctaaaaagctcttttggtggtggttgggggccgcaggaggactaaggcagtggggagagggagaagcaatgagcaggcgtagtcagcagcctcggtgccttggaatgcagacaggggacaaggagaaatctaggctagatcgcg

SEQ ID NO: 82666 - DNA, 1047 bp, Homo sapiens
aaaccctgtttctacaaaaaatgcaaagattagtggtgtgtagtgatgcacacctgtaatcccagctactggcgtggctgaggtgggaggatcacctgagcccagggaggtggaggctgcagtgagccaggatagtgccactgtactccagccagggtgacagagcaagactgtctcaaaaaaaaaaaaaaaaaaaagacagtatccgttctagaaaattacatttttatagccaaatttggaatcccattcatactgcctttatcctactttatttttgccttcatagtactttttactatatgaaattatatatttgtacatatttactctcttactcaaaagaatatgagattatggcaggaagtctgtctttttgtataaccatagcacctggcacgttgccagatacatagtaagggtcaagatctcatgatgaaaaagtgtttgaggactatgttagtaagatcagtttcttcagaaatggcactcatcagctggtctaactgccagactcttaacagttaccagtatcacttccatttaagcggggaagtctttcctcttttgcaagatttgccagtataattagcagtccagtctgttgcttgtaatttgcattgaatccagctgtctgggagaaactacctttgacaaagcttggaagtgaaggctggggacagatgactgacatgtgtttagtggggactaaaattagaagttgttggctgggtgtggtggcttactcctgtagtcccagcactttgggaggccaatgggggaggattgcttgagcacaggcgtttaagaccagcctgggcaacatggtgaaacccccccatctttacaaaaaaatacagaaattagctgagcattgtggtgagcacttgtggtcccagctacttgagaggctgaggtgggaggatagctggagcccaggaagtcgaggcagcagtgagctgtgtctgtgtcactgtactccatccctggtgacagagtgagattctgtctcaaaaaatataaatgtcagccaggcgtggtggctca

SEQ ID NO: 82667 - DNA, 1051 bp, Homo sapiens
gggtggtggtgcgcctgtaatcccagctacttgggagggtgaggcacgagaattgcctgaacctgggaggcagaggttgcagtgagccaagatcgcaccgttgtattccagcctgggtgatagagtgagactctatctcaaaaaaaaaaaaaaaaaagggcggtggttggaggagaaacaggctcttaggacccatccttttccagggaaataacacaagcactgatcctcagaacacaggcagcagtgtgggggctggcctgggaataatttctgcagactaaggctgagcttcagttctttaggctgtttaaggtagtaaggcaatatttgctctttttgttcttagcaaggacctcctgtagctgagatgatgttggccttgggaccaaaggaagtacgggaacggatccagaaggtggtttccagctagggagaggatgtttcgggcagtggagatcgccctaagaacctgtgagcttagaaacagctttcagagaccagaaggaggcctggggcccgtcgggaagtttgctgaaggaactaagagtggaaacaatctctgactgcacacaagtgcatttgtgatccaccacaggcacgtttttgtcaattggctggggaagcccaacccatctaacctcctggactctggaaaggcattctccgggtctggtttctcacacattacacagcagaggtttggagttagttcacagaaaagttaacatcccggaacagtgcagaaggcttgggtttcagtttgctagggcccccataacaaaatgccacagaaccaggtggtttaaacaacagagatttattttctcacatttggaggctagaagttcaagatcaaggtgtcagcaggcctggtttttcctagaggcctcttttgttggcttgcagacagctgtcttctcactgtgtccttgtgcggtcttccctccatgcacacacatctctaagtttcattatgtgcccaacgttcctcttctaagaacaccagttggactggattttaactttaaccagcctcatttaagttaat

SEQ ID NO: 82668 - DNA, 4645 bp, Homo sapiens
agtacttactgaacaattattcaatgctagccaccgtactaaatgccccgcattggtctcttaatccttgaaacaggtctgtacagaaggacttactctaataaatcttctacagttctagaaactgaggttcagaggttgtaaatctcccaagttcacaaagctaataggtggtggaggcagtattcactttttggtctgttaccaaagagctgtgtagtatccatacatttttctgtccttccttcctttcactgtccaccttctaccttttcccaaggtctcccgcctgccatgcagaaagtcatgtataagggactcgtccccgaggataaaacattgagagaaataaaagtgaccagtggggccaagatcatggtggttggctccaccatcaatgatgttttagcagtaaacacacccaaagatgctgcgcagcaggatgcaaaggccgaagagaacaagaaggagcctctctgcaggcagaaagtgagtccatcttgtgcttcttggtcttgagaaatttgaggctttgtcctcttgagccgtggctggttatattctccctagaataagctcctttttggacagggcccatgatggaaatttatggcagcagttgggtgccgcagagtggaggtgacaactacctgagatttgcaactttgtctcatctggcgggtcagtgtgtctcaagtctacctactttaggataagaccttggtaaagggaggcttcagaccatgtgttgaaaggaatcagacgtgggtttctctctcttatttagtgccagagaaaactaccagtactagaagtaagccctcattttgtacaagtgcttacatttggctttttggtttgtggctttccccaagtcaacaagcctggctaggcatggaaatcaacaactctcggaggttcccctaaagctgaccgtttcaggaagctaaatgaagctgagtaggaagacaactacactgatggatttgtttatttatttttttgtcctgatctgtgaaataggagcttggttttttacgttctctgttcttttggctgcaagagatcctgccttgtcttgtgctcatcatagccattaacattctttcacgtaacgaggaaaagtgagattattttactatggaaggaacaggttgtaagaatcattacttgttatctttttacctggcaaattatactgattgctgtgtagcctcctgatcgttcttcctagtgttccaaggaagacaggtattctcaactgtgtctgaagtagagtagataaacttcaatcaacatcatttagtgaccatagacactaagatatatgaccaacagtaagaaaaggacacagtttgtgttacagatccataatcccccatgtgtgcttccaaaaccccaaaggagtataaaaacgagaagtgtttttataaatttaacagcaaaacctgaccagaattagtgtgaattttcctctttggtgacaaggtactgccccagaccccacagagaagattgttatgtatttgaaagcaatattatctttataaaaattccaaaaccctgaaagttcaaaactctagggtttcagataaggggttataaacctatattaattatctaaaaggtgttgatttggagacttcacccccacatatggggtctcagtgtcttgaaaccgattgagtttcttctcatattcctgtttttctttgccacatgtatgaaatagtgaaatgtgagcacgtcagataggagtggtcgcaatggtcacacccttggagcataacatgcctcctaaatacaggtttttagttactaatggtagcttaacaggcttagaactgttctccacagtacaggaaatcttgttcaaaaggtacttgaaaggtgtgactcgaattgtacttccagcccatgctgctgtgtttcattgaggccaattatgatgcatcacatgacctaatgagagggatatagtcccttgcctttttaccagcttattaaggggtctgggggtgatgtctggagtgactttttgctagcagtctggcagtgctgagtttattcctcccagagggattccaccatgccagtgaggatttgggctggcttgtggctgcctagtgcttacatttgattaaattgttaccttctatccattcattgtcccctagttccagccttccaagcagtggctatgcctataaggccacagatggagaagaaagaagactcaggcatttgggccaggcaggagaactgtttaaggggccctgaacttagaatccttgaagagctgcctcagagttcttggggcaggtggtaggggtggagtttagaggcttcttaatgtcaggttatagagtaataagcatttctttctgaaaggtggctcttccaggttcctgtttagctggagttaagggtagggcagtggggaaaacttcggcgatgggctgggtctccatttgttgaagaactgctcctcctaggcagttagacggattaccagcatcttatagtgttctctggaagtttaagttgaaaaaggtgggtgccattttttgtctgctaggagagcaacaccctttgtcgccctctttagtttgatggtttaatcatttcagtggtgatttttttttttttttttgaggggaggagggcaatctggaaatcccgtttgctgtagaactttgatatctaatatggtagctatccacatgtggctggttaaaatgaaattaagaattcagttcctcagtcatagtagctgcatttcaagtgtgtaatagtcacagcagtaggtagtggctagcacaggtacgaacatattcgccctcccagaaagttctgctggacagcactgtgctatagtttcaaaggatccatagtctgtcgtcattaaaagcttttgagccaaaacactaaggctttcttcatcctctctttcaagggaatagtaacacgacgaaatgtagtcagctgtttcatttcattctctcttctgacttatagcaacacaggaaagtgttggataaaggaaaacctgaagatgtgatgccatctgttaagggggcccaggtaaggcggatttctttgtgagcattctgaaaatgaggcagccccaccgtctgacttgaggttcctccaatcctgtcccttctcttttttccctgtttttttttttttgagacagagtcttgctctgtcacccaggctggggtgtgccaccacacctggctaatttttgtatttttagtagagacggggttttaccatgttgcccaggctagtctccaactcctgacctcaggtgatctgaccgctttggcctcccagtgtgctgggattacaggcgtgagccaccgcgcttggcccccttctctttttttctgactgtccctccatctcttaccattctctcgtgccttcaggagcgcctgccaacggtaccgctgtccggcatgtacaataaatctggaggaaaagtgagactcacctttaaactagaacaagaccagctgtggattggcactaaaggtatgttcttcctcgcctccttgctggcccactgcctgcctctggcacccagcagcactcacattttagagtgcgatttcacccctccttctgaaacctctctctccactgtgctttgcttgcttctggcttttaaatttgcttttagatgctcgccttttgtttggaccgttttccctcattgttttcagtctgatcttagggctgatccaccaaacagtggctcttcagttgcacacagatttgggggtcccaaacacgtggcccaagggccaaatctggtccacagaaaaatgttttgtgggatgacacacaatctgtaaaaattgggagatttcactaatctgattttttttttttttttggcttctcttgaaaactcaaatgatctggccctttggggcctgcattctcacatggcatcgatccactagagccgagtggtggtttccagtgggccatactacagtcttcatggtcccatttatcttagaagtagccagctttgttcatttgtcacctgcctggcccctgtaggtcagagtttgaccctatagtaggtgaagttttcctaaccgctgccgaggaatctgcctctccctccccgcctggttgccctctgcctgccccacccccgcctgtgcacggtgtctggatcagccttgctgtttgctgggaagtgtctctgactgtcctccctctcccttcccccagatggttacaaagtcttgttagttacactgcagaactgtctgtccctttctttgccacactgttgtgccagttaaagttcccaagcatctttaaacttggtctgttcaaagcgagttaccctgtttcactgccccatctgtgttttcttctgtcctgtccatcttacctactgctttttatcctgggtacccgtgctcaaggacctttggctgtttaaggacacattcaaatgcctaaccatagcgttcagtgttctcaacactgggccttagtttaaattttggttccagcttctggcccgtttgccctgtggtcccctgtgtattttagccgcatctctctgtgaagctcccagtgtgctttgcacagctccttgtctttgctcatg

SEQ ID NO: 82669 - DNA, 1019 bp, Homo sapiens
ggcagagaagtctggatgggaactaagtctgtaagtgctcattggttccttggggaatatttctgtgtcaggaagttgtatagggaacacatcataactgcaggaactgacagaacaagaacttcctgaccctgtattggaagttttctttttgctagtaggagcagccgccttcctgctttggcctaaagggagagctgtagaagaagctcaatatgttggggcttctgagcccttgaaagcctccttactcaccagtcttgttgaggagcatggccatggactactcatgttttctagggttgaacaaggttaagattttcattcccacccatagcactgtacctctggagcccaaggggcaggcagtcttgtcacttgcccagtcctgttacctaagtgtcataagcactcataagaggacagcttgttctgggagttggctgctagccactggcttcgtctttctgctggcaagaagaagcggctatggaatgaccatcccagcagcgagttggcctcttcgtggggcgctttgctgagtaagtgacccttaagggctgctactcttgactaaactctgctagcttgtgtaggaggaggcagttctaacagcctcaaaagaatgagaacaagctccaggcaggaaaccggaagccgctggaggagagcatgtaccctgctcgtaggaaagttgaatctggctgaaggtctgatgtagtgatcaggagtgtgggtccagaattgcccaatttttggagttttcaagagaagccagaaatctgttgtatatttttgtgaaatctccagacatttcaggatgaaaggtgttttaaaagtttccatcttaaagacagctgctgcccaggtcctgctttagggccgactgttgtagagccactagaagtccaaacctaaataaacatcttcaggtcccttctccccagcccccatttttcagatactgaggcccacagaactgaagtaaaatgtcttaagtccccagctagaccagaacg

SEQ ID NO: 82670 - DNA, 2356 bp, Homo sapiens
ctccagaagatgcacttttttaagaccctgatgttttcttcatctacttagaacttaatccatggcctctattcctagttctgtttattttacacccccccacacacaccttccatcagtttaaaggggatatgttttctcttacctcttttagaaaagtctctcttgcctccctcttgtcgtgtgttgtttctagaccaggaaaataaatataaagaggaggaatggcttgtggattttcattataagttttatcttgcttataaaacaaaacttgcccttagccttggtgttggtgagggcaccagacagcctcttttctgtaataacgatgccgctcttccaggcccagtggctgagggcctcgtggggaagacgggctctgtggagcgtctattctgcatagaacccactctgcagagagcaggctactctttcccaagacagaatgtttggaggtgttgtgcaggtctgcagaacaaagcaaaaaattcattcatctggtaaaatgagcagcttaggcagtttccaaaattttcccagtgctctttggaggagccacattgaccacgaagttgattctgcagttgcccatcaggggcctggcctgagcagctgtaatgtgagggcggggcctccggccattgttcatccaaggaggcaggcctttcagtgtccatcccacagtgatgaagccacatcagcccatcccagggaaaagaaggaactagtggtttgaccagtagattgggataacaagtcccaggcagagagatgtgttggaagatcctcttgctatagaaaaaaatcaaaggggcttaaaatatggtgggcaagggaggcagccctgttggcatcctgcctagtgtggctgtagcaaggctgtagctgggagtgcagtccctaggctgtggggctcttggggttttgtcttctggaagtgatgatgccccttggcagcccttccacccctactctctctgtagtctttttttttttttttttttttgagacggaatctcgctctgtcaccaggctgaagtgcagtggcgctatctcggctcactgcagcctctgcctcccaggttcaggcgattctcctgcctctgcctcctgagtagcagggattacaggctcacgccaccacacccagctaatttttgtatttttagtagagatggggtttcaccatgttggccaagatggtctcaatctcttgacctggcgatccgcccacctcagcctcccaaagtgctggggttacaggcgtgagcctccatgcccagccctctctctgtagtctttattacaaggattgcagacaaattggtttggcctggtcagttatttttttctgttttaacagttgggccaggcgtggtggctcatgcctgtaatcccagcactttgggaggctgaggtgggcggatcatgaggtcaggagtttgagaccagcctgaccaacatggtgaagccccgtctctactaaaattacaaagattagctgggcgtggtggcgggcacctgtaatcccagctactcaggaggctgaggcaggagaactgcttgaattgcttgaacctgggaggcgaaggttgtagtgagcagagatcgtgccactacactccagcctaggtgacagagactctgtctcaaaaaacaaacaaaaaaacaaaacaaaaaaaaacagttggacttgaatgtttttaactgggccccatcactcctttttgaatagtttgtgttgccagtcacaccctgtagggtttgtagcctgacttttcaagcagtgtggtggtagggagtccaaggaagttgagtggactgttttggacgtctttggaggaattggtgtggatgggtaatgacttagtatttcattgaaatgttcatttctctcgagttatttctggcagaggatagctctagtagtccccttctcttttccaaacacctttacctttgtcctaatgaaagtacttagttatctctttgggcagatgctatttctctagctaaattaacatgtcatcattcacagttggaaaactgtggctgtgctttttcatttttagagaaatgtttttaaaatacagaaaagaggctgggcgcagtggctcacacctgtaatcccagcactttgggaggccgaggtgggtgagtcacttgaggtcaggagtttaagaccagcctggccaacatggtgaaaccctgtctctactgaaaatacaaatatttagctgggcatggtggcgcgcacctgtaatcccagctacttgggaggctaagggaggagaatcgcttgaaagtgggaggcggaggttgcagtgagctgagattgcaccgctgcactcca

SEQ ID NO: 82671 - DNA, 4022 bp, Homo sapiens
ccattagcttaattttaacttaaaattaccagttccctttcttgcagtcagcttcataccatttttaaagtcaatacgatggaaatcaataaatctgaattccgaacatgttgtgtggaatactcttaagtgtgtttgagagtagatctgccaattatgttgacaagggaatgatcaaaagctttgttttttttaaaaaaaaaaaaagcagtttcaattgaaatattttcatacatctttggttgcaaacatttggactgcattgcaatgagttggggtgttttttttttccttttttgtataaaattgtatgcaaaatgggggtgggttagtaagccacatatttctgtccattgattcagatttaattctttccctttttcattctctcgcttcctcaatttgagtttttgttttaagaacccaaagatgtcagttcttcttttggtacctcatcaacgcttcctttcctgggctccctcccgccgtgctgctgctgcctgtgaacgcacggtgggagaggaagagctgctcagtcttgggcaaggagctctcacacttgctgtggtgttcgttgagcagcagagtatctcccagtgactcctgtttaaatgtcttgccctttgggcccccatctccaaggagttccattgctggttggatgattgtctgcacccctcactgagcttggcctagaggcccagcctggcatggttgtgcctgggctgtgccgctcaacagccccagctcccaagcagacaaagacctcttccaggaggagccaggtagaagatagttatacagccatatagctgcagatccagataaccttctttctttggaagttttcaagaaattcttaagcagtccaaggatgatttcaattatgcttctccattgggtccttctgctcatgcattcagttcaagtgtcctttatcccaggttcagagatgctgcctttctgaagaagacatctgaccctagcaggttggccagtgttattgaacaacaaaaatgggataaattgctttcatgattagctcaccttcttctggttttagcccttctgttctctgtacacgtgaacttctgtcatctccttctggcttggttgcctctgaaaggagggaaagtctcttggtaaattatctcttttgtgctgtttgctgtttctctgctgccgtctttgcagttctcctctcactggttgcaggctttcatagtaaggtttggcgagaaatgttccaaacatcacattttggattctaggctgtcacccctcattctgtgaaacgtattagcatgtgttcgcccaagatgactattccttgtgagccagttaatgatgatattctacgcccttcccttctaagctgtagttcaggaatccagcccacatagacagactcttgctttccatggtgtagtcaatgccaagtgatgcatctaggcaggaaaatctactctttgcttttttgggggcaattagtacatttgtgaagtgcagcatccaagaaacagcctgttttttcatcccttgagaaaggagcagtcattgcagcttttctgtccttgtcggcctgcagttcctggggaaaagagtacatctgagctacttgtccaagcctctgtctgcaggtgacaggttttgggggaaatgagatgcattaagtagaacatcatctcgggtcagacattgccccttttgtttgccaatgccccagtcctagagacttgtcctgacagtgccgcacacctacttttgatctctcagagcaggtggctccatccccagactagcctggctgctctccgaggcccctccacctgctccccttattgccccattcttgtggcttgccgggccacttggcctcccttcttgccggtgacagcgttccatcatctccccgctccccaagggccaactgcttctcactcaggctggtgtcatttcaggaggaccaaagcctgcgtgagcctttttattttcagtaaaatggtgcttttttccttacttcgagatactatatataaataataatgtaaatgacaccttttcgtacggagctgtttgagtattgctttacagagctcactaaatcagcttcaacaatcttgagctctgtggctcctcaccctgtctgcatggaagaccttgctggacgctctcgggagagcagacatagcaccagaagccactgggagaagtgttttcgatccgtgtctgggccacagtagtattcactgtttagtctttgagttccgtaagcagtctcttcatacatttcttacagtctggagtgtactgactaaatctgtgtaagcaaattgaaatactctttcttttaggtagcgtcacagtggttttttttttcctcaggataatttctatacaatttccttactgtcagagggaccagatctttccctcactgtggcaggggccgtgcaggtggataaaggaagagctggtttccggagagtgactgtaacagcgttgactcgaagctagagatggagggggtggccgtctcttagacattggacacctctcagagcctcctgagggcttctttgtcttctagaatctctaccggtggtcctcctgcaggttctggctcacagacatcatcatgcctttttttccctccctgaggcgccttggcagaagagcgtgaccctgtgagccaggccccccttagctctgcttcagatcacagaacacagacagactcgcgagttgctggacctctttggtattaagtgtttgaatccatggtgggccttttgcaagtagcgttagctctttttaaatgttgaactgagctaaggatgcactttcttgtggacatagaaggggcccacgtaaggccctgagtaggctccttagttgctgctttacctgatgagggccaaagagattaactctgcctcgttgccatgtctcagaaaagttgccatatttcacccagaaggggcttgttttcctcttactcttactttaaccatgtgcctggaggagccattctgggctcttgcacttgcccagcctttctttgccaggggcagagaagggaaagggggtagattgagtgtgccaagggccgtgcaagggcaggcttgctttccacccatctgctgagggagccctctcctctcgctccttgcctctgttcacacctgttgtcttggaagaggatggtccctttgtcttaaggctttgtgataaagtcatctccagttaggatctgcacctgtttccttcgtaatagtgcctggcggcctttctgaagttacaggtggttgggagccctctcgcatgcagaacatctggtagattgatctgccaggctgggtggttctactgctttctcaatttctaagaaccttttttttttcttaaagagttctgctgaattatttgacaatatttgtaagtaccatgtttccttgtggtgtatgctctgttctggtttctgttttcaaatcaaatgcctgtttgggaggagatgaacgtatttagtctattagatttgcactgctggattttttttttaaagtgtaaccttgaatagctgtcttattgtttatcctgtaagattagtcaatcgattaaagtttgataattaattgcgtctctttttccttccaattcttcatgcgcctaatccatactggggattaaccaacatttggaattggacctggagccatttctttgccagttgtggtcttatttggctttaagtatattcaaatgtattctctgctgaaacagttgacatttactctgcaaaatggtgaaagtgaccggtgtgacagtgagccacactcctgttggagcagcatggtctgctccttggtgggccctggcttccacatgttggaagagaagctgcctccctgtactcacacctcctgactagtgccttgggcaaccccacctagccatttagcctttgaggacatgttttagaaaacactgagattggagctacagatttagccacaagctat

SEQ ID NO: 82672 - DNA, 1050 bp, Homo sapiens
gctgaggcgggcagatacctaaggtcgggagttcgagaccagcttgaccaacatggagaaaccccatgtctactaaaaatacaaaattaggcgtggtggcgcatgcctgtaattccagctactagggaggctgacgcaggaggatcactagaacctgggaggtggaggttgcagtgagctaagatcgtgccattgcactccagcctgggcaacaagagtgaaactccatctcaaaaaaaaaaagagaccacctagcagggtgttttgacctcttgctgtgtgccaggcaaatgctgtttctctaggcctccagccctggagggaagaatggacatcacctttgggcgctcttccactacgtacttgctctaaacactctgcattcaggtcctgtgacatcagcttcttccttatgtcttaacagtgtgaaggatgttacttgcattatacagtcaacactgcaccacatccctcctgtgaccctcacttcagccactagaggaaatcttaggttcagagaagttagatggcttagccaacatcacatgcctgttaccgagtgaagctacaattcagagcccagctttgcctgatgctaaagtctgtgctcttagatactggcctggtacttgagaagttaggaaagaacccagctgctttattttgctttcaaatttttttctttccttggttttgctgtgtgtcttcagggcactaagttgggtgtgtgagttgcttttttaaactttgaaccttggcatttgtttgttggctttattaattagctttgcatattaataaagttaatttgtcagttacatttgtttaattggctttatttattagttggctaccactttaaaaattaaaacagtaacacatgcacttgataaagaatttcaggtgataggtaagtctttcactcagttctcctagcttctcaaccccagcaccaaatcatccctgaagaagaattcacattacgctcaagtacttaagtgcgcatcccaggggcagagggccaatcattcccacttaagccacttccta

SEQ ID NO: 82673 - DNA, 1108 bp, Homo sapiens
gttacttgggacctagaataatcaaataagactttttgaattaaaacattgtattagtgtttttagtctttagcttttagtgaccctgcatttttttttttttttttttaaagatggaaccttgctctgttgcccaggctggagtgtagtggcacaatctcggctcactgcaacctccgcctcctgggttcaagcaattctccggcctcagcctcctgagtaactgggattacaggcgtgcacctccacgcccagctaatttttatatttttagtagagatggggtttcaccatgttggccaggctggtctcgaactcctgacctcaggtgatccgcccagcttggcctcccaaagtgctgagattacgggcatgagccactgcactcagccagaggctgcatttttagcacctgaaagatgtcacttatcattagtaagaatacatcaaaaataacattgaacttattttgtcttttccagaccctttggctttgctgagagaggactcagatgatagtgacgaatgtctggcagtgaggacacattttggcattcttgctgactctgacagagtgattctgatggacttgtatttaaattgtatgtgttttactctttgaaaataaatctataaaaccaacattttcccccatcttcagtttttcaatgatgtctataaagtgcttttttatgtttgtatactgacattgcttaatatttttaaaggtctgatttgtcatttgtattcatgcatgtcaaaaacaatggcttccccagccatgtacttgaagtaaggctgtctccccaccttcgtatcaggagtgaatatattcatggaaatggactttttgcttcaaaaaaaactttgttttggtttccattagcttattatcagatgtgtcagctgatatcagcaggtgggactagtttttcatcactgtcctaaagatcccttttaatacagtttaacagttttggagaatgggaggctctctttcctcctggaaggtcagtttgacattgccacacatcaaaccacagtttgatttgtcacacatcattattggttctgccccttttactcttagcactgtgttggttccttg

SEQ ID NO: 82674 - DNA, 1113 bp, Homo sapiens
acaagcccagcagagtgcccagtgtggtgccaagagccgaatgaccagagatggttccaggggactgattcttcagacagggttctaagacaaagggcaaaagcctccccggaacacatgctgatgacatgtcagcccctcctgagctcgggtaacgcgaaccaggtagaagtaatgtgtgccaggacaagagacgcacccagagcctctggccttggtctcctatcctggctcacaagcacactccaagtttgggactgtgtgttgggcaggtgagacctttataaggttccatggctgtttctgcgtgagttggctgaataggaaatcaaaggacttctgtgctgttctgcagagcagggcctagttaaaattcctcacagatgatgctgactaggatggaatccctttgcctagtgcttaagagtaccaggtctggaattgagcttagtcaggtatgagcctggacaagtaactgtatctctcaaagcctgtttcctcagctgtaaagtgggggtgataatagtaggaaccccaggattggaattgctgtgagaattagagatgatgtgtaaaatgctcagcacagtgtttgggccaaagtaagctaactaccaaaacccagccatttataaaaacccaaccatcataaaaaaaaaaatgcatgggtgacgtgtgttacagcacacgaaccttgagaacgtgccgagtgaaagaagccagacacagaagatgacacgttatataccatttacatgaaatgtcaagaagaggcaaatccagagatagaaagtacacgggtggttgccagagctagggaggatggggagtgactgctgacgggcactgggtttctttttttttttttttttttaattgatcattcttgggtgtttctcgcagagggggatttggcagggtcataggacaatagtggagggaaggtcagcaggtaaacaagtgaacaaaggtctctggttttcctaggcagaggaccctggggccttccgcagtgtttgtgtccctgggtacttgagattagggagtggtgatgactcttaacaagcatgctgccttcaagtatctgtttaacaaagcacatcttgcaccacc

SEQ ID NO: 82675 - DNA, 1096 bp, Homo sapiens
ttagattagggatttctttctttttcttttttttgagacggagtcttgctttgtcgcccaggctggaatgcaatggcgcaggctcggctcactgcaacctctcctcccacattcaagcgattctccttcctcagtctcctgagtagctgggattacaggcgcccaccaccacgcctggctaatttttgtatttttagtagagacggggtttcaccatgttggccaggctggtctcgaactcctgacctcaggtgatctgctcaccgtggcctcccaaagtgttgtgattataggcgtgagccaccacgactagccagattagggatttcagtagtgagcaaaactgccagataccctgttttgttttctctgattctgcgtcgtaccttccacagcattaaaccccctgacctgtaattgcagctcattccacatttgttgaatgaaatctggtcaataccctaatacctaaacattgagccgactaataccagagatacgtgaggtattgctctaacatggcacaggccagaagggctcatggtttggctggtggccatgaggcaagcctcgctggaagggaaacagattggaatgtagtgactgtaagctccctcatcccctctttgggtgggaggccagcttcctttgtcctggctgagatcagggagataactgctggaaccaaactagacctttctggtgtatggtcctcaatttgaattgcctttgggtttaccatgacagctctttccttttgggttattttgacttgggtcagcctattaaaggtggcagcaccctgtagaggcctcgggatgctgaagatgccatgagaagacacaggcattctgcagacgctagacaattttagtggcagttagtgtcgcagagcagtatgaatgtccagagcctgagggttgaagccaggaggcagaggggccggtcctgactcccaggaaggaggcctgagatgctgctgaactgttggggcttctgcgattacccagtcctgcaacttagtgtgtcctggtggccacaatgagaatcagatgctgtgggttctctaaagccccgaaagttctgtgaaagttac

SEQ ID NO: 82676 - DNA, 1620 bp, Homo sapiens
aggtcaggagatcaagaccatcccggctaaaacggtgaaaccccgtctctactaaaaatacaaaaaattagccgggcgtagtggcgggcgcctgtagtcccagctactcgggaggctgaggcaggagaatggcgtgaacccgggaggcggagcttgcagtgagccgagatcccgccactgcactccagcctgggccacagagcgagactccgtctcaaaaaaaaaaaaaaaaaaaaaaagctgggaagtgattccaacaaactttatcttttttcttctttatattcacccctctcttcctaccccacttcaatccttccttctatccattattttggtctagttgtagtataaatacatgtaatagagatataattgtaactctcttttaggtgtagtctcttgccctacaaaatttggtttcctggccgttgtcttccatggaaaatttagacataacaagaagtgtcacaaaatcatgatactgctataccatgtgcctgatttcaataccaggttgaatgagatgatggaaccttcctcatggaatttggagagatttatccctaggggcattgtagatttaatctaaggctgaactatcaaatgaaactattggcaaaattaacccacagttctacttttacctaaatctatgactaaagaaaactaaggagctcttagttttttccctggtcacctcctaagacatgctatgatgaataagaaaatattttctgaatactggtttgttggaagaatgtgatcagcttatttatttttgttatctaaggaatttaaaaactggtcaactcctgaaaaagatgcacattgatgattcttaccaagcttcagtctgtcacaaagcctattctgaaatggtaagtaatgactggctgggaccactttgtgtgttactgttggtctcattaagtgagagcagtaagtcataagcagtaatgaacaaaccttccccgtggcatcttttttcaaaattggatagcaatgtttgtcctttcttgaaatttaggatgaaaataagtgttggtacagtgattgcttggtaaattttctggctgtaggacctgagggcaaatatttatttctagctgtggatttgaactgagaactattatgcctgttatcagacttgactcccagccacattgccatgtttaagtagccttaggaaggatgattaaatgatccaataatcccagaaatacttttttttttttttgggatggagttttgctcttgttgcccaggctggagtgcaatggcgcgatctcagctcactgcaacctctgccttctaggttcaattaattgtcctgcctcagtcttccaagtagctgggattacaggtgcccgccaccacacccggctaatttttgtatttttagtagagatggggttttgccatgttggccaggcttgtctcgaactcctgacctcaggtgatccacccgcctcagcctcccaaagtgctggtattacagatgtgagccacagtgcccagctaacatgctttactcttaggcttcagtcttctcacacagaaataaatacagttactcagctcttgcactaatagtcttggctagtgggtacaaacata

SEQ ID NO: 82677 - DNA, 1145 bp, Homo sapiens
tatggtggctcacacctgtaatcccagcactttgggaggccgaggcaggtggatcacgaggtcaggagttcgagaccagcctgaccaacatggtgaaaccccgtctctacaaaaatacagaaaaattagccaggtgtggtggtgcgcacctataatcccagctactcaggaggctgaggcaggacagtcgcttgaacctgggaggcagagttgcagtgagccaagattgtgccactgcactccagcctaggcgacagagcaagactctgtctcaaaaaaaaaaaaaaaaaaaaagtgaacctagtcctttaatattaaaaggttactcctcacatcaccccatttttccttatatttggcttagggcattgttttgttcctctgatgatgaaagtgaaaagcaagtactactgaagtctggaaatataaaagctgtgcttggcctgacaaagaggaggctagttagtagcagtgggaccctttctgatcaacaagtagaagtcatgacgtttgcagaagatggagggtaagaaaagcattgattgatttttaactattagatgaagaatgattttatcacaggtttcagagaaagttgggtaactaggatctcgtttttctgtgctgggggtgtaatataagcatgtaccgcatcaacactaggttatgacatagaagcaggttagtgaggtggaagccagacatgtcagggatgaagtcaaagaaggtgagaggctcagcaaatgtagtttgttcttcagtcttcttgaaatctgtgtgtcccttaaatgttagaaatacctctgctgggcacagtggctcatgcccataatcccagccctttgggaggccaaggcagaagtttgagcccaggagttcaagaccagttggggccacatagcagggccccatctttacaaaaaatttaaaaattagctgggtgtggcagagcatgccttgtggtcccagctactagggagtctgaggtggaaggatcacttgagctcaggagttcaagggtgcagtgagctgtgatcacgccaccacactccatcttgggcagcagagcgagacctaatcttaaacacacacacacacacacacacaaatatttttaaaaatatagaaataccttaaggtcctag

SEQ ID NO: 82678 - DNA, 1037 bp, Homo sapiens
gtcaaaaatgtttggagagagacatcttaaagagggaagctgtatttttccagaggaactgagtcctaaacgcatggatacagaaatggaggacttagaagaggaccttattgttctaccaggaaaatcacatcccaaaaggccaaactcgcaaagccagcatacaaagacgggcctttcttcatccatattactttatactcctttaaatacggttgcgcctgatgataatgacaggcctaccacagacatgtgttcacctgctttccccatcttaggtactactccagcctttggccctcaaggctcctatgaaaaagcatctacagaagttgctggacgaacttgctgcacaccccaacttgctcatttgaaagactcagtctgtcttgccagtgatactaaacaattcgacagttcaggcagcccagcaaaaccacataccaccctgcaagtgtcaggcaggcaaggacaacctacctgtgactgtgactctgtcccgccaggaacacctccacccattgagtcattcacttttaaagaaaatcagctctgtagaaacacatgccaggagctgcataaacattccgtcgaacaggtacaatccatttcctctgtgaaattttctctgaaggaatgaaatgccttagtgaatgtaaacagcatgacttgcttgcgcattgggccttccacgtttaagaatggtttgacgtgtttctttgatatgatttcattgtaatcattaagttcattctggggaaattaaggttcattaaaatgtttcttttaaatatgggaggtcctattctctttgttatcagtgaaacagtttgcatttggagctttgctgctgttataagaggaaataaagacaatacgaagtagacattttgatgagtgggtaatgcaggcagacattatacataaagtgtagactaatgatgtgacttttgttttcacagactgaaacagcagagcttcctgcttctgatagcataaacccaggcaacctacaattggtttcagagttaaaggtc

SEQ ID NO: 82679 - DNA, 1015 bp, Homo sapiens
actctatcagatagcggtagtagtcagcaccttgaacacattcctcctaaaggtagcagtgaacttactactcacgacctaaaaaacattagatttacttcacctgtaagtttggaggcacaaggcaaaaaaatgactgtctctacagataacctccttgtaaataaagctataagtaaaagtggccaactgcccacaagttctaatttagaggcaaatatttcatgttctctaaatgaactcacctacaataacttaccagcaaatgaaaaccaaaacttaaaagaacaaaatcaaacagagaaatctttaaaatctcccagtgacactcttgatggcaggaatgaaaatcttcaggaaagtgagattctaagtcaacctaagagtcttagcctggaagcaacctctcctctttctgcagaaaaacattcttgcacagtgcctgaaggccttctgtttcctgcagaatattatgttagaacaacacgaagcatgtccaattgccagaggaaagtagccgtggaggctgtcattcagagtcatttggatgtcaagaaaaaagggtttaaaaataaaaataaggatgcaagtaaaaatttaaacctttccaatgaggaaactgaccaaagtgaaattaggatgtctggcacatgcacaggacaaccaagttcaagaacctctcagaaacttctctcattaactaaagtcagctctcccgctgggcccactgaagataatgacttgtctaggaaggcagttgcccaagcacctggtagaagatacacaggaaaaagaaaatcagcctgcaccccagcatcagatcattgtgaaccacttttgccaacttctagcctgtcgattgttaacaggtccaaggaagaagtcacctcacacaaatatcagcacgaaaaattatttattcaagtgaaaggtaaatcaagatgtgtttgatgatgatgatgatgatgatgaaagttaacaattactatttgcctggcacttccttttctttctt

SEQ ID NO: 82680 - DNA, 1026 bp, Homo sapiens
gtacagctaaaaagttgctaaaaagcagaaaaaccgaggctggctttgctgctgagagaatcctttgaagcaaagaagccagagagacgagggaatctaggctttcagagaacagtaatttgattcagcccaattcatttatttatttaataaatatttgttaaatgcctactgtgtgcctggctggagattgagcaatgatagctccaacctcactggccttctgcgtgttcctcaaacgtaggtaacctattccactgcagagcttttatatttgtggttccctctgcctggggtaccgttccctctgatcttcccaaaactagctccttcctcattcagtcttaggctcaaatgatagtcaaaaatgcctccctgaccactgtaactaaagtagtccctgtcagtaggccagtaactctctcatatcactctgtttatctgtgtatttttttaccttgtaaaatcatttctgtttgttttcttatttattatctgtctccctcactgtatgtaaattgcatctagaatagcatctggagcactaattgacacatagtgggtatcaattattattccaggtactagagatacctggaccattaacggataaatagaagattcatttgttgagtgactgaggatggcagttcctgctaccttcaaggatctggatgatggggagaaacagagaacatagtgtgagaatactgtggtaaggaaagtacagaggactggtagagtgtctaacctagatttggagaaggacctagaagtctatcccagggaaataaaaatctaagctaaggtttgaggaatcagtaggaattggcaaaggaaggacatgttccagatgataggaacaggttatgcaaagatcctgaaatggtcagagcttggtgctttttgagaaccaaaagtagattgttatggaccagtgctactccctgcctcttgccaagggaccccgccaagcactgcatcccttccctctgactccacctttccacttgcccagtattgttg

SEQ ID NO: 82681 - DNA, 1054 bp, Homo sapiens
cgaggacacaaagccaggcctaaaaccctgggaaagcggggtcagagtcctgcgtccgcccttcccgcacccccggcaccttttccttctcctcacagctgaggggcttcccgggaggctcgtccatcgggcaggcgacagaacgaaaagagcagccgtcgccgaccccaggcctgccgacaccgggacccagttggccctgggccggggaggcgccccaggaaggaatggggagcccgggatcgcaccctcagtgcgcgatcagctgacccacgcgggccaagcgcgccctaaactccggccaattaaatccaccattcggcctgcgcacgcgcagccgtagacggccgagcagtggagcgaggccgcctaaaggagagccgcgctgtcgatgagtcccagtgggccacctggagcggaagtggaggagcggccggaagtagccggaatctctgaaagactgaccgactgactctgacaggatccggggctgagggaaggaggcggcggccatggagttgggcgagctgctctacaacaagtctgagtacatcgagacggtgcgcgggtccagatatgtatcctcctctttccaaccctgcgtccctttgaggcctggtcggcgttcccaacctgcccctaccccaccaacccctgtccctttggccattagtcccggattatctagcgatgccccgtgtaccgtctggctttgctgtttactccgcgcttggccagttgaggccttttgtatttattcctgattttctcataggggtaaagtgccttcgggaggataggacaagtcccatcctgttcatacgaattacagctcggacttcgggcccttttacactgccttttgtatctgttaacttgcgctaaaaacgattcggttctttttttttgaggaagggggttggggggcggagactctgtcgcccagtcctgagggccgcggcgcgatctctgctcactgcaacctccgcctcccgggttcaagcgattctcctgcctcagcgtctcgagtagctgggattacaggcgcccgcca

SEQ ID NO: 82682 - DNA, 1048 bp, Homo sapiens
aatcaatcatgttctttgctaaaatctgaggtctggactggttagcattgtcctggtatttgtaaagatttccacattctcagtcaggtatattttctgattgtctagccaggataccagtgaactaacaggccctgatgtaaatgcagtcagaatgatcaaaactttcatttcctcagcaaggagtctaagatacagctgtaaactgtacacagaagccccatgaaacagatgagtctctcagaccttatttcttgctctctgaatgccgtggatcatggcagaattgaaaagtggtgacagtggttaaagtcagggatgaggttcaaacatctacatgactatcactcaccagtgggagaacaaatgaactaatagcttcatatccaaatgaatttttcagggtttttccagtttgaattgacaaaagagcaaaccaaccaaccaaccttaagctggtggatgtggagtggaatgggtggtgaatataaaccaagagtacaggagtagatcttaatgtcacggccaaatggctccaggcattcagcccatgttgtaagaattagtctccatctctgtgctgctttcctctgggaggttcactcccaggcaggttcttccttcatggaaataagatgcctattccagtcttccagcctatcctctggaaaccccagtgggaagtgctgctttccccagtagtcccagcaaaagccctgaggttggggtccatcagactaattggggtcatatgctgacctgttattgtttccaggcttggggtttggtgtgtgggctggggggtgaagcacatggatgagatggggatgggagggttaccgaggaaaatacaggttctgttaccagaagaaaggggaatggatgctggacaagcaaaagcacaaatgtccactaaatcaaagggaaaattcaacagagctcatggaagactgaaattcagtctgtaatgtctgagacagtttgtcctgcctctagcatacagccttccccccgaaatgtacacaaacacacactctcacaaccttgc

SEQ ID NO: 82683 - DNA, 1050 bp, Homo sapiens
accctcttgtcaccgtccctggctattacatggtatcatgaatggggaaaatagaaaggagcctttcacacagtagactgatccatttcctattaacaagattttaatttcaggggcgccgatgtgtgttgaaagactgctgcaaaattcttgacaacacagtattacctccagaaactgtggttccaccattcactgtcttctcaggctgcccaggtaaccttggctgttgattaattttattttaacttcctaaaactcagttgtattttccatcgcaaaagtaatgcttacgattcctatctctggcaatatgttgatagagctaacttagaaattcacctgtacaaagtacctagaaatgctacctaacatataacaagcatctgtttaaatgcataattgggttcaccagaaaataaggaaattatgaagggccaaacacaaagaggaaactaagcccaagctgtgagattgcacgggttaatgctgtcttcataatagagtgatttgaggggtgatactcatgtcgggatggaaataaagccttggatccacacatggcagagagatcctcaaatactcttaaaggattccctctcaaggaaaagtcgatgtaaaacaaatctgctgccaacacagggaatgtacaagaaagcatttcttgcctggcctggactctgggtagaaaaagtctgtctagagaattttagtactgggcttaccctcacattggtcatgggtttaatttgtacattccacatggcccaggaattcccagactgaaaagttagcataaaccatggtctaagaccagcaataccctggggatacctgagaggggcaaatattaatacattatctctggaccttggctgatagaatgctcacaagtaaagcccatcaggagcccggagttccaaattataaagcttgaggaaacaaaagtgatacgtacttctctcagaaaacttggaaaacactgaaaagcagaaggaaggagaaaacctcacattcccttagccctaccccaagacagtatcttcttct

SEQ ID NO: 82684 - DNA, 1130 bp, Homo sapiens
gggactcctccctgggtactccagggccctagcgtccattaccagcacccctccccccagcacctcgcgtccagaagctgacttccctatcagcaacatgactcagactccacttcactggaaccccctcctctagcagctcccagagccaagaagcccttaccaaagacactttccatacgtaagcgggaggctcccagcacccttctctagcagctccaagtcccaggctctcccttgctgggtactctttccagcagctccaggtctgggcgctccaactgccccgcaggcagttccagttccccagcagcgacactcaccctccggcggcagagctccaacaccacgaacacgaagtcgttgtcctcgaaaaagccgtggaatcctacgacgtgctggtgggcgaggctgcggtgaatggatatttccatggacatcttctccctctggtgcggcttgagcagcagagacttaggcacaatcttgcccgcgaacacctccttggtgtccgcgtccgagatctcgaagcacttggcaaagccgcccttgcccaaaaagcggccccgcacatagcgccgccggctgcgtgggtccactaggacctccgggatctctttcgccggtggagccgccgccggagctccgggagctgcaactccggggaccccggctttcccagggtcggccggtgcccgtgccagcttccctgcagtcactgcagcactcatgctcccgaagctgcgctgcagacctcgatccgagcagagcctccgcaccgctccgctcctccccgaattcaaacgcggcgctgggaacgttacaaaagcctgcgcgccactgattggccgcggggatttaaaatccaaacccgcccgccgcgcggcaccatgggagcgccctgcgcagcagcagcctttaaacccggacccagccggggaaaacctgattgacacggacgcccgaacacgtgggatagcctgggaaaccaaacccggcgtggatgcggagacccagccccgagagaggaggaattccttcggggtttctccctttctcgggcgtccgggaaagctcctgcggttcacttgcgcctcctccaggaagcttttacttaaatcttcctctac

SEQ ID NO: 82685 - DNA, 2744 bp, Homo sapiens
gcaatggctttcatacgtctttgcagtggggttttttcaaatgaaaacttgaagacttaagtacagaactgctaaaggtggagctgcttctgtaagcgcaggtagccctttgacctgttttgcatgacaggcagcatctgaggcccttgcacagagtcctagatgaccacaggctatagctaaaaaatcactggcccttaagaatcctggtctcaccatgtgtattctgctgagggcttattctagccaatgtcatggcttctggggctgctcagtggacttagggattgtcttcaggggccccagagttagagtgagtgtccagaggatgcctgacctttgttctgaccctgagatgatttctctcatgtctgggttgtggctgggagactggtgccaaatcctaccttgtgcttacaggtataccttgttagtgggcaaaccaccttttgagacttcttgcctaaaagagacctacctccggatcaagaagaatgaatacagtattcccaaggtgactaatgatgctttaagtttacatttattttgttttccccagaagctgtttatggagcccagcaatatcctaggaccagaaataggtctatcccacctctaaggtagccacagagcttgagagggcctgtgtctgaaattgcatacagaacttgacatgtatgtgcacataagcattttttctagggggagagagttggcagattctcaagagattgggtaacccaaaagttgtgtaaaaagcaaaaaacaaaggaggtaggaaggagtaggaggcaaaagtgcttaatctttagaaatggtttatcttaattcaaatggattctgccacttagcgagatcacattgggcaaatggcctgcatcttttttttttttttttttatttgaggtggagttttgctcttgttgcccagtgcagtggcatgatcttgactcactgcaacctccacctcccaggttcaagcgattctcctgcctcagcctcccaagtagctgggattacaggcacccaccacctcgcctggctttttttttttttttttgtatttttagtagagacggggtttcaccatgttggccaggctggtctcgaactcctgacctcaggtgatccacccgccttggcctcccaaagtgctgggattacaggcgtgagccaccatacccagcctggcctgcatcttctgaaccatagtttccatatataaagtggagttcctgccttggagcacctcacagagtgccttgcatgtggtgagtgctctcagaattatgaatcactgtgaatcccagggcttcctaatggcatagttgtgtgcattttctttttttttttttttttttttttgagatggagtctcgctctgtcgcccaggctggaatgcagtggtacaatctcggctcactgcaagctctgcctcccaggttcatggcattctcccgcctcagcctcctgagtagctggaactacaggcaccagccaccatgcccggcttcttttttctgtatttgtggtagagacagggtttgaccgtgttagccaggatggtctcgatctcctgaccttgtgatccacctgcttcggactccctaagtgctgagattacaggcgtgagccaccgcgcccggccatggtgtgcattttcacaaccaccaacagaaatacatttaaaggaatagctggttcctgcagaagcctagcacacagccagtttgaagtgtagtgtccttgtgtgaagccaggaggcctgtcaccataaggacagacatagtaaatccatcacaaagtgtcagttcactgtcagagacagcatggaatcaagccagctagacaaggccttcaccctctctgtgcctcactttcctcctctgtgaaaaagggatgataatagatccccaccccttagatgagttggtgagggctaagtgagctaaacacaggagtgcttagaatgctttcctggcacatagtgagtgctaggaaagtgagttggtgttcggccacagtccattgacccttctgtcaatggtgctcagtaaagctgacagtggagaacttggcattgaaccaagttgtgaaccactgacctgtggtgtatttgagactgggggctgcatgtgggctggggacctgcagctcctttgaggccgtactgtactccaggtccccttcacattctgcttatggctgtccctctctctgccccagcacatcaaccccgtggccgcctccctcatccagaagatgcttcagacagatcccactgcccgcccaaccattaacgagctgcttaatgacgagttctttacttctggctatatccctgcccgtctccccatcacctgcctgaccattccaccaaggttttcgattgctcccagcagcctggaccccagcaaccggaagcccctcacagtcctcaataaaggtacaacaagggtctgggtaagagagcagaccccccagagaaagcccaggttgtaggggtgtgtgcagcttagtccctggccctgagagctcaggtgtggagtaggacaggcctctgtccttcaatccgtggttccaatgcccatctgcttctcggccctgccaggaaagactgaccttaccatggctggataaacgtaccatgcccaagaagaagaaaatggattgaatgccaagcctgaaaaattctttcaaatcactttaattaatttaattttttggagacagggtctctcctc

SEQ ID NO: 82686 - DNA, 1012 bp, Homo sapiens
cttcacagtttcttaattactccaaactggaaaactagatgcctctgactcttaccatgatagaagtcactgatattttgcccatacttaaattgattagtctttgcccctacaaccacagtgtaagctccgtggaggctggggttttgtctgttgctcactgaacctgcaacagtgcctggcacggtaggccttcagtaaatgggtcagtggaatgaaggagtgagtggaacttggtgcgctgtgctgagactttctctgcagagatatctgtgctgctgcttgtctgagcctgctggcagcagaggccctgctttgctcttctctggggccctaggcctctcaactgagcccaggtggggtgcccagcaggcttccctgttccctggtgtgggccacatgtgtggagcagaggggaagaggctggtcctgaccaactaactgtctgtctgtttctgtctcagaggaggctgaggatcctgcctgcatccccatcttctgggtcagcaagtgggtggactattcggacaagtacggccttggtaggtttcttccagaacaggtgggtgactcaggcacagccaggtgaccttttcagttgttacagactctggcctttttgagctcccaggtactgttctcagtgccctcctctctccatcccaggcctcccagttccagctcccagtgctccctgactccccagctttttttttttccagagacagggtcctgctctgtagcccaggctggagtgcagtggcacaatcatggctcactgcagcctcaaactcccaggcccctaagtagctgtgactacaggcgtgcaccattatgctcagctaatttttaaaatattttgtagagatggggtctcattacgttgcccaggctggtctcaaactcctgggctcaaacaatcctcctccctcagcctcccaaagtgctggaatcacaggcatgtgccaccacgcccggtcccactccccactttctattccccctttctgag

SEQ ID NO: 82687 - DNA, 1048 bp, Homo sapiens
gatcctgcaagagaagagcagcaggggttggcgatcccagaggccagtgtatgttagggagtagagggaagacacaacaggttataggtacctgagccgctcactccacattcaacccacatgggccactgccaggcatgcggagcctaccccagctctctcctgcgcctggtgacctccagctcacctggaagaagttgatctgcacgctgccgttgctgaggtgcaggatgatggcgctgcgggtgcggaaccaggtccgtaggtagggcagccgggcgagctcatcaccttcgcgcggcgtgatgttggcacctgccttcagcaagtgctcgctcatgtaattgcggaaatatttaaggagggtgatctggatgaaaagtaggtaaggggttccagaattagagtctgatcctccagcacaggtcccacttctgcaacaccaccccccatgggccggacggcactcaccttcttcatcaaggagttgggatgggaactcacggtgaggtaggactcagtgccgtcacgctctatgtactgcaggctgtcaccatcattgtagaggatgaggcgtgttgagtcattgaagagcacccccacgctgttatcacagagctgataccctagggatcggtggagagaggtctcagaaagggggaatagaaagtggggagtgggaccgggcgtggtggcacatgcctgtgattccagcactttgggaggctgagggaggaggattgtttgagcccaggagtttgagaccagcctgggcaacgtaatgagaccccatctctacaaaatattttaaaaattagctgagcataatggtgcacgcctgtagtcacagctacttaggggcctgggagtttgaggctgcagtgagccatgattgtgccactgcactccagcctgggctacagagcaggaccctgtctctggaaaaaaaaaaagctggggagtcagggagcactgggagctggaactgggaggcctgggatggagagaggagggcactgagaacagtacctgggagctcaaaaaggcc

SEQ ID NO: 82688 - DNA, 1223 bp, Homo sapiens
tccgcacccgcagcgccatcatcctgcacctcagcaacggcagcgtgcagatcaacttcttccaggtgagctggaggtcaccaggcgcaggagagagctggggtaggctccgcatgcctggcagtggcccatgtgggttgaatgtggagtgagcggctcaggtacctataacctgttgtgtcttccctctactccctaacatacactggcctctgggatcgccaacccctgctgctcttctcttgcaggatcacaccaagctcatcttgtgcccactgatggcagccgtgacctacatcgacgagaagcgggacttccgcacataccgcctgagtctcctggaggagtacggctgctgcaaggagctggccagccggctccgctacgcccgcactatggtggacaagctgctgagctcacgctcggccagcaaccgtctcaaggcctcctaatagctgccctcccctccggactggtgccctcctcactcccacctgcatctggggcccatactggttggctcccgcggtgccatgtctgcagtgtgccccccagccccggtggctgggcagagctgcatcatccttgcaggtgggggttgctgtataagttatttttgtacatgttcgggtgtgggttctacagccttgtccccctccccctcaaccccaccatatgaattgtacagaatatttctattgaattcggaactgtcctttccttggctttatgcacattaaacagatgtgaatattctttttcttgtatttcctgaggggtgccagggcctgggatccagcgaacatctctgcttcatcagccccaggctgcccagcctctgccagtcttgtgggggaaagggggtgacagtgtctctctgtggaccaggctggagtgcagtggcatgatcctggctcactgcagcctcgaactcctgggctcaagtgattctcccacctcagcctcccaagcagctgggactacaggcgtgcgccaccatgcctggctaattttacaaattttttgtagaaatggggtgttgccatgttggccaggctggtctcgaactcctgagctcaagtgatcctctcactcagcctcccaaaatgctgggattacaggtgtgagccactgcacccagcctgattctgaggccagccacaggctcagctcttcagtgagccagcacggagaccatctgtgtggcatccagcccacctcac

SEQ ID NO: 82689 - DNA, 3363 bp, Homo sapiens
accctggtgagctgggtttaaatcaaaagaaagtatttgagtgtggaagagtctgacgtgatttagcactgactgacagttttgtggctgcacctccaccctccagggaaaagtaaagtgatccctagtgagtgtaggtggcatcgtcagtggtgcagaatgtttgcttgctggcagcatggcactgtgctcctctgagactcttgcatactcttctgagatcggggtcccggtgggctcagtgagccctgccaacctacccagcctgtcttaccaagatttggatcctctgcaccacaccagaggactcctcaagtctctttaagtggcaacaacttaggccctggtgcaaacaaatttggattgttttctagaactttgacccctcaaacaaaatgccaatggtgtcttggcaccggaatgtgtaatttcttctttgaggttgcctttcacttccatgaatcagtttcagtctttgtctcttgctgagatcgggggcgatttttaaacatttttaccacggatcttctatgccacctgctctgctgttattgatggatgggaaagtcactttggaatgtgcaaggcatgacacatttgaaataggagatcctttaactcaaagtctggaagataataggaattttctgatgttaagagaaaaaggcagaattaaagtttgtaatgaaatatgggcgctctagagataggagtgtcttttttttttttttgacagggtctcactcttttgccccggctggagtacagtggtatgatcagagctcactgcagcctcaaactcatgggctcaagtgatcctcctgcatcagcctcctgattaattgggactacaagtacgcaccaccatgcctggctaattttaaaacaacttttgtagagaaggggtcttgtgatgttgcaagactggtcttgaactcctggcttcaagcaaccctcccacctcagcccccaagtgttgggattataggtgtgagccactatgcccctctggagtgtctattttttaaattgcctttctttttctcttccctgcctccccaccaagaggcagcgtagagaagtgggcatttgcacaggctaccaggcaagtccctgtcggtctgaatcctagctttgagacttcccaggcatattacttagcctctctgtatttcagcctccttgtctataaaacggagtcagtaacagtaccatagtgtggctgagcagctccaactcattgcaatatccaagattcttggaccagagcttgacacagagtatgctcagaaaatatctgctcttatgattgtccccagactaccccaatggtggggcagctggcacgagagaagactggctctgcagggttgctttgctatggaactgcctgccaggtaagagtcaaaactcagccatgaacttctggtcactctgtgtagctgctttgacagcatattccatttgggcagcagtagggaggagtgaggggaggggcagattggcagtccctgaaattgagatgtttagaatgggaacatataggaaagagggaaatttatccctggtactcagcattgcctgggactaattctggaaccactgaggagttccttagtatctgattgttcttggtatcagatatttcctctgaaagtaaatccacttacgatggaatcaacagtttatacaaaacacataaggttttatgatctcacttaagtcagcaatccagagcccagggcctcaggttcctttgagttttctgctccactatccctggggagtgacaattatctcatggtccaaaaaggatgctagacgctggagtcctcacacccttctttcagctagcaggaaggaagaaaggggtaaagaagggcatatagcacatgctcggtgtcacttgtttaagttgctcaagatccttctacctacatcctcttagctagggtttaatcacatacccacaccttgctgtgagggagcatgtgggaaatgtagtgtttatttcaggcagccactatttagaggatgtttccatttcaaaaatacaagcagagagaggatgttgtctctgccactctggtaggaggtgtgtaggatgatcgcaaggcaaagaaaccattgagagtaaccttcaggctctattacattgtcatggaaattggggacactgctatgggttgggagaggaaggatggaaaactcataaaccttgggaaattatggatttctgtgtgctcaggggagcttaagaatagattttcttgctttcgtatgatgataggacgaaactctaggttgactgcctcataatttctccctttttgtttccactctgtctatttcttataaaaccactctctgggaggtaatttaagaatgtgtttgatgacagggaactggggctgaagatccctattgtaaaattgcctaaattctagagtagaagtggaactcctttgacaagcaaggcagatttctctctatggcatttttttctttgccttttatttatttatttatttattgagacagagtctcactctgttgcccaggctgcagtgcagtggcaccatttcgactcacggtaacctccatctcctggggctcaagcgattcttctgcctcagcctcccaggttgctgggattacgggggcctgccaccacgcctggctaatttttgtatttttagtagagatggggtttcatcattttggccaggctggtcttgaactcctgacctcaggtgatccacccgcctcggactcccaaagtgttcagattacaggcatgagctacagtgctggctgtttctgtggcattctttacaggaacttaggacctgcatttgagctttaattttaattaaagtcttctctaagaagatttttggtagagagaaaaaccttcttcttttattttaaattttgtttttagagacagggtctcactgtgtggcccaggctggagggcagtgacatgatcatagctcactgcagcctcaaactcctgggctcaagtgattctcctgcctcagtgtcctgagtagctgggactgcaggtgtgtgtcaccacggcccttttttttttttttttttttttttgagacggagtcttactctgtcatccaggctggagtgcagtgacgtgatcttagctcactgcaacctccacttcccaggttcaagtgattctcgtgcctcagcctcttgagtagctggaactacaggcacgtgccaccatgcccggctaatttttatatttttagtagaggtggggtttcgccacgttggttaggctggtctcgaactcctgacctcaggtgatctgcccgccttagcttcccaaagtgctag

SEQ ID NO: 82690 - DNA, 1047 bp, Homo sapiens
atttcactcatatttaacctcatttttattaggtactttgaagaaaatggactgggtaccgggagaatatataatgggaagctaacctatgtaatggctggggatgcagtcagtggtctgggaattaaaaaaaaaaagcccaacttctcattctcattttctgaggtaactggagaaagtctgagttgtcaaggaactagagctaaaaatctgtattgtaaaactgcccatatcctggataatatatgcaacagggctgaaggcagtggctcatgtctgtaatcacagcactccggaaggccaaggcaagaggattgcttgaggccaggagttcgagaccagcctgggcaacataacaagaccctatctcaattaaaaacaaaacaaaatatgtgcaggagacttatctttgtgacattctatggagaaaccgtaaatatttatttgtatcatggctgcaagtaagatgagtaagtatttggtagaactagcctgttaccttgagatggcttctttcccagtttgacagagaacttcatctcctcttagttaataactcagataatgagctgacttcctttttgtttagggtttacagtttgaggtggctgttctaaagaagaaaaatcagacaatttcagaggtggaggagcaagtctgggccaatagattgaaaataaataaaaagagagagcacggcatttcagtgagaggcattttgagctgaaagtcagttttcagggagcacaagattactcacattgcctgccaaataccttcctcaccctgtgtccatctctgatatattacaactcttcattcctttggcttaggcagtattttctcttgttcagaagatactttttaagtagtttaacaataaacagtgttgactcacttatagagaaaggacttttgtcaagtctgtctttctgatttcattaaggagaaagtctcagttggtgttaatatatctttaacaaccctctaacacaaatctgggcacttagtagatatctgttgaatattctttttttttaattataa

SEQ ID NO: 82691 - DNA, 1045 bp, Homo sapiens
agaacagtgaacagaacagcatcgctggcttcatggaatttacattctagtagaataacagtaataagtgaataacatagaacgaatatattgtataatgtcaggttgccatatgggctttgaagagaagtaagacactgtcctcacccttaaagatcttcctggtcttttaaaaggagaacagcacatggccaattagttctgagacataatgtaaagtgctacaccaagaatgtaaaaacactttggatggcatccctactcctcctcggaccggtgaagattccacagaggaggtgacatttgggaacagtcttacagcaggagtgggagttcccggattgacaaggggatgagggcaggggagggtgtttcaggcacaggacaggacaacgcagttgagatagtgaggagagagaatagggcacatgcagggaacaggaagaagagggtgtgagggagggaggagcaggtgggaggtgaacgtcatatcagaggggttggcccctgtgaaggcagtgtagtgactaggaagtggttgttgtcactgttttaaagtgggatgtgtgggggtgagtgaaatggccaaatgtttgaaaaagaggagcatgagatgcctttggcaacaatacttgccatgactcaaatcctgaaattctaggcctgcagtgatggaagtcaggcaggagaaactgaaatggccatttagaagcagtgggggtgccttaccggagcacctcgtggctgttgctatttttcacaccctaaagagacatttggaatttcatgtcagtcatattgttgattgttctattttgagggtggttactagttatttttatggttctaacaatagggacatctctcttcactgtatccttagacgcggagggccgtagaaatgaattttcctctgaaaggcatcctcccactccctctccctctccactgctgtcacccagtgggtacgtgtttattgagcacatgctgcacatggtggtgaagagttggtgttttggagaaagaaaggcttcgatttaaatct

SEQ ID NO: 82692 - DNA, 1061 bp, Homo sapiens
aatttagctctgtaaatactaggaaaacttgagctcacaaactatttttagggcttaacatttcaaaaattctgtattagtaagaatctattaaagctgctgtaacagacaaaccttgaagtctctgtggcttgacagaagggagtttatttcttactcatgtcactaaccagtgcaggtggtcctggtcaggacatcttccacagagtcacacaggaccccagggtcctccccattgggccagtggaaggggaaagggaaattgagaaagcacactcatttcacaacaacttcagctggggaaggaagtcacatcacttctgctcacattctatttgccagaacccaggcaaagaggcaaccaacggaagggggtcctgggacatgtcgactagctctatgtccaggaggaaaagaaaacaggttttgatgaactcagtaaatctcactccagtctccaaagccataatttcctttgtctttctttgcggtgatgtatctagttttatctctcacttgactggtaaaactaagatgcaaaactctggacgtctttatcttatcaaacatagcagggaaagagtgagttctatttgtgttcctaaaagtgaaataaagaagcacttttcttgtttttagttattagaacaatctggctcttgtcagactttctagtttttcaatcagtcagaattcttgcctctctggttgcctgttgtattaatccattctcatgctgctaataaaggcataactgagactgggtaatttataaaggaaagaggtttaattgactcacaattcagcatggctggggaggcctcacaatcatggcagaaggcaaaggaaggtcaaggcacttcttacatggcagcaggcaagagagcgtgcacaggggaactgccctttataaaaccatcagatctcgtgagacttattcactatcacgagaacagcattagaaaacccacccccatgattccattaccttccgccaggtccttctcatgacacatggggattatgagagctacaattcaagatgagatttgggtggggac

SEQ ID NO: 82693 - DNA, 1026 bp, Homo sapiens
tttataattagaagttttattcttaccccatcaccatgtcccaagataatttttattatcatctttcagctttaacatatcacagacaaaagttatttttccaaatagaattttaagtatggtataagaggtttttagaaatggaatgattggttttggcggaactgcctggcctgacctgtcactcgggtgaagtgtcagagagctgtgtcgaatgctggcggagaactgtccctctcctgcagagagaaggagctgcttatcctgggggataatgtgggttgagaaagaagtgttttatgagcagaatcagcacagagggagggaggaggaggtgtttaggggctgcagagagccgccagaagatgtgggaacagtatgccagcacggaggtgggtcagatccccatggtgggactctgctgagggttgcctccagccgagacttccaagggctgggattcagtgtgtgtttatgttctctggtgtgcctgataggtgggggcccacatgacagctggcctctctgtgtttcccttctggccgtctctgatttggggcccaagggccataggggggccagggcactccagatgggacgaaaagtcaagtccaagaaaaaaatgaaatccgggctaggcttgtccctgcttgaggatgtgagagagagagagagagtgtgtgtgtgtgtgtgggtgtgtgcgcacgtgcgtctgcagtccctagaaggatctctattcattggacagagaggccaagggaattttccatttcctggatgtcttcaaagatttcaaatgccattaacttgagctgacatttattgagtactcactcggtgactggcactgttctaagtactttacatgtattaacttatttaatcctcacaacagccctgtgtggctgctactgttattgttgccattttatgctgagaaaacagcacaaagaattgagaaatttttccaaagttacagttaggattcaaaaatagacttggttttaggattgtgtaacttcagaa

SEQ ID NO: 82694 - DNA, 1019 bp, Homo sapiens
ctctttgtttttggaccatgggttttctggttcttctttggttcctgcaggtctgactttctcctttttctgttgatggtctttcttggcctgtgtttgcaatgggtcaaccatgtgctttctggccatacttcacacttacttcccaactgggacagatagcatttcttaagtctaattccaaacttctgggataatctgattgcccttcattgagtcagaagccagtggatagggacatggaagatgctatagctgggctccacccttgcaggtgagaggagcagtttcaggaaagtctgccaggcatgagctgagaccttaagagatgtcagctagaattagccactgtcagtatatctgcttctgggtcccactcttcatcctgcttttcaaggttttcaaatatacactcctactcagtctcatgaaaattattatttttaaaataccctttagcacatttacctctaatgatactagattcttgcctcctgcctctgtaaatcactcggtcacttcccgatcttatatttggctgtcaagaatgtggaaatctcacagaacccttgaatttcaaagttggaagggaaaattgcttgtctatgcttataaaaaatacacacctacacccacgtacacatgtatttactaaaatagtattaggctaaatattcagttgtacagctttctgatttcattaacaatgtctgtctttccgtgtcagaagagatagacatttgaaaaaacggcagcgtaggattttgttctatggatgagctaaaagttctttcacctgtccacaaacttccacctagtccgtgtgccttataaaacacaaattctgaaatcccatgtaacgtgtcagctagattctgcctatcactgagtagagatgaaccatcacatctcatgttctagatttggggttacaaattcaaattcctacaggggccaggcaactgtcttagatgtgtgaaacgtcctagatataagaaatgcctgtaaatgaaacctta

SEQ ID NO: 82695 - DNA, 1362 bp, Homo sapiens
acctctctgcgtttctctttctccaggattcttctgggatcctaggcagtgtggtttggtgatctcactggtgagatctcttggagccctggaatgcaattcatctgggccagaagagttgaactaatttaaggacatctgagtgcttcactgatgtatttgttctgctctgtcccttcaaaataccactactcaaaacaatgttcagctggagaaagtggttaacactggaattttctttttttctgagacctaagtgacagggaagggtggatgaaggaaacatatcctttgaaaatcctttagttagaatcctttggttgcaagtaacataaatgaactctgattaatgtaagcaaaaaagaatttgttagaaggatatggggggggagggatggacagagatgtgaaggaaaagatgaagaaccaggctttagaaagtcctgaaaccaaatgaattctagggatctaggaagcagggactaatgactgtttccttcaggacaccagagatggggtgaataactctgtaaaagatgcaaatttcccacctgggtaacatagtgagaccctgtccttaaaaaaaaacagtagccaggcacagtgcctgtagtcccagctatgtggaggctgaggcagaaggatcacttaagcccaggagctcaagactgcagtgagctatgatggcactgctgcaccccagcctgggcagcagagggagaccctgtctcttaaaaaacaaatgctaaattttagagagaatagagagaatcttttcttaaaaaggtgctaagtctggggaaggagcttctgattgtcctgccttgagtcacacgaccatctctgacttgttgacccctctacaatcccatataagactccccaagagtagattctgagcaggtaaagcccatgggtgttcccaaaagtcggcctcaacctgaagccacttattcactctgagctcatcaccaatggcatgccgcactgtcaaaactctctttctgtgcatttgtctgggccactcaactcaggaaagttagttgttctgtgtgagtccccatgttctcactgatttcatttcagtctttaagctaaaaatctgtgtaaatggtaatggagaatggctacatcacacttagtatgtgtcaaagcagtatcctaagtgccttagtggtatcagcttatttaagactgacagtactctgaggtgcagtcacttctttttttttttttcctttttttcaaaacagagtctcactccgtcatccacactggagtgcagtggcatgatctcggctcaccgcaacctccgcctcccagggtcaggtgattctcatgcctcagcctcctgagtagttg

SEQ ID NO: 82696 - DNA, 1040 bp, Homo sapiens
gtagagacggggtttcaccatgttggctaggctggtctcgagctcctgacctcaagtgatccgcccgcctcgacctttcaaagtgttgggattataggcgtgagccactgagcccggtgccctggtcctttagctttctaagacagcagcatagtagttcagagcataggctcttgggccatagcttcctgagttcgaatcctagctctgctgttttttaaactctgtgaccttgggcaagtcttaacctctctgtgcctcagttttcttgtctgcaaaatgggattaataaaaacaccgatctcataggattgttgtgaaaatcgagtgagtatgtttatagtgtttaggaaagttcctggtacacaagacatgctctgaaagtgtattaatattatttgtccttagactcagtagtactctgggggaatcgaatccccacccctaagccaggcagcatggtagaagctaggtcagctggcaggctcctgggtcttttccattctgctgcaggagatgcctgactcacctcttgtgctcacacagatgacagctaaatagaagggctctttcctcctagtattagcttaattataggggctccctagaacagtggggaaaatgagctttgagaatccccccaccacacacacaaggcccacactagcacctgaaagaggagtgaacattgcttcctgcctccttctccccctccttctcacatatgcctttgtctctgtgattctgcacgtttaatttttaatcccgggatgggttctattagtttttgtgtattttctctgccctggtttgagctccaaaaggtctgtttgggtctctgtgggtgtctgacagcctctgcaggcctttctgaattatataactcaagctttgtattttctatttgttactgggggttctttctgtgctataattttactcttagaaaatgaagtagggtactagaattttctctgggatcccctagggtttccttctgaatattttttcctgccatattttcttcgctaaaacatttt

SEQ ID NO: 82697 - DNA, 1006 bp, Homo sapiens
caagtagttgggattacaggcactcaccaccacacccagctaattttgtatttttaggagagacggggtttcatcatgttgcccaggctggtcttgaactcctagcctcaagtgatccactcaccttggcctcccaaagtgctgggattacaggcgtgagccactgcaccctggcccattcccgttttttaaaaaaatattttattccttttagactatttagccacagttttccattctattccttgggataagtgaaaacttgatttttaaaaaataattacaaaattttaaaatcatggtaaaaaacacataacataaaatttaccatcttaactatttttttaagtgtacagtatcattttaagtacatttacattgttgtgcaacagttaggacttttcatctcgtaaaactgaaactctatacccactggcaataacttcccatttcttcctccccaccgagcctctggtaaccaccattctgcttcctgtttctatgagtttggctattttagatgcctcatgtaagtggactcttgcagtatttgtcttttcatggctggtttcttcctttttttcttttcctttctttctttctttctttctttctttctttctttctttctttctttctttctttcttccttccttccttccttccttccttccttccttcttcctttcctttctttctttcctttttttttttttttgacagggtctccctgtttctcgcaggccaggctggagtgcagtggggcaatcacagctcatggcagccttgacctcctgtgctcaagggatcctcccatctcagcctcctgagtaactgggacttcaggcacacactaccatgcccggttaatttttttcttgatttttaatagagacaaggtcttgctatgttgcccagggttgtctcaaactcctggcctcaagagatcctcccatctcagcctcctgagtagctgggattacaggtgcacactaccatgcccagt

SEQ ID NO: 82698 - DNA, 1006 bp, Homo sapiens
cccaaaggctggcagctgtatggtcctggcctttttctctccagcagggtccccatgatcttcccaggtctagttttttcttgagcacacctgcatctgacagttaattgcaagaatctgacttgctgaactctcatttctccctcctcctttagcgcatcaagtccccttctttgttttcccagcttggttcttgcaaggactacctagaggaggacttcaggcaatccctttctccctggtgggctgctgtgttctcaccaataaatcaatgctctctctagtttcaggctgcctcttaggacagatgctgataccaagtgacttttgaggttgttgagttgagacacttggaccaaacagcggaaggcacagcttggctcagctaaaggaagctccgtgaaagctctctgagtgggcctattggctccatgagttggcaggctggccctcctctaggagatggtgggtcctcatgggctgtagcagggccaggccacaggagcagactgctggaggagaacatttagggccatcttccttgctgcctttctgtgatctcttcacccaggaagctgaatgctgttggcaagcaaaagggtgcttggtaaccatttcttttttaagtgtgtgctggtgccagggagggagaaatcctcaaaacccattgtgtctgactcaggcaccactggtttggccataaccgctagtttatcctccctccctctgccaccctcgtcatgtttctcgaccacaacctgtctggaccttccctgggttggccagggcttgataatctttttctgtaaggagttatcccttcctcatctgccaggatggggctactgtgcagggactgggtaacaggcttgaagttgcaagagggctggaagggtctcactagcaagcacacattatgtcttatataggtccctggccttgtgcttcagaccctatcacagcttttccacagctggggctgttgagaatgtaagtggtgacatag

SEQ ID NO: 82699 - DNA, 1021 bp, Homo sapiens
gtgttgcttatttttaatacttaaattaaatgatataattgatgttaagtgctcatcatagtgccaggcacatggaacacacactgctattggttatattgttattattgatgtactctttatgaatacaaaatatccatctttgtcctatgtaatatttttatgctttacattttatttgtctgataattaatatttctgctcatggcagcttttcccaccttttcattttcattttggatcattttattttcagcaagtctcatgggaaccatgtatatttgaattctattttttctttaaattatgaatctttgtcctttaatgggataattcaatccattcacattttttttttttgcaagacacagcatttggcaagtgtttacttctttcttctcccaatccactttcctgcctttgaagattttagaaccagaatttatgaaaaaaaataaatatatttgatttcccatgaattgctattgacacatgcattatttcatgcaattcaagacttttttaaagatgtgactctcaaacttacttcattactcactttttatgttttttggacccatttccctcttattgaattaattgattgattcattaattcaatcaacaaatatttattgaaaacatactgtatgcagacactgtgctagggtctgagagaaacgtatttgatgtaaacctggtctgtgtcttcactgaatctacatttagattcacaaaattagagacacaaaaatagatgacaaattaaagcagatataaaggaaaccaataagggtctcaaggagagattagtgaacgtgcatgtgagtatctatttagcaagtttaatgaggggatgctttttgtgaaggtgacatttatgctggcagcttaagaagtggcattagctgtgtgaagagaggaaggaagaaaggcattccaggcagaaggactagcatatgcaaagggcttgaaaggggaaagagccttatcctaatgttttcatagaaattatttttaa

SEQ ID NO: 82700 - DNA, 1041 bp, Homo sapiens
atgagatgtccttcttcaaagatactgccgtttgtcttgtcctgggatatgcgcgacccacattttttttttttttttttttttttgagatggagtctcactgtttgcccgggctggagtgcagtggcaggatctcggctcactgcaacctccgccttctgggttcaggtgattctcctgcctcagcctcccgagtagctgggatttcaggtgcgcaccaccatgcccagctaagttttgtatttttagtagagacggagttttgccatgttagccacgctagtctcgaactcctgacctcaggtgatccacccacctccgcctcccaaagcgctgggattacagacatgagccactgtacctaactgcgccacccctttataccctccagggagctggacttttcagagatcatctttcacttagaatctaccgtttaacccttaattgcatttcccctcatattattatactcactaatgattttgttggagaatcttttgcctctgctataagccacttgagggtagcatctatattcaagtagtccattgttcctctcatagtgcagcctcacctgatcaatggtgaacagctgctgatgaacagaaccttccctggaggcccctgttctactgaatcttggtcagccccgtgtcctgatgcttgccctgcttgctgttactttttgcctgtggttttactgtttagttaacttcttcttttcctttctttctttcttctttttttttttttttttttttttgagacagagtctctctctgttgcccaggctggagtgcagtggcgtgatctaggctcactgcagtctccgcctcctgggttccagcgattctcctgcctcagcctccagagtagctgggattgcagacgtgtgccacctcacccggctaatttttgtatttttagtatagatggggtctcaccctgttgggcaggctggtctcgaactcctgacctcaggtgatccaccctctttggcctcccaaagggctgggattacaggtgtgagccaccgtg

SEQ ID NO: 82701 - DNA, 1092 bp, Homo sapiens
gatagggttcctgaatatattttcatgatctttgctatataaccagatatctctatattttgaaatggatcatattttattagtttttcttagtacacaagcaacatgctatcattgcagatgccagaaagtaggatcacattgttgtgctatagatctccagaacttctttatcttgcaaaactcaaaaactctatcatttctcaaactcaaaactcaacaattctccattccctcttcctccaccccatggccaccaccattctactttgtctctatgaatttgaatactataggtatctcatataagtggaatcatccagtatttgtcatcttaagatttctttctttgtgtaacgttatcaaggttgatccacattgttgcgtgtgtcagaagttcccttctcttttaaaggctgaatatttcattgctttatagactgcacttttttatccattcatttgtcaatggacagttggattgctctcatcttttggctattgtgaataatgctgctatgaacaggagtgtacaaatatctcttcaaggccctgttttcaattcttttggctatgaacccagaagtggaattgctagattaaatggtaattctatttttaatttgttgagaaccaccatacttgttttcatagtggctgcaccattttgcattcccatcaacagtgcacaaggatttttccacatcctcaccagcacatgttattttctttttctttttttgatagtagccatttaatgggtatgaggtggtatctcattgtggtttttgatttgcattttgctaatgagtgatgctgagcatcttttcatgtgcttattggccatttatgtgtcttctttggagaaattctattcaagttgacttctatgattttgcattatcacatctgtattgattcaagcaagccaactagaataaattctggcatttaaaccgattttgtggtttttctgcaaataaattctgcccccaaataacctccaactttctggaagcagtcagcaggagtacagttctgaagataactttctttaaaaaaggaaattcataaaatatcatgcatcttcct

SEQ ID NO: 82702 - DNA, 1054 bp, Homo sapiens
aggcgcccacaaccatacctggctaatttttgtatttttagtagagacggggttttgccatgttggccaggctgttcccgacctcctgacctcgtgatccgcccgcctcggcatcccaaagtgttgggattacaggcgtgagccactgcgccaggcctgtatccagtgtttaaggagatgttttgtcagataaagctggagttttgtaatggagttttggagatggggaagggcagactggcttaagagggtgctgcataagagatggctcagaggagagaaagtgtacgatgttttcaggacaaattagtccttcaccatggcaggaatctaggcggccgaaggacatttgtgggaaattgtagcagaaaatacgaggaggactttgatgccaggccacagagtttgcagtcctttttggagactcaggggagttattgaacaattagaaactaaaggctgatgtgacctccacaggatactggctaaacgcatgaactcttgaaccagatggacctggatttaagtctggattctgccatttccttgctgtgtggtcttaggcagattattaacctctctgagcctcagttttctcatctgtcaaataggagtgaaatacctcatagagggttgtgaagagtgaagtaaactaatgtggagaaggcattctgcagtgtctggaattcagcgacccctcagtacatgttaacacactaatactttctacgtaatcatacctgtaacaacacagagacgatggtattatctttacagcttgttcgcttctgtatcctgagcatctaggacagtgcctggcatgtaatggatgctggagaaatatttcttgggcaagaaatgaattgcaccagtttctttttgtaagggatctatttttttcttgtctggaaaaatactttgataaaaccttagggaaaagatgaaattccctttcttctggagcctagatttcaaagaggagaggttgagtgctctgcaaagtagaaggagaagattttgggcagtgaggaggagagaattgatgagatggtgg

SEQ ID NO: 82703 - DNA, 1034 bp, Homo sapiens
caggaaatacagagaatatgtaggaaattctacatagaaataacttgatttcttcacgaaaccaatggcatggaagtgtgaaaaaaatagaattaaaagatatagcaatctaagatagtgtgtggacctcatttggaaataaattcaaacaaatcatccataaagaaaacattgtgagataatcaaggagaaggaaacattaactgaaatataaaatgataataaagaattgttattgcttttactgggtgggataatggaattgtggttgcttttttgttgttcttatctgtggagatatgctgaagaatttatgggtaaaataaaactaagcgatgctaggtggggaggaacctatgcatttcctattttttggcaaaaaggccccaaggtgtagtccctagcacctatgttcgaacaatgtgacccagcattcctgctgatccctgactgaaccaggtatggctccacttgatcctctctctggggactgggagttagcattcagaaatgccagctagcctccatcaacagcagactggaaggatcaggcatctcaggaatcatgcaatgtgcatcaaaaaatagagaaagcttatcttcagagagacagacaagtgaagctggctcagaggtcatgtggaccagagggatgggggaagcagttgccttggttcctgacaatcctgcattgaagtcaaactgctgttcctttccctggtttctgtttccttgtaacagacttattcctttgcttgaactgggggcttttagtggggttctgttgcttgcaaatcttaagtactctgagaaacagctaaggagatgaagatggaaaactttgtcatgaagggaatgggttactggaatctttctggagggagaatttcagaattacgaggatgcagttctgattgaagggggtcttgtgggtatctgggatttggaagtgagaatgaatgctgtagcagatgctattagctacccatccaatggcgattccttctttgtttctagttttgttcggtggcaat

SEQ ID NO: 82704 - DNA, 1426 bp, Homo sapiens
tgccatacgttaggtgcatagaagagaccgaaggaactagggtgtgagtgcattgtggaatcagagaatcagattgtggaggtgggagaagagtctgaggcagttcaagagagctgcagtggatgagtgcttgctaaaatcccagtgctatatgtgtagttctgccctccaaccatggcttgagaagaggactggaccattactagcgaaaacatcactaggaagggcagcctatacaaccaatcttctggcagacacagggcctggatatatctttccaaagaataacccagtacttaagacaatgcagctgcgtttacagagttttgaagggaaatgttatcatctacatatttgattctcagtcaaactgtcacttatgtgtgaaggcaacagaaagacagttttcagatataaaaaggcactgcaaatctaccaccactgaaaaagttaattgaagatgtactctgattgagagcagatccaaaattaggaacttaagaatgaagaagtcatggtatggaggaactgggatgagcacttccagtaattaaacataatattgagtccaaataattgttataagtctccaattaagtgtcagacaacaataattatttgtgaatgagtagctatatggtgtaaaattagcttcatgatctatttgagtgcaaaatcctagcatataaatgaagactgggaagtagataacataggagcaaggatatgaaaactttacttaatctatcatcttttattggttttacttaatttttcatctttcattgtggaagacagtcagaaaacatgctgttaactttctttaatcacaatgaagtaaaactagaagttaataacaaaggttataaaaaatcaatgacttaaatataaaatactttccttaatgaccctgggacgtgttcaacatagtgctgtatgttcctgttggtccttaccattgcaatacggcaaaaaagaaagaaagaaagaaagcatacaaagaaagaaataaaactgtatttatttgcaaacgacatgcgtatctgtgcagaaaataccaaggaatctataaaacaaaccaatcaaccataaacaagccatcctacaacacataagtgaattcagcaaggttgccagatacaggggaaacatacaaaaaacaattgtatttctataaactagcaatgaatacgggaagactgaaattgaaaatataatactattgacaattgattgctcaaaggaaaaaaataattagctgtaaatccaacaaaacatttgcaggacttatgtactgaaaactgtaaaatgttgatgaaagaaataaagaatatctacataaatgaagacatactgtgttcatgaattgaaagactcaatatagtaaaggtagcagctatccccaaattgatatacaggtttaatg

SEQ ID NO: 82705 - DNA, 1031 bp, Homo sapiens
agggtcttcctctgtcacccaggctggggtacagtgtccagatcacagctcactgtaacctcaactccagtgatcttcccaccttagcctccctagtaaatgggactacaggcacacaccactatgccaggctttttttttttttttttttgtagagacagggttttgccatgttgcccaggctggtcttaaactcctgggatcaactcatcctcccaacttagcctcccaaggtgctgagattacaggcatgagccactgcacctggtcccctgtctttttttttttaattaattgatagtaactctttatatattctagatgccaatccgtgatttagtctaaaaataaatccccttggtctgtcctatgtcttttcttttggtttatgaaatcttttgtaatacaggaacgtcacacttccacagtcaaatgtgtcagtcttctaaatagatataggtaccttgtatatactccttgatatatcacattgattggtggtgacctgtttgtctccctggctgtcagactgtgagaaacttgagggcaggggctgtactttattcttctctgtctctctagggactagtgcaaagctgggcacagagttttgtgcctgaatgagttttttttgtgtgtaaacgtggtataaaacaggtcttgtgactgaatgagggaatgaatgaaaaagccctgtcctgccctccctgcagagatggggtctgctgcagagatgggagtgagtcagggagtgaatcacaagctcttccgtggctcagctgacatttcaaaagccctgagcagagaagcccccctcattccaagagagcctccgcctctttgagcaggcacagtgaagctctgctgattatcaaactctgtgtgtgtatgtgcacgcacgtcaggggtttagcagttaaaactcttagtgctgcatattctgcgtatgtgtgaacaaggctttaaaaaatctctcagaggacctgtgtatgtgtgtgggtgctgggggctgcatagagagagagttaaaa

SEQ ID NO: 82706 - DNA, 1128 bp, Homo sapiens
caccttggcctcccaaagtactgggattacaagtgtgagccactgcgcctggcctatcttattattattattattattactttttgagatgggatctcactctgtcacccaggtgggagtgcagcagtgcaatctcagctcactgcaatgtctgcctcctgggttcaagcgattcttctgcctcagcctcctgagtagctgggaccacaggcacccaccaccatgcccggctaatttttgcatttttagtagagatggggtgtcaccatattggccaggctgatctcgaactcctgacctcgtgatccacccacctcggcctcccaatgtgctgggattacaggtgtgagccactgcgcccagcctctttttattattatacttagcacggcacttggcacttaggaaatgttcagtatatgttagctattattggctactgttatttcttcttcttctcctcctcctcttcttctttctcctcttattcctcctcctcccccactcccttccaccccctcttcttattcctcctccttctcctcattattattttaagtacctccttaccaatgcctacagaaatagactgacctagtaccaggatctagaggagttcaatcaagttcgtctgttgccttcaaggtaacagcgtagtggtggttccgagccagatgccagacccagtctgcctttgttcaaatcctggttttacacttaatactgtaggtacctcgggcaagttacctaacatttcttcacctcaatttctccatttgtaaaatgtatataatgatagtacctaccacgcatggttgttaggaagattaaatcaattaatatttgtaaagtagagcagccggctcattgtaagtattgggagtattggttaaaataattacaaaataaacaatctcacttagatacatcccttaccccctgtggattatgtcaagggtgaaagaaacagtgtgcttgaaatcctgctgtgcgccgagctgtatatcagaggtgttatggtgattcgtcatcattctcctgaccactttccatttttcttttagagtcaacactggccaatctttagggaggagctctgatcattgagaaactgacactgtggaaggg

SEQ ID NO: 82707 - DNA, 1085 bp, Homo sapiens
tgaggattaaaatgagttaatctacgtaaagagcttaacacagtgtctaacacatagtagacaatcaatagatgttagctattgtaattgccatcatcgtcatcatcatcatcattatcatcatcatcgtcaccatctccatggatcagctcaaatcaaaactgacccattgtcaatagaaaaattctctgtgggatgaagtccatgccaccaggcctctcgggaacttcattgatcataccattatcttctcatcctcccacagatatgatatttcagggagtgattgataggtgtgtgtgtgtgtacgtggggaagggtgggcttgtgcctgactccagggacagagtgctttgttatgcagaatagcttgcctgtcatcccactacaggccccttccttgaaaagttccaggctatttttgagccctcatggctcacatgttcctttctacatcatgtcaatgccagtacagaaaaattgaaaccttttggcagcatctaaagcaaaagagatttcaaagtgcatggaggatgagtgttgctcaaatgacagggtattaaaacgtgacaagaaggctgagttaagagactgcaggcagcttgtgtgtttgtatttggaccttgctggatttcttgggaaatcagtggagttgtccaaggttaatgtcatctccaagaaggcaccaaagggtagtaacactccttcaccctcatttgtacatacactctgcaagagcggaagatgatgcagccagtggagtgggcggttgtcccagagcaccacctgggctctgagctacaggattctgcaggggaaagcacctgaggacagagtgaggtgggttggtgccacctgggagctccaggcttttgtgtgctgatgtgcaggcagatactggagccagaccgaattgtgtgcgaaatgtgggtctaagagtgaaggcaccaaaccctcactttttttactttcattcagccttcccatttttcttcaaagggcagaatatgactttggagtcaggtagacctgaattcaaatccctcttcttcttcagtgagtagctaaatctttccaatgcttta

SEQ ID NO: 82708 - DNA, 1050 bp, Homo sapiens
agagttctttaggtctggctggatttaggtgctccagcatggtcatggggcatctcttggctcagcttttctctgtgttggcttcattctcaaaaaaacttttccttggtgatggtaaagatggcagatgcagcactttgggagcctgaggcaagaagaccacttgaggccaggagttcgaaaccagcctggtcaacctagtgagaccccatctctacaaaagaaaaaaaaattcaggtgtaatggtgtgcacctgtagtagctactagggatgttaagtgggagttgcatgaatccaggtgctcaaggttgcagtgagccataatcgcaccattgcactccaccttgggtgacagagtgagattctgtctcaaaaaaacccacaaaaaccgcccccccaaaaacggatggcagatgcaaatttattccctaccagtttaacaactctgctggaaaataaaccctctttcctaataattccagcaaaagtcctgaagctgattctctttgggtgtcctgagtcacacgcccatgcctgaatccccactgtggcccaggtcccatgtccacccttagagccagaggatgagggcagccttagctggcccacacaatcagtgagccagtgaagagcgattcctcacaggagaagcatggaggatgggtgctgtcaggcagaaacaagacatgccaccacacttggttttggggttaggcctgcttctggtctgagcaatctgctgctggatatggctggtgagtgaagagatattgatgtgtcatccccttagaccatggcattgtgtcctgctctctgcatctttgggggcctgatcaaaagcgggaagtcatggggtcaaggacagtctccacgtgccacccaaacaggaaggatgtccccagcaggtgttctgctcagggtctggctctcccagggttgttactgcagagggaagggtaggggcagctttcttctggtggatttatttacttctcaggcctgttcttttcctcatgttggctcaactgttttatcttgcttagttaaat

SEQ ID NO: 82709 - DNA, 1044 bp, Homo sapiens
aagagtcagttatgttgccagctaggtagcaataccttgcatgcctgggcaagattctccagaaggctatatatgctctgaatcagcatctagtatatggtgctttttctctgatagccagaaatttatggatctgggaatcaaggaagtggaatgggagtggtaccactcattattacccctagtaattttaccaccagcaaaattttgctttcttttcccatgactttatgctctcccagcatggaggtctcagttccagagggaggaatacttccagcaggagacagaacaatgattctattgatagttaacactgccacccagccactttggggttcccatgcctctgagttaacaggccaagaaggaagttatgaagttggctggagtgattgatctggactactaaggggaaattggacactactctacaatggagaaaaggaaaaatgtgtctggatacaggagatccctaaagacatctcttagtattaccattacctgtgattaagatcaatgaaaaactacaacaactcaatacaggcaaaactatgaatggcccagaccctttaagaatgaaggtttgggtcaccctgccaggtaaggaaccaccaccagctgaggtgcccactgaaggtaaagggaatacagaataggtaatagaagaaagtagttacaaataccagctatgaccgtgtgaccagttacagaaacaaggactgtgattggcatgattattggcattattttgttatggatatgtttgtgtgtatatatacatatggtgagcaaatatctttgttttctttgctcttttagttctttatcatgtaacgtaagatgtattgactttatatcagtatttttatgtcttagtatttaagttataggataccaggacaagaggaatcattactcaaggacttcatctccttttctggggaggggattattgcattttcagttgtacaaagtctaattgtatcacatcaggtggaattatgtccttgttattctttatttggaggttctttatttaag

SEQ ID NO: 82710 - DNA, 1037 bp, Homo sapiens
ctcatgtaggataccaaattacattaagttgtcatgtttcctaagtgtcctctggtttatgacaatttctcaatcgtttcttatttttcatgaccttgacagttttgagaagtactggtcaagtatctggtagaatgtccatccacttgggaattattgtatgtttaattctaaagctttcatttgctttatttagttattttgagacaagggtcttgctctgtcacccaagctggagtgcagtggcacaatcatcactcattgcagccttgaactcctggcctcaagcaatcttcccacctcagcctcctgagaagctgggaccacaggtgcatgccactgagcttggctaatttttaaaaatttttgtagagatgaggtctcgctgtgttgccccaggctggtcttgaactcctggcctcaagtgatcacccctcctcagcctcctaaagtgttgggattacaggtgtgagccactgtacccagtcagtttcttttttgtaaccaatagttctctggtgaaactttccacattgtcatcctttctcccttcttttaaacatcttaataagttattttaaagttcatgtttgataattccagtgtctgaatcacccatggatctgccctcttgtctgtttttttaaaattttttagacgggatcttattctgtcacctaggctggagtgcagtggtgcaatcatagctcgctgcagcctctacctcctgggctcaagcaatcctcccacctcagactcctgagtagctgggactatagatgtgtatcaccacaccccactaatgtttgtatttttgtagagatggggttttactatgttgtccaggctggtcttgaattcctgagctcaagccgtctgcccatgtttgcctgtcaaagtgctgagattacaggcatgcatcaccacgcctaggtgttttttgcttctggtcctatttcttggcatgtttggaagttttgtttgaatttcagatgattccttgctaaattagaaagctgttggacaggtgtggtggc

SEQ ID NO: 82711 - DNA, 1488 bp, Homo sapiens
gatgataatgataataaatactgtcaatatggtgtgctaatgagtatgcagaacaagaggaactctcattcatcactgtgggaatgcaaaatggtacagctgctccgggaaagtgtggcagcttcttataaagctaaacaaacgcatataactgaatgatcccactcctagttatttatcttaaagaagtgaaactttatgctcacacaagaacccgtgagtatatcagctctatttgtaatcactaaaatttgaagaccactgaaatattctttaacagttgaatagataaaccttgatacatccatgcaataaaatactactctgcaataaaaaagaattaactgttcatatacacaacaacatggatgaccctcaaaggccctttgccgagaaagagaaaccaatctcaaaaggttttcttgctgtatgattccatttaggtattattcttgaaaagataaaactgtagtgatgagaaacagatcggtggttgccaggggctgaggatgagaagaggatgtgactatagaggagaagtatgaggaatttttccgaggtgatagaactcttctgtattctgattgtgtgatggttacgtgaatctatacatgcattaaaatgtataaattttttcacaaaactgtgcaccaaaaagtcaattttactgcatgtaattaaacacataaaataaatgttataggcagaaaataagctgataaaagacacaagtacacacagagagagagaagagagagaaaagaaggcaatagtccaagatgaagagggagatggataagaggaatgcagaagaaagaaggttgtcatgttatgatactaaaaagtaatttaaaacagtagactaaatcaaagtgtgtagaagcagtagatagaggagtgcctactgcagaaaatgtaataagtaatatggaaacaagcttaaggagtgctccaatggggatggcaggggaaagggacaaataaataaatataaccactaaataaatgacagatgtagagaacaaatagcatttatccatgggtaaatgagtatcagatactcctagagaaaagaccagagcaaatggaaaagcatctatactgtattcaaagtagagttcaagacaaatatataatatactatataaaatgtgtcttttatttatggtaagtaaagtctggggacaaaaagtaatcatgaacctagggccaaaatgcataaagcaaaaacttgaaatgaaaggagtaatttacagaaataccataatagaagggctttaaaaacacactttgtcagtcttggacagataaaagcggttaagaaaatggatatagataatttaaataatataattagagtgaatataaaatacctctctatcttgaatcctgaacccttcaataaaagaattacattttttccctagtattcacaaaattagtgatatattaacttgttaaggaaacctcattaaattccctccaaaa

SEQ ID NO: 82712 - DNA, 1033 bp, Homo sapiens
tccggagtagctgggaccacaggcatgcaccaccaagcctgactaattttttaaaatttttttgtagagatggggttgagacctatgttgctcaggctgctctcaaactcctaggctcaagtagtccccatacctcagcctcccaaagtgttggaattacaggcatgagccaccgcgcccagcctggagaggattgttgatgagaaattagttaatgcgtgcaatgtaccttattcaggtgatgggtgccctaaaagccctgacttgaccactatgcaatctatgcaggtaaccaaaaaaagaggattttattggaaagaaaccacccaaagacaaaggtgtacctgggcctcatgaggagctagaatctgtaatcctaaagcagtctagaatagatttctaggtttctttgtccttgctttctttgtttctcactgctcctggtaaacatgacttcgttagctccttgcagtttgcctatctggcaaattccctgcatttcagatcatagtcctgggaaagagaatctggttggttcagcttgggtcaggtgtttattcctggcccaatcagctggcaattggttgctactaactcactaggaaccttttaaaaggggttgtatctacagggagggaataattggtgctcatgccaggtgagaggcaccatcttgagtccaaggagactaactggattcaagcaggacatagttataggctagtggtacaaacatggcatcattgcctcccaggggaggaaactggtgagagcttggcaggtgttagtgctttagccaactaaagccatccaaggatcttgagtacaggaaatgaatcagaaatgcaacccaggcaaatagagctggggcaggtgggaatagacacagccttatgctctctgttttcttgatggtggcctttgcatattcattcaataatcaaagatctgtggaattccgaggaagaatagaggtagttctagcctttgaaaactttggcctctatgtggagggacaaggcttagaaagctg

SEQ ID NO: 82713 - DNA, 1415 bp, Homo sapiens
gaatagatccccctacctctcaggaaatcggatttccccatcttctattaggaccgatccatctctcagccttgctcactggtgcagaaatataaagcattgacattggagtaggtgtttagggaggaggaaagtgtgttgatattggagcaatcttgtgtgctaaagacctacaactgttccccaaaatatcaagctcttctcatcaacacagatgaaaataaaagagaatacagcacatatcctttaggttagagctcagatgtcaccgccttagacaggtcttttctgactgacaccctgcttaaagtgacttcctccaatcactatcttatgtcctctttattttcatcataccacttatcagaatctgtaataatcatgcttacagagtaattgttatctttttcccagcactgaaatttaatctgaagaacaggaggcttgcttatcttgtttactgctacatactatacctggctccaggcatagtgcctgtcacatagtaattgtgcaacattttttttttttcaagacggagtctcgctctgtcacccaggctggagtgcagtggcgtgatctcggctcactgcaacctctgcctcccaggttcaagctattctcctgcctcagcttcccgagtagctgggactacaggcgcccacgaccacgcccagctaatttttgtatttttactagagacggggtttcaccatattggccaggctggtcttgagctcctgaccttgtgatccacctgccttggcctcccgaagtgctggaatcgcaggcgtgagccaatgtgccctgccaaatgtattttgattcaaagaattgatggaaactcctgggtcatgtcctagaaggtggcccaagagatcagggaacacttagcattaaatatttctttcaatcagcttctttttttctttgtaatttttagagatattttaaaaaataataattttctgaaaaatgtatcttcttacaaaatataaggagtctttaagtggcaaaggaaaattcttggaattttcctggatccaagaagcgtcatggatgctctgccctttgcttaactttctgtggatctccgtcttttcagaagtgctgtctctttgtgtccttgtgagacacttggcacagttggctgtgtagaaaaagaaaagcacggaggcttgcggacctctttttatctccctgccagactgtaagctgttggaggtcaaaggctggtttctactgacctttgtgcccacacaacacctaacacagtgttttatgcataatgagtggctgttggttggcttgaaatgcatagcgtttaattaaatctctaaattcttgtgtctgccatagtgacctaaaacttgacaacgtgatgctcgattctgagggacacatcaagattgccg

SEQ ID NO: 82714 - DNA, 1050 bp, Homo sapiens
aagactcagcaggaagtacttgtcggcatcaggaaagaagagtttacacctgaattaatcaaactgttattctgctgggaggatatttccttgtgaaattaaatagagggcagacttggtgactcaatgatgggttgtaaaactactgactgaggctgaagagtgaacataaacaccatcattgaaacctaacgttgtaagggtttgagtgttaagatgaagaagataataatggtagttattttgatactagtattgttattcatttcttgagcacttacgtgctaggcacgtaatgataatagttttgacatcagagggttgttatgatgcataaagcactttgtacaagcctggtacagaggaggcactcacagagagctgatcatggttttcgttagctgtgtcatacattaattaatgtcccggtgtagagtctttgaggggcagaatcctgctgctgctattccttaagataacatctgtgtgtacattggggtcgaagagggccccacatgtcatgagcagcatcacagcttttatgggaccatttggaaaaagatgaaaaggtaacctggaaaggaagagtgagctctttgttcaggaaacagggaactcagaggtgagatgcataactcatatggtttttgtggggttatttatgagatcttgaaatgtggacctccctttcctctcttggccagatgcacacgctcccatccccaccagcatagaacccagcggacatctgggggtcatgttatagctgtagtgcagtggtttgcaaagtgtgctgtctatcagtatgcagtatcagtatgcagtgtcagagccagcggtattgacatctcctgagcactttaggaatgaagttcttggtctccaccccagacctcctgaatcagacactctaggtgtggggcccagtgttctgtgtttaataggctctccaggtgacttgatgagctctcaaggttgagaatcactgctgtggagtttggcattaggagctcagccagggaagctaggcagagaccagagggaggtagc

SEQ ID NO: 82715 - DNA, 1033 bp, Homo sapiens
caggaggctgaggtgggaggatcttgatcctgggaggttgaggctgcagtgagccatgatcatgccactgcactctagcctgggcaacagagcaagaccctgtctcagaaaaaaaaaaaaagatacatcacctacccatttgatccagcctgcctgtatgccttttacattgcaaatgcattgcatgagagccctcctccccccaatcccaggattttatatttctccttcctcaccccttcttaactgtctgccacttccaaaaggcccatggtgagcgtgtgcagagttccatgtgccttgtgggatgtgaaaaggcatgcatgtatctgtcagcgtttctgattcatgcatgctattaaatagagtgtggtgagagaaaaaacaaggaacaataacagaggattatgttcaaacatcagtgaagggtgctattattggaggttcattaaaataactttaaatgggtttttctaagttgttctcaatgccatcttttattgtggcaaggagctgttcacagagcattgtttgaaactgtattgaaatacactagatttggtgtattgttgcagggaacaagagtcatttcttttttaatgttcgcctggttgtgtgttgcttttgctttaaaacacccaaatggctctctgttgccccagtctcgtatctattgctccttggcatatatggcttttgaggtcttccagtgctagatctctgtcctcttcctagctttagctcctgactccaagaacagcattcctgggcttctttcagtccctcaaacatgcagtgccttgttttcccttgcctgcttcatctgtgcagagccatgcacctgggatgcccgaagccctttcctatgctctcaccagccccctgatccccaccgtgccttgccttttccccctcatcaaatcagtagaacatcaaccgctcagggaggctcttgttgattcctgagtagatatctgctactgtcccatcaagaaattcatcacaggctgtaataacatgttcaatctcatgc

SEQ ID NO: 82716 - DNA, 1436 bp, Homo sapiens
cttatattctagggagagtgggcaaaataataaacatagaaacaagtaaaatatacgatgtgtcagaagttgataaacattatgcaggaagctgaagtagggatggagattggaagagccaggtcagggagatgtccttatgatagagtaggtggagaaaatgacgtttcagcaaatacaggaagaagatgagggaggtgggagccatgtatatatctgggtgaggggggagagtgatttggttggtagtagcagatgcaaaggccctgaggcaggagcttgcctggcatggtcaagggagagcaaggagtgcaggtgcctgagccaaggggttgagggagaaaggaaaagggggtgtgagatcagagaggccaaaggaaagcacaggccactgaaggatctttggcttttacaccaactcatgagccaagaaataacatgttctgactttgggtttttaaaggatccctctgagtgctgcagggacaagggtgaaatcagggagactggttgagactcttgccataatccaggcaaaaggtgataggagcttgggcaggttggggctgtttgagaacccccaagttggcatcctcaggtcctccccagttcctggcatcttgtaggcactcagtcattgtctcatggagacatgaaggcgctgatgaacatgagtccctgcagactgcccacatgattgctcctcaagtataaaacatggtagccaagagtttggtcccagtagcaataggatgaatgaatgaaatagatggtcaggaaagcttctgtgatacagagcgctggcttgcagggcatagagcaggaggacatggttgtgctcttggttggacttcctcctgtccatcctgttgcaaagaatgtagtgatatcggagggtgcagtggctgagggctgtacccagggagttgctttgtgtctgggtgatccagctcagaattttgctgacttgtagcaaaaggtgcattgagcctttggcatggatgagcatattttattgcagaagtggtagtacatggagctataatgtcacaggacaagatatgctaggtaatatgttcacattgaaatgcctaatggagagtttggtggcattcatgtattgtcacgaattggcttaatgaagtcctgtcactcttcctctgaaaggctcccatagtgtccataacacctaatgaagggcttactgtgaaaactgggtagggggatgagcccagggtacaaggattcagccgcctcagaagacaacccaggtagcagcatagaagcagtgaggtgaagaggaagagaaagctaagtaggcttcattagagtccttggagtcttttctgctttttatttatttgttttttcattgtttttaattaattgcccaggctggtgtcaaaatcctggcctcaagtgatcctcccacctct

SEQ ID NO: 82717 - DNA, 1062 bp, Homo sapiens
caagggattccccgtgcctcagcctcttgaacagctgggaccacaggcatgcaccaccatgcctggccaatttttaaaaaattctttgtagagacaggttctctctatgttgcccaggctggtctcaaactcctgatctcaagtgatccttccacctgggcctcccaaagtgctggtattataggcatggcaccaccatgcctggcatcttggtgctttttaatagcttgtttgtttctgcgataaatgtaggagactgatagaagagtctggatctcttgtcaaatctaggatcaaatcgtggtcagatacttaaactaaacccattttctcattgcacagcaaggacttcatagagcttttggggggattaaaggaggtaaagcttgcaaaacacttaacacagtatctggctcatagttagtgcttaacatacactattatttgtccatttgattttttttcatccctgggttctagaaacgcagtggtgaataaaacagatgtgattttgctctcatgtggcttacagtctagatgagaacatagacaatcaacagagaatgaacatgtattaataattatagactgagatataccagattttatttctgttaaagaaatgaacaggatatcttgacagagaataacaggagggaagaatgagaatcctctttatttgaaggtggtctggaacagcttctctgacagggtgccatttaaactgagatctggaggaaatcaaaacactggatgttattttttaatgaaaattaagaaaagcaagagcaaaacaaaacagacttagtatcaaacacaaaagacccctctcctactgacttcctccctaaataaacataagagataaaagatccctgattgtaagggaccttcattattagcagaaaaaggagacttaaatctctctttttttctgccaaaacccagaccacaaatgactttttaaaatgatcaaatatgtatgcagctttgagcatctgattctccctggagtgggtccctcctgtattcggctgtgggaaactggaaggcataggaacg

SEQ ID NO: 82718 - DNA, 1007 bp, Homo sapiens
ttggggggacatgccacatgcctctggccccaccatctcatgcctttgccatccatctcctgactggccagaaggacaccaggagcagctcatgagctacaaaaactgaaggtcgggaacccaaggtcgtgcaccaaaggtcatgagaattttgcattttatgttgctctcatttctgatcatttgaaacaacctctctgagtttctgaaagggaagggaatggagaaaagcacacccaattatgctaggttctgttttattttggcttttgtttttgttttttttcccacccaccacaagttcttttcttcccctctcatagtgtgggcgaaatgctgaaaacttcgaccgatttttcacccgccatccaccagtcctaacacctcccgaccaggaagtcatcaggaatattgaccaatcagaattcgaaggattttcctttgttaactctgaatttttaaaacccgaagtcaagagctaagtagatgtgtagatctccgtccttcatttctgtcattcaagctcaacggctattgtggtgacatttttatgtttttcattgccaagttgcatccatgtttgattttctgatgagactagagtgacagtgtttcagaacccaaatgtcctcaggtagtttggagcatctctatgagatgggattatgcagatggcctatggaaaatgcagctgcataattaacacattatcaaagtcctcttacaatttattttccgcagcatgtcagctaagtagacccaatggggagagaaaatgcctgctttctttccctctttttctgcactgccatattcacccccaaccatccaatctgtggataattggatgttagcggtactcttccacttccgggcctggagcttggcttgtatccaagtgtatggttgctttgcctaagaggaatccctctatttcacctgttctggaggcaccagaccttgaaaagaacatgctcaaaataaaatgttatctgttatttttgtaa

SEQ ID NO: 82719 - DNA, 1050 bp, Homo sapiens
aaaaaagaaaaaaaaaggtgactcacattgttacacatgctttaaaatatgtattcaaatgttattaaccacaatgacgacctgctttgatttaaccaagaagacggctgcggagcctagcagactcaggcctgtgggaatgggatttgttacaaatctaggtttgttactggcttcagaaagctaattaagtgctctgaaaaagacaccgtttcttgaaacaaagatggttgtattcctcactttgatgttgttttgcaagatgtttgtggaaatgttcatttgtatctggatctctgttatgtgccatttttcttctagcatcgagatacaataaaaaaaaaaaaaaagaaaagaagaagaaatactatttcaaggaaaactgctctttttgagaaacgtggacctaaactacaaagtgggaactgaggagggaactcaggagaaaggaactaactgcggagctttaatcttggccccagtgttcagccactcggaggggcgggggctgtggcccattcaggggctgctggtgggctgtagtggggtgggatgacctggccagagccaacgaggatactggagcccaaagtcaagtttagagaccagctgggaacgtgaatggggctcttgattttcttatcaaaatcaccactcctcccagcttggactaaatattctttctagcaagcagctttgtgagctccctgaagcccaaggaaacccttcggtgggagaaatttcatttctgtctgagaggattaaggcagcaggtgactccccctcctcgcctgccgtgtcctgctattctcaggcagctctaaggagaattcttatcacagttcaagtgatttccagaagttccagggcttctgagagaccatcaagggaactttaacaacttgacaaatgtccttgaagtaagatgcctcatctttagggaaaaatggggtttggatttctgcttaggcaaagtctcctgcagttcatccttctctgtcctcttcttgcttcaggcttggggaccgtccctgctgtccccactgtggt

SEQ ID NO: 82720 - DNA, 1998 bp, Homo sapiens
agcttattctctcccaacttctacggtaaaatccaggagtattttctctggggatctgcccacaggacaaagtccataaaagcaagtcctgtctggaccatgtggttatctgaagcattagccatcaccagcacaacaaacggggcagggctttccaaggtggggctggtcagaagggaatctttgataagaggcccacaggcagggaaagcgaaatagggttgatgagaccaggggagacctaaaaaaaaggcagctttgtgtcttctagctccaaatatacctgccttttagctcacacactgtcctggagttctcagacctttaggggccctaacacagttcagttcatacaggggttcaaaagggacagtggcccatttgggagacctttaggatcaatgggaatcaattccattgttttgcctcagagtaaagtttctggctcggggacaattataagttgcaaaaaggatagaggcatatcccaagtcttccttcattccacaaataattacaaacaacctactgtgtgccaggcactattcttagcactggaaatacactagtgaagaagcagatgaggaccctgtttattgtttctctccaagaaattctccaagaatattgtttcttggagagaaataataaataaacaagacaatttctgaaagcaataagtgcaatcaagataattaaaggatgctaaagtgtgacttgtggggattgggagagagatgcacagacaatattaaagaggaggcattcgagctttgttgtgaacaccggaagtaacatgccgagcgcctgggggatggaaactcctatagcaccccacaggctaacagcaagcaggacaagacaaaaagggcaggtgggacatggtagagatggaccctacccaggaaacagctccatcagcatcttagcctgccccactctagccacacatacccacgtgtgctcctgagttcagtgtgcccacctcactcccacaccctcacatagacttggcaagagtaaggagggaactccatagagacattttacctatctcaggggagcagccacaaagaagcaagtcttgtaaaaggtcttttgcaaaggagagtgaacccagcaatgagagatccttaacagctagtgcccattagggggctaaacctaaagcctgggtggtgatggctcaaacgctaatgagtcagtgaatccttaccgaccccctggcctttataatctgaggcaactttggctgcagcccgggaatgtgcagggcactagggaatacaaggccttcttccctggttgtcttgtaataaaacagccatggggttgtccctccagtccgagagactgtgatgaggcctacatagcagcgatgtggtcaggtaaaaatcaggaacccactgaaatcttgggcaagccaccctgcctgcttgtgcctcggttctctcatatgtcatatataggaggtgaggactccagctccacctgccccaggtgggtgtggtgatgatgaggaaagacaagaggcttgcaaggaccctgaagaggtcggagcatcatacagattcctttattagcccacattctgatgttccctggtgagacttgccccaagcaattgctagtaaatgggggttaatttcttctccacctccctactgaacaaaaaaagaaatgccagacttactaggagaatcgagttgctttgagtttcttttgttttgttttgttttgttttgttttaaggctccccttacacaccctcctttaagctttgggttttctctcttatagtttgttgacacatgctaaaaatgtctttggagagaacttctgcctgataaacacccaattctagactgtgggtggattttcgagctgacggtggtcaattcctttcattaagcagtgatctgatttctccacatggccattctgccttcttgggggcagagtagatgggcagcagttcaccttttcagagaaagaggt

SEQ ID NO: 82721 - DNA, 2215 bp, Homo sapiens
cccagcagcttgcgggcgtgttctcgcggttccgggcctcaaggcgacggaaacgaaaggcgagcgaagcgcggaggatccggcgagaagaagcgtcagggagcctcggcggtgtccccggggtccgccgaagccacccggccgccggctggggcccggggtggtgaggaagtgctccgaggcctcgccgaggcctagcgccggctttgtgtccgaggcggcggcggcggcggggggaggcggagccgggggcggcctgcgggaaggcctctcctccgccgaccgcgcgttttcggcctaggccgtggggccgctcgtggcctccggggagcaggcgccaggggtttgtgtgcggtgggggcctgggcctgggcctggggaagctgacgccggtcgtccggaagccaggaggaggcgtgaggccgctcgtggactccgggcctaggccctctcccctcaaccttctcccggggcctgggtcaccccaatccacggagagagagacccgccgggaggtgcggccgcgctatggacccctgaccccgtggggtcgctcggactcttaacgtgtggactgaccgctactgactgcaccgccaatccccccgtctctgccggccccttagcatgagcgagggggacccagccgggtgacattgtgcccgttggcggattctcgatttcccctcttccccgtcctcgtcctcctcctcccccatgaagtgattctgagtatcggggggtctctggattattgttctgacgaacccctgcttgtggttggggggtatttaatctgaggccttagggtccttcggtgtctttgagtgttttgtgtgtacatattttgctcttaaagtttataaatatacgtatattgagagtgtccacgtctcctcgctgaaccttaggaatcccttggcaccatgtcctgtgtgcattataaattttcctctaaactcaactatgataccgtcacctttgatgggctccacatctccctctgcgacttaaagaagcagattatggggagagagaagctgaaagctgccgactgcgacctgcagatcaccaatgcgcagacgaaagaaggtaagggccgcttggtcttaagatatttggtggctggagagagatactagctagaaggtgcctggcaggaagctaaccgccattatgtctctagtggggactgttcgttctagtactttggatacaactttcattgatagccaaggtttgcagcagttggccttggagtttcactggtttattttatttctgcatacttgggtcatctgtaacaggctaacccaaaacgtggaagcctgattattcttctcgctgttttttaaaatgagggagggaggagagggggatagctatctagactctttgagtgcttgtcttagggcgttttctaacttattttccatcaggagggcaggagagcctgtgcaaagcttgtttgttcaatcagcaaaaaaaaaaacaaaaaaaaaaccaaaaaaacaattttctaacctaacaacattgtggagtttgatggcaaattttatgtcctgccttcctccctcctcgcatttatttatttggagttgcttgcctgtgttgtggataagggatctgaactttaatatttttgaggatttaatcagtattggaattgtttttggatcttgaaatgttctgatgtcaccgctcttgtcttgtgtgtcaattccagaattagtaatacggcaattaagtagttaaactgttagttcatcacattactcttaagctttatcaattcggtgaagatcaaaagtactgattttttttaaagtagtagttgctagattttacgtgactgttgatactaaggtactgaaaaataggctgctaccatagagtacaaataagccactgataagaatcgttagattctttctccttttcaaaagtattttgataatattgggaacttaacagtagataaatgtgacaagcagtctttcctgactctgaacttgttttggtttctttttctcagatcagtaatgctgatgtgtattttttagcagttcggtgttctaaaagttactgatggaatgagaagaagtgaagttacaattaggttagggtatttttttagtcactaaatttttatcacacttaaggtgtgacatggattcttttagttgaaatgggaggtcccccacctccagcctgt

SEQ ID NO: 82722 - DNA, 2582 bp, Homo sapiens
atttatgaatgagaggagagacaatatgaatggaattaaaggatattaaggcaattttaatcgtcatatattcaggtttcatattttactggagtattacacaatcgaatcattagggctaggcgttatccatcttttcgacccaacaattgaatgcagctttttttttttttttcccctgaaacagagtctcactctgtcacccaggctggagtgcagtggcaccatcttagctcactgcaacctccgcctccctggtttgagcgattctcatgcctcagcctcccaagtagctgggactacaggcatgcgccactacacccagctaatttttttttgtatttttagtagagatggggttttgtcttgctggccaggctggtctcgaactcttggcctcaagtgatccacccacctgggtctcccaaagggctgggattacaggcatgtgaatgcaactttagactgggtaagttatagttaaaagaatcctgtccggaaatttaagagttttgtgactttgtgtaaccaatttttttttcctagcccaggaaataaatgatacgtaattcaaacccagaaagccaggaatgtgtttttgcccagcacattttcttttttatatttatgtgaactgccctttattggagaaagctttgatgttcggtttgttaagaaaagggagctttgagggagaaaatgtgtattttatgcagtcctcaaattaagagagaaagagatattgatggtagctacttaactagttttatgggaaatagtatccaatgtcacaaggcagttgagtagaatgccatttggttttagcaccgatattcaacatatttactaaagaaaactatggtaatctttttatcacagttaaggtccagtttcttaatttcattcttataattttaaaatccctaatctaccatgtttctgtaaaacatttccttacagttttggaattatgtgcatgtttaggtcccttaaatcttttttttttttttttttggagacacatcctcacaggctagagtataatggcacaattttggctcattgcagcttcaacctaccaggcccaggtgatcctcccacctcagcctcccaagtagctggactacagccacacaccaccatgcctggctaatttattgtaatttttttttattttattttggtagagatggggattttgccatgttgcccaggctggtctcctgagcccaagtgttctcctgccttggcctcccaaggccatcccaaagtgctgggattataggcttgagccactgtgcctggcataggacccttaaatcttgataagactgaaacgcttgggtcagaattccatggattttagacaagaatcctgcttgtttctagactgtatttcaaaatgaatatcaagtaatctttgttatatatgagaaacttttctgcacaccgacccctaaaaaacaaaacatccttcgttctgaaattaaagtgtgagaggtttggaagctgaatatgaagtgtttataaatgacccttgtcacctttcttactctccatttctcggattcattctgtttttcatttcatccatgcctttcatgtctggggtcaaaaaaactggcaagcagaaagggtcttttgaagccaacagactacttgttaaggaggtattttaaatgaaatacccccaaagtgtctttattacccctagaaagatactttgaggggtaagaaatcattgtaattcaggtatttaaaaagtcagttagaacatctgttttgaagggcattgaggcaccttttagtttgacacagtacggtgctaatcaaattaataagctgtcttggaaagctcttgtgagtgcattgagttgttacatattcagaaacttcctgtcaggtgtttgacacaaagttttatttctagaattaacttttaaaaaaatctagtcaccccatgctctcagtttttctgactcaaagcttcctcggaatttggggctatcatgaactgtccaagataaagattatagtcctacattggcatgcctaaatctaggaaattgcctacctctaattgaatgcctgtgagatagtgccttctacttgaagtatatagaaaataacccttgcctgaacaatttcatttctaacaatactattagcattatgactaaaaataattaatatacattaaaagccgaatatgcctacatatgtggtaagcgtaataatcggaagaacagagatagtcactttgtgcagagtaactttaagtgaagcaagtaaacttaatgacaataaaaaggcctggttgtgtgattaaaggagatggatacatttttgcatctctaggtaatttttctttttggtaattttacagattctttctgtagcaaatctttttaccatagttaaggtccattttcttaatttcattcttatacaagtattgcaaatagcccaaggagtgtaaaaataggatccattcttctccctcttggttttcccagaaggtgacatcactgtttatccgatgactgaagccaggaacccagggattcctctggcctgattcc

SEQ ID NO: 82723 - DNA, 1512 bp, Homo sapiens
atttttttgtatttttagtagagatggggtttcaccgtgttagccaggatggtcttaatctcctgacctcgtgatccgcccccctcagcctcccaaaatgctggtattacaggcgtgaaccaccgcgcctggccagtagtctttttttctttaacaaaaagcaaataatcactttgcttaaaatccttcagtgtcttcctgttgcacttcaaaacaaaatataaatcagtgtatggtctatacctttctgtcattcttttcttttattttcttaggctcttcaagccgtttcgtatcatttttctacatgctttttttatcctttgcctgaaatagtcctcaaccagtttttttcctgtatctggctgggttctcagtctttaagtatccagtagaagttcctccaaggggctttcttggaatcaacattctatctgaagttgtattccactattcattccttattagaaaaccattttctctttattcataacgtcataatttaatttttagtctatcttcctcagtaataatttctgtgaatgcagggattgtaatactcaactaacgtttagggactaggagagacagaatatcttcattccgaataacggctttttcaccattcacatgttcagcatttcagactaaactaaagaatgacggtgttactgagatttggagttccacaaaagtagaagtgctagagccaagaacctgctgatgatattggttgtcctttgaaaagaagccctcttagggctttggatgtttgttctgacaatatcagtaatctagttgcaaggaacttgtagttattatatttaaagtcatttcccatgaaatttatatttgaagttttctaattcttggttacgcactcaaatccccaaatggaaattcaattctgtctttttatttacagaatatactgatgataatgctctgattcctaagaattcttctgtaattgttagaagaattcctattggaggtgttaaatctacaagcaagacatatgttatgtaagtatcaaatctcatgtatttctcaaaatagactttttttagtttttttaattttgtgagaaaaaactgtattttagaactgaactcattactttaaccttaatgaatacatcttctcaagactgtgaggatagtaggtttctttgttcgtttgtttttgatttcctcccccagttaaattgacttagcctgttgtgagagggccattattaggaaaaatttttctccatatggccagtatttacagatacaagaaagtgatattcacattatttctgtgcctttctttgactacttttttttgtgggggttccttcagttttcttcactacaaaaatttggtgttgtagacatcggtcctaaatattttgacagcatcaagagtattcagtaatgctaacatttactctttatcaataaggggctttggctgagaggcataaagtatataggatttataatcatgggcactgaaatcaggctt

SEQ ID NO: 82724 - DNA, 6020 bp, Homo sapiens
acatttgaaaaatgaaaatagctatcagcctggccctccagatttgaaaattagttttgggagcacagcaatttctcagggattcaaattacaaatgttaacaacagcagtcttcctgatgtgtgaaaatttacgcattcagaaactgggaaattatataatttaaaattttcagtttattaagaataaactacgtttctaaacataaaatccctatactacctttcagaaaacatttgttttaagtggcagggtacacctatttttgaattccctagtatggaatttttttccaaaccacaaatctatcttaaaactgctcaaaggtggtaaagattaatcagagtaatttattcattcagaaattggctgttaaatatttataccaaaggaaaattaggttcctaaaaatgtattattgaagataatgtgttaaaatttattagcacaaaaattcataaatagctaatgttaatttttgtttttattttgtgttttagaagtcgaactgaaccagcgatggcaactacaaaagcagtatgtaaaaacacaatctcacactttttctacacattgcttttacctttataatgtagcagtgaagtaaatcattttagaacttaatatccaactgatcatagtacatattgtaaataaaatgtattttgatgacagctcagttgaatatggataatatgtggcatcacttgcacacttattttgtagaaatgggtaatttgtgcccgtaacactgtttcatattaaatatgatagcattatccctgtatgacactgtgttgtacagttaatgtatgatcctttttagatcgtttaggttttacactaaggaacatgatgacatgttctacatttgtctgtctatagttagtattttgtatgtatgtacaggctgttgtgtgctttttgtttcttgcaataaaaaatgtttggagtgtatattttgccattttcacgttgtatcacttagtttttgttagttttttttttcctgcctgatttatggcttccaaaaacgcattagcaacatgcaaagcttatattaaagtttgatgctttctccaagttcaaacacatcatagaaaagagctttccagagaccattgatgcagctttattatttagtcttgctttatttggcattttgagctccttcttttgtttacatctgtactataaagtgaaacctgaacctggggccccctatgaatatataagtgtcttagtgattttgagtttatataaactgattatattgttttcaaagtttaatgagatcttccacttctatctagttagtgcagatgtccaaattaaaatatttccctcttatactaaaatgctgcgttaattttaggccattgaaagctgtaccttatcagaggtaactccccttaaccaggataactggtttgaagaaagttaagcttaatttttgtaatcacagattaacttaatttgtgataccattttaactttgagctcttaagtaaaaagtagcagcattcctaagttgtggggtgaagcatctgtttcataacacaggtctatcataattgggttctgtaaatgtaatggttctctaaacattttaatgcccaggcttgatattgtacacaatgcaagatgtctaaaatcttcatttagaattcaagggtattgcttgctatttcacattatatactttttaaatactattgctctttgtatatgaggcatttcactaaccttggatcattggatcttaaacatgataatatagaatatctgaacattggacttgttctttagagtatatggcctttagttcttgtggaactaaatacagtgattctaagatcaaaagtcttagtgtttggggtttttttttcctctttttggatatggggtgtttttttttgtttttttgttttttttttttaagcataatgctgtaaaaactgtccaagcttatgttttgctggtgattggtttaaaactgatttttatgtatccaaatgctagcataaattagattgactatcctggtgactgtagtagttaatgtaacacattttgtataaagtacagtttatatagtatttaaactaattcagatgaagttttatttcttgaaaacagttatttcctttttgtttattagcatgtgtataaacacaaatcacatgttcataaataaagttaacattcttttagccttgtgtgttccggcatgtctgtattacatttataagaagcagtttatttaagcttatttaggtttctcttttcttttcttttttttttaatactttaaaattggctttaatttttaggtagaattatctgaaatagagatattagataaccttgttgtccccatcatttatttgcttggggtacatttgctggcatttaagatgagaatatattcatcaagcataattagtgcccatcttaggagatttagagtcacgtggattgtacacattcacaaaagcaaagtaaatagaggcgctaagccaaatttttcttatcctgattagtaaagtaaatgtatagttttggtaatggaagcgaactctaatcaagaatggatggctgtttccatattccccagtcttgtttttagtcatccatccatgttgataccccaaagctggatgttcttcttgctaactaaatatcagagtggtattttataggattctttaacttcaaaaagctaatataattggcataaaagattttagatccttgcttcccaaaacaagacccctaattaggtacagggaggtgggttaattttaatgtctacggtctgcatcagtccgttttgtgaggactttaagtggcagacttttttttaccattagtatcttaccaagagtcactatttttattgatgtttagtaatacaaattcctaatcatttttaaaccattctttgtcaacattttttgctcatttctgaacaccttgctatatgtaggaaacatttgtttgcttttctaaatttgaggtaaatttgacttctttgtggactataagatatttaggggcaatagtgattacttggtggtaaaaaggtgatttaggtgcagttgcatatctaaaaccacttcaaagtcaataaatacataatactaataagttagcagaaagcttaaaagcacacaaaagcccagcataaaaacaaaaaggatactatatcttaagtgttaggagtgggaagattttttttttattcttaagttttttagttccagtggtaagaaagttaatataattgttttctttccaaggaaatcatcagtatttatattctattctagatagtaatgggctatttttaaagactatttgttttattggttagaatgtagtatagatgatggttgacagcaatttgtctagtccttgttacttaaaatcaagtaacttctggttggtataaaatctttaaaatagattgagtaggtcagaacttattttagataaaaagagatatgtattatttagaggtttttttctacttaccacttgagattagttcttaaaggaaaaaaatacttaaaagctggacaaaaatgataacccattggcaaattatgtagatatgcattaagttatagggttagtgcatcatgaactcttttatagtcagttccttaatgtggagcaaagaaccttttgtctgaataaacatcccagtaatatccatcaaattaacttttaaaaccctaagatatttgtgagatgtgtcttatatttagccaacattattttttatttacatttattgaatccctactgtgtgggcattggctaagaacttcatattgagactggttacatttgtctttggggctcttaagtcatgttgcttttattttaaaacttttggttctctggaacagaatacctgatgaagacttttttctttgatccagacatcttgttacattctccattttaaatgaagagttctgaccttacgacatgttaactaagcaacccacttactacgtaggaagctgtagggaaatcatatcttcaagattgtttgctaaagatttttttaaaaactgatattaaaatcatttcagaggatcaaatgaaaaaaattagtgttcaatttaaaatacatttttatttttattttattttgaaagagaaatgttttattcctctttgcacagaacagtttatgaaggtggctctctcctgactccatacatcttttacacaaagatgcctcttcaaatatgcccagttatctccccctcttcagtgttagagaattggcagttagtgagtggggcagaatgcttaaggctcattaaaataccttttttaaagccctcttatatcctttatgtacacttgctctgtgtgattaaattaactttcttcaaatattagagtccatcataataagtgacagctctgttggccttctcctcagggtgccattgttttccctttttttgacttaacatctttgccctgagaaagctgtggtttctttgacaagaagctattactctttgtatgagagaataaacaaacttactcagactgaagagtatgttttcaaaaattaaagaagtagcaattatatgggagctgttatttattaaagcaattatctgagcccttaaagggctgtttgtttttacaatgttgtataatggccttgcaggaaaattagatttcttattctctcttccagtgtacattgtcttgagtattgtcacatttagagaccatagggagatatgggactcctagtattcagtcgacactctgaacagattttctgtgtgatacattttttcattttaattgagtcccctcttcctcccctccaactgatagctttttataactgtgtgaaatatctagagaagaatgaagtaggctgagctacattttcaagcttaacattctttagaaaactaagaaaatgcccaatatttcaacattaaggtgtcaataggggctaaatgatcactttaagatgttttcagtttggaacttgaatgtgtgtttaattttttgtgaacagattgatgactcttccgcgtctatttctctggcccagcttacaaaggtatatatatatatatattcttgaaaatataagtttttttctaacatcatatttttttatgtggaacggttttttaagaggggttgggggaggacatattttgcaaaagcattgtacatattattactatcctgtaaagagtagttgctgttttgagaagataggggaatactttgtcagcctcagcgtattggagtattgttcatcttcaagacagaagaaacacttgaagctacacttaattattttttttccctcatacattttgtttaattatacattggaaactaacaaggttctggaggaatttcctggttttggctataaattatgtggaccttttttaagcagccaaaacagaagatttcctttacacggacgattgcatggttatttcttgaatatttgacttgatcccatgaaggtcaatattttaaatgtgatgcagttgtttctttatgctatagacttgtagtctgtctgcattaggaaaagttttgaacaacctaatttgtttgaacacagactacatgaattgtgtaagtgtgtaaagctgtttgcaggaatataccaatgtgtatgtttggcagaggggcaaattgttacctcctgaatcactgtatatgccatgttttgcgataagattgcttgcattttctgctcaacaatgtgtatcttctgtttgggaaagcactagtgatggattactttttaaagcaatacatttagcttgcaaattgtgcctttaaaaaaaaaaataggcagacttttgagggccaagaaggaagctgtccagttttccaaaaatcctttttccctgctatcagaaatgtgaaaccaaatttagcaaccaagattaatgaaaagatgggttttccattagtgctgtccctatcttgttcttggc

SEQ ID NO: 82725 - DNA, 2011 bp, Homo sapiens
cttaactagaaatcactcccttagaccctgcttacatctagaccttgtatatcatacctcaaagatgaaattcataaaacttatctgaagagtttaatttaaaattataatgctcaatgcacatcttttgcacttgagttgaaactaacatcactacctaaagagccttctacttctaatatctgctgcataatacgttcagtcattctacccccatccctacctccacattgtaagtataaattagtcttaatgctctgacacttgaattatttttaaaacatcaagtgtttctattctaacttaatatcagtctttaacttgtagaaaagtagtatgcaagtcttaatgtaaggtacaaacagggtctaaggtttgagtgcccccagaatgactttcttcagccttgcagacacctaaacatcatgtaattacctaaggaattcccaagtgcctcttccaggttatacgtgtaaatagctgtttttatgcaagattagttagatactgctctttacaggatgagtggtgttgtctttggctgtgtggtcttaaatgtgtttctaatgtgtgtgtcaaataattacctgttaaacagactgccaatctggctgaagccaatgcttctgaagaagataaaattaaagcaatgatgtcgcaatctggccatgaatacgacccaatcaagtaagttcataaatattttatactaataggaacttttggggtgggttttcccccccaatcaaaagcactattttttcaaagtcctcgtatacatgtaattttttttcccccttttagttacatgaagaaacctctaggtccaccacctccatcttacacgtgtttccgttgtggtaaacctggacattatattaagaattgcccaacaaatggggtaagttcaaagcagaaactatggtatatcttactttttttcctttggaattgttccttagctatcttatttttcttggttaatactgccttctgtagacaatggcaaatgagcatggtctctggagccaaatttgccaggcttcaaatcttggttctggcacttggctgagtttgggcaagttacttgatctctataagcctgttttttcttctctaaaatggagataaaatagtacgtacttcacatagcagttacaaggattaaatgagatcacatatgtaaagcactacaagtaatatagtaagcactgtataacattagctaatttattaaataaagataactgctttttctcttcctcctcctcttcctttttcctctgaataggataaaaactttgaatctggtcctaggattaaaaagagcactggaattcccagaagtttcatgatggaagtgaaagatcctaatatgaaaggtgcaatgcttaccaacactggaaaatatgcaataccaactatagatgcgtaagtatgcaaattaggtatgacctgtggagactccagtcagtcccagggtatagtgttttaatcttgggcttgtaactttgctacttggattccttgagaactttgtataccaaagccattagtctctacatcttgcatttctgtgaggctgcagtctgctccatttaaagcaaatttaaaatggatttggggattttttgttaccagtgagtgccacttcccttgtagtcttctaattttttctttttctgtcattccctgctttcttcctcattcacatacatactcccacataatcttattatatatgctacttgcatttttaagtgaacaaaacagattgtaatcattttgagaaacaggaggcttaagaataaaagctctgcatgatgttgaggcaaatttaagtgtcaggcataaatgaaatactgaagtagcttgaataagtttggatatgccatgtgagtcttaagattctcaagtaaggtttattttataaaccactagttcagatcaactatagctctataaaacaccttaatgcctttttttttttttttttttttgagaccaagtc

SEQ ID NO: 82726 - DNA, 1061 bp, Homo sapiens
ttagtatcacctgtaaaccctaactaataattaacttcattgcttttgaatgctgaaatacaaatgcccaattgtgccagacacacagcaaatactggggaaagatgggaatctaaatattttaaatgaaactttcaccctcttcactaacaccactgataagcaactcagactcttcttctgtttctttttctatcctctgttctcctctttttttcttttttttttttttcttttttctctcttttgggcagtgggagactcctctttcacaaattgggaacaatggggcataagcaaattgatacttatttctggaatcgtggtgatgtctatggagcaactgcaacacaaataacacacctaaggtaccctactctgtacagccgagattctttcattttcagcattgagataaacacactctgttcctgaatgaaatagaaagggtttctctagggattcctgtgttttgcaaatttgcctgattacagagaagatgggggtgtagaagcagtggtgacaagtctgagaatagctatttttattttttaatactatatttaatgcccaacatttctgcaaaatgcatttctacaaaaaactggacctagaatgtctaatgaggtgttactttacatttttgtaacaccgattttgatcatttaagtcactaatgcttcttaattgactataaattgattaacctctcttaaaatactaataagtagatcatgggttttggtatctcattttattaattatttgtgtggtaatgacataatatttcccttgaactatctttccttaattgtataatgtcagtactaattttaatttcccgtcttgtggcatttactccaataccttcacaggtttgagagacttttgggttatggagaaggggagattttttgggatttttaattttaattttcatttttatttttttcaagaaacttgatagagtaggaaaaattgtgattatggtgttgtctaaattcaagtcttgtctttgtcacttaaatagaactttatggcacagaacatttcgctttatt

SEQ ID NO: 82727 - DNA, 1544 bp, Homo sapiens
accccaagttagccatgtaaaatttttgtctttctagactatcttatatttctcttttgttttctacaatattccagttactagctaaacaaagaatagtctttgagaaagagtgcttttgctctcaattcagacatttgtttaaaaaaaaaaaaagatggggtgggggatccttgctattttgccccaggctagccttgaacttctaggctcaagtgattctcctgtcccagcctccccaggagtggggattacaggcacatgccagcacacccagctgtgacttctttttagcgtagcataggtcatatagaaaagagcagaggagtactgtaagatgagagattttacttaagtttcttaatctaagaaatgattagcacgacatgcttggaaaacagtaatgtaactgaacaaatgtggaccatccttttaattcatttcgtaaacactttgagttcctactatgcttttattaatatttgaaatcttatacataggtataagaacagcactcctggaatcagatgagcacacatgtccgacgtgtcatcaaaatgatgtttctcctgatgctttaattgccaataaatttttacgacaggtaactgtctgtatccattttatgaaaaaattctttttaactgatttaactgtacttcagtgaatactgcataacatttttctgcattattatgcttggtatctgtaggctgtaaataacttcaaaaatgaaactggctatacaaaaagactacgaaaacagttacctcctccaccacccccaataccacctccgagaccactgattcagaggaacctacaacctctgatgagatctccgatatcaagacaacaagatcctcttatgattccagtgacatcttcatcaactcacccagctccgtctatatcttcattaacttctaatcagtcttccttggcccctcctgtgtctggaaatccgtcttctgctccagctcctgtacctgatataactgcaacagtatccatatcagttcattcagaaaaatcagatggaccttttcggtaagcctgtgtgtttttcactgttagaaaccaaatgaggtcaatgatgtagtgttttgttgttggttatcacttttaacagctttcttagtggaccactgtgctcagtaatgtgggatgacttgtaagaagtgacttagtcttattgggggaagaggaaaacaaacgtgattgatttggcaaatgaggattaagcatcctgaggtcaaatactacacaggttgccaaccagcccctattaaacgttgaatgttccatataccataacagctctgaacttaacagaggtgggagaattcacttgtgatcataatgatagttttggataggagtagttttgagtagaactaagaacagtttagataggtagagaagagggggtaaaaacacaggtaagtagagaagtcaggaatagtgattgttttggagcataattattatgtaggagaatagtgaaaactcacagcctaccacttcagaaatgagacttttgt

SEQ ID NO: 82728 - DNA, 3997 bp, Homo sapiens
caagattacaccactgtagtccagcctggacgacagagtgagactctgtctcaaaaaataaaaaataaatgaataagtaagcttttggggagagctaggtcatagcagcattaacctgtcagtgccttcaaaagacagtttaggaagtaacaggtagtaattagtggagtgataatcagtctgaacttcataaaagagaacttttaaatacaatatttccgtgtagagaaggtcctataaacttgcatcatctcagtcgagacatggccttaaaaattatgttgtagagttatttttacaaataaattgtactaatgttgctacactagttgaatagttggttctattccactgtttttaagtttgaaaataattatggatagaagagataagcttacttgtctcagatgactttagtttgaagaagtaatatcttggaatttatttttccagaagtataaaccgtgggcgacaccacagcgaaagatcacagaggactcaaggcccgtcactaccagcaactccagtctttgtacctgttccaccacctcctttgtatccgcctcctccccatacacttcctctccctccgggtgttcctcctccacagttttctcctcagtttcctcctggccagccaccacccgctgggtatagtgtccctcctccagggtttcctccagctcctgccaatttatcaacaccttgggtatcatcaggagtgcagacagctcattcaaataccatcccaacaacacaagcaccacctttgtccagggaagaattctatagagagcagcgacgactaaaagaagagtatgtattctaatttgaaattattatacacttttttcattttctgataataacattaaataggtgtctggaaacgttttccagtgtttccagttagtatgagaaattcacctaaaatttaaaccaaagccatacaagcaacttctcagggattcctagtttatagttttaaagtggaaaactaatggcaatttcattcatttcattcatgatctaattacatttgtcttgttagttttcttaaatggtttttgttaactttcactctttaactttattttactagggaaaagaaaaagtccaagctagatgagtttacaaatgattttgctaaggaattgatggaatacaaaaagattcaaaaggagcgtaggcgctcattttccaggttagtgttttgcaagccttcacaacagaattacaaacgggactttgaatatccagggattagctatggatataaagaacattgcacttaggaatttttctgattcggtctaggtgtatagaagtgaagatgtagcttatttcccaatatctgttcattgaaataatgtctcagtgtaaattttattgtgtagaactaacagttgtggggattaaattgcccttgtcccttaaagttattcatagtatcaaataattgggaaatgtttttggaaggaaagaaataggggaatagccaaaaaacagttcccaggacccttttaccataaggctacagcttcttgctggaacattaacctgcgtaattatgaagtagtagtagaatacagatcgctttattgatagaaaaagtgaattataaaaattccctggaagtttgtttaaaagactttattttttagccttacacttgaaatgtggtttcttttaaaactaggctgttggccagtataggacaaaaaacagactcctacttcaatattcagataggaagtgaaatttaaaattaattgacattttgtttaatgttagttagctcatataactcacggtacattaatgcacttcactctaattgttaagacttcacttttgttttgtaacaagtgattgctccgatttgtgtactttattccattccagtagaggtcactgtgcctctttaatcatctaagatgaaatttgatataaagatagatgaaaccgtgaggaaagaatgctagaatctgagagtctgtgttttattttgtatgtatttctcaactatcaactattgttttgttttgtttttaggtctaaatctccctatagtggttcttcgtattcaagaagttcatatacttattctaaatcaagatctggttcaacacgttcacgctcttattctcgatcattcagccgctcacattctcgttcctattcacggtcacctccataccccagaagaggcagaggcaagagccgcaattaccgttcacggtctagatctcatggatatcatcgatctaggtcaaggtcacccccttacagacgctatcattcacgatcaagatctcctcaagcgtttaggggacagtctcctaataaacgtaatgtacctcaaggggaaacagaacgtgaatattttaatagatacagagaagttccaccaccatatgacatgaaagcatattatgggagaagtgttgactttagagacccatttgaaaaagaacgctaccgagaatgggagagaaaatatagagagtggtatgaaaaatattataaaggttatgctgctggagcacagcctagaccctcagcaaatagagagaacttttctccagagagatttttgccacttaacatcaggaattctcccttcacaagaggccgcagagaagactatgttggtgggcaaagtcatagaagtcgaaacataggtagcaactatccagaaaagctttcagcaagagatggtcacaatcagaaggataatacaaagtcaaaagagaaggagagtgaaaacgctccaggagatggtaaaggaaataagcataagaaacacagaaaaagaagaaaaggggaggaaagtgagggttttctgaacccagagttattagagacttctaggaaatcaagagaacctacaggtgttgaagaaaataaaacagactcattgtttgttctcccaagtagagatgatgccacacctgttagagatgaaccaatggatgcagaatcaatcacttttaaatcagtgtctgaaaaagacaagagagaaagggataaaccaaaagcaaagggtgataaaaccaaacggaagaatgatggatctgctgtgtccaaaaaagaaaatattgtaaaacctgctaaaggaccccaagaaaaagtagatggagaacgtgagagatctcctcgatctgaacctccaattaaaaaagccaaagaggagactccgaagactgacaatactaaatcatcatcttcctctcagaaggatgaaaaaatcactggaacccccagaaaagctcactctaaatcagcaaaagaacaccaagaaacaaaaccagtcaaagaggaaaaagtgaagaaggactattccaaagatgtcaaatcagaaaagctaacaactaaggaagaaaaggccaagaagcctaatgagaaaaacaaaccacttgataataagggagaaaaaagaaaaagaaaaactgaagaaaaaggcgtagataaagattttgagtcttcttcaatgaaaatctcgaaactagaagtgactgaaatagtgaaaccatcaccaaagcgcaaaatggaacctgatactgaaaaaatggataggacccctgaaaaggacaaaatttctttaagtgcgccagccaaaaaaatcaaactcaacagagaaactgggaagaaaattggaagtacagaaaatatatcaaacacaaaagaaccctctgaaaaattggagtcaacatctagcaaagttaaacaagaaaaagtcaaaggaaaggtcagacgaaaagtgactggaactgaaggatccagctcaactctggtggattacaccaggtagctgagtgtagggggtgggtgtggaactttgttgggagaaggattttcttcagttttatccatgcttgtgctttttatattaattatgaatgctgatctagggaagtaggctggttttatgtagtcttttgttgtctttgaagaagggaattgccaaagacaaggttgtaaatagattttgggg

SEQ ID NO: 82729 - DNA, 2492 bp, Homo sapiens
gcatttttatatttatcagtgttttataattaatagtaaattcttcattaattaaaaatattttgttattctttttagtacgagctcaactggaggcagtcctgtgcggaaatctgaagaaaaaacagatacaaagcgaactgtgattaaaacgatggaagaatataataatgacaataccgcgccagctgaagatgttatcattatgattcaggttcctcaatccaaatgggataaagatgactttgaatctgaagaagaagatgttaaatccacacagcctatatcaagtgtaggaaaacctgctagtgttataaaaaatgttagtacaaagccatcaaatatagtcaagtatcctgagaaagaaagtgagccatccgagaaaattcagaaattcaccaaggacgtgagccatgaaatcatacaacatgaggttaaaagttcaaaaaactctgcatctagtgaaaaagggaaaaccaaagatcgagattattcagtgttggaaaaggagaaccctgaaaagaggaagaacagcactcagccagagaaagagagtaatttggaccgtctgaatgaacaaggaaattttaaaagtctgtctcaatcttccaaagaggctagaacgtcagataaacatgattccactcgtgcttcctcaaataaagacttcactcccaatagagacaaaaaaactgactatgacaccagagagtattcaagttccaaacgtagagatgaaaagaatgaattaacaagacgaaaagactctccttctcggaataaagattctgcatctggacagaaaaataaaccaagggaagagagagatttgcctaaaaaaggaacaggagattccaaaaaaagtaattctagtccctcaagagacagaaaacctcatgatcacaaagccacttatgatactaaacggccaaatgaagagacaaaatctgtagataaaaatccttgtaaggatcgtgagaagcatgtattagaagcaaggaacaataaagagtcaagtggcaataaactactttatatacttaacccaccagagacacaggttgaaaaagagcaaattactgggcaaattgacaagagtactgtcaagcctaaaccccagttaagtcattcctctagactttcctctgacttaactagagaaactgatgaagctgcttttgaaccagactataatgaaagtgacagtgaaagtaatgtttctgtaaaagaagaggaatcttcaggaaacatttctaaggacctgaaagataaaatagtggagaaagcaaaagagagcctggacacagcagcagttgtccaggtgggcataagcaggaatcagagccacagcagccccagcgtcagccccagcagaagccacagtccttctggaagccagacccgaagccacagtagcagtgccagctcagcagaaagtcaggacagcaagaagaagaagaaaaagaaggaaaagaaaaaacacaagaaacataaaaagcataagaagcataagaaacatgcaggcactgaagtggaattggaaaaaagccaaaaacacaaacacaagaaaaagaagtcaaagaagaacaaagataaagagaaggagaaggagaaagatgaccaaaaagtgaaatctgtcactgtgtaaaaagacagattttttaaattgacttaattactaagtcatctgtattaaattttgttataatgtaaagagattcaagccttgtaaataatgacatggaagaccctgtgctgcacttaaaatattgctgcttgattatttgatttttacatcagagctttataacacgaacttttgtacagaattgtgagttgtgaccatgtaacatgagaggttttgctagggcctattatttttaaccaccattaattagttggggtggagtttactgtaatgtgaaattttcacatttgaattttttaattgcctggcaaaagctgatataagttctaaaatatcagcagaatgatttgctgaattcattacaaccctgttatgtcactttttgattacaataaaagttttcagtaaacttttcaaatgttgagtatttgcattatttacagaaagtagtgccatatctgtatacttaacccaccagatgcaggttgtatgtgtgtctccattttcctattttaaaattcttagtttttaatacaagctgaactgaatatacagaattctaaattaaacatggaagatacatttcataggtgggcaggtggtagaggccagaaatgaatcaggattaattggagatgtggttaaataaatctaggagagtcttgaattacatagaaattcgaagtttgaactttcaaaatggtttggatttgaatattagagatgcagaattgtgactcgtttatggccacgtatttttctggaaaccctgataaataagtattaaattccttgataaaggagaatgcagctaaaccagtgagtgcttgtggcctacccaatc

SEQ ID NO: 82730 - DNA, 1076 bp, Homo sapiens
tacatttgtgaacgaaacagagacactctattctcatggggtttatagtccagtggggaaggcagctattaagtcatcacacaagatgatatattgtttcaaagtggggcatttgctaagaaggaaggtaataagatatgataagaatatataactgaaggccgggagtggtagtttacacctgtagtcccagctactccagagactgaggcaggagaattgcttggacccaggaaggaggcagagtttgcagtgagccgagatcgcaccattgcgctctaacctgggtgacagagtgagactctgtctcaaaaaaaaaaaaaaaaaaaaaaaaaggaatctataactgaagacatacttcagttgcgggggcataaaagtggggacagagttggtcaaaagaggcctctctgatgatgcaatttttaagttggggtgtgagagaggggtaagggtcaaccaggtggcgtgtgtgaaggccttgaggagggcaagggctcaagaatgctggtggaccaaacacattgcatgtttcagactgtgttagatgaggccatccagattatgtggagctccaaagccctggctaatgacttggatttcatcctgggatcaatgagcaactattaaagcattttattttattttattttattttattttattttattttattttattttattttattttattttattttattttattttattttattttatttacttatttatttagagatagagtcttgctctgtcgcccaggctggagtgcagttgttcgatctcgggtcactgcaacctccgcctcccaggttcaagcaattctcccacctcagcctcctgagtagctgggattacaagtgtctgccaccatgcccagctaattttcttttttttgtatttttagtagaaacgtggtttcgccatgttggccaggctagtctcaaaatcctgacctcaggtgatccgcctgccttggcttcccaaagtgctgggactacaggcatgaactactgtgcccagcctattaaagcattttaagtagggaaggagcatacttggatttgcaat

SEQ ID NO: 82731 - DNA, 1090 bp, Homo sapiens
agacagcaagagtaacccctcttcttcctcctccccattaacctactcaaactgaagatgacgaagatgaagacctttatgatgaaccacttctacttaatgaatagtaaatctatttttatttccttgtgattttcttaatattgaagacagtatataatacatataatatacaaaatacgtgttaaccgactgtttatgctatccataaggcttgcagtcaatagtagtctattagtagttcagtttttggggagtcaaaagttacatgcagattttcaatgtcggtgcccctaactcccacattgttcaaaggtccactgtattttttttttctgtcattttcatcggatttggagttatcatgggagacagacacccaggctcaaaaaataaaatggtgagactggcatataatggcatttcacagggaacagctataactttagcacctgaatttgagctttagtgcatagacaagtatatttacagttacttgtattttaactaacatgcaatttattaaagttgtaaatctaaaaacctagttttcccgaggcctttaacgtaactcatgaatcatattattatacttataaatctagtatatcttatctaaagttatgtatattttttatttgttcttgtatcattgctaaattgtaaatgtgacataataaattcccctaaatatttaacatcacttaaaagcctgcttaataaattttccttcagctttgtcatttttaaccacaattacaaatttgaatctcctaagtgcttcaaacatctgacaaggctgacttataaatccaacaaacagaatcgctaagtgcttaaacactatttacaaacctaggaagtctgaaattatttattaatccagaaatttttaaacattcagtttcagcctaaataaatcaaattctcttaaatatttttaattaaagttacaaatcttatatcaatcaaactgttaactcaccattccgcttagagcaatagttgtgcttgttggttttgctttaaatttgtgtccataaatctccagttgaccgcccagtactgccccctaatatattcacttttc

SEQ ID NO: 82732 - DNA, 1043 bp, Homo sapiens
ttgggagattgaggtggaaggatggctggagcccaggagttcaaggctgcaatgagctatgattgctccactgcactccagcctaggcaacagagtgagaccctgtatctttaatatatatataacatatatattatatatatattatatatatatattttatatatatatataaaatatatatatataaaatatatatatataaaaaatccatcccattcatgggaaccccatggcctgggctatagaggaagtaggatgctgagacaggaaacaggcagggcccatcattcctgccccatgcagaaggaaggaaggaagaaatcatgcctattgcttctttccttttgtcatcaggaatccccaggagtgccgtgacactgaggtttccagagggtgctttttctttaattaacccaggtattcattccaaaactcagagaatggttttcttagggcggcggattagggcaggcatagggtcctaacctatgtcttaatcttttgctttatgtggtttctttcagctgtgaccaccccgatccaccattcattcttaatccagacacctctttgtacagctcactctccactgcacgctctattttcttccatcttcctggcttccagccgtactgcttattcttctgttcggaggctaacctaacccatcagacttgaggcttggccccgtcttcccttgagtcaacatcttcctctaataatacttctgtagtggacattctatctgattctgtactgtcccttccaccacccctccccgccgccccattagtagcaacaatacagtggggaagaatttacaagtctaggccacacacggacactgatcctatgccgaatttgacttccaaataatgtttctgtctctgcaccacttactccagaatctaagtcctgggaggaaggatctaattgctcagcttcacagctaacttcttgaacttggctccttcagcttccatagtggatgatgagatgagaggggcgacaagtgacttagacagccctcttgtcagacc

SEQ ID NO: 82733 - DNA, 1049 bp, Homo sapiens
agcaaaaccctgtcttaaaaaatatatattttgcatattgattcatgttaaaaatatgcagaatcattactattgatttgtattatgaaatgttttcatttcaatgtaaattcttatacttttccagctaggtcacaggtttttctttctttagagcttggaatttatctcatttcatatacactatgatattgctgagaaaacttaagtcacactgccatgtttatctttgattattaaatatttggcaagcattccctttgtttcaagaaaatcttgaattggaattgacagtacagtaaatctttgtaaaactcttccatgactcaaccaatgaacattggcgaagacccaagatcaccccattcattgccttctatttctttcaaaaatcccatgcactggtggtgattcacagcatttgtatgtatacactgaacagttttaacaactgtacccatgacactttccatggagcctgcttccaaaagcagcacaaatattttcagtatttatcatacagtgggatgaagcaataagggaaacatcagtctcttgttttgaaactccaataaaaccagatttttgaccaaacatagctggaggaccatctggcatgatagaaactaattttttcatatctaagtgaaatttttttggtcagatgtaaaagatgtttttaaaatctatgctacactttggtaagccatgaattgacaaggttttttcataaatttggaagacctttttgaataaatatacccaggctattagttgggtggtatctcatggcatgactcagctaaattgtgcaattttccaaaatttgaatccatttagctttaatacgttctttcattctatgggcaattgtttggtggcttaattgcagattattcactttctgtaaaatctttatttttatttatttattcatttattttgagacagagtttccctctatttcccaggctggagtgtggtggtgcggattgaccccactccagttttgacctcctgggctcagtgatcctcccacctcagcctcc

SEQ ID NO: 82734 - DNA, 1056 bp, Homo sapiens
aattctccaaaaagaagatacagaaattatatggtggcctttctgtaaactgaaactgggaaatgctagtaatcaaaactaatttatgaggcttttctccaccagtgttttggctaatatccaggttacccatcccaagctgctattacattaaaacctccagacctcagcaccgattggcatccaacccactgactgcaacattttccagcataccaattgttcttatagcccttgttttcataatcactgtcctttttctttggtgttcttcatctatcccataaatacatatgttgattaagtggtaattattaggcaactggacccaaacagcatatgaaagacggaataagagggggaaagatctaagagtgttttgggatcctcaacgtgcctgtctttacattagagaaacccagttttaaattaatagtgctagttctctacctccctgtagattaagtttaccccagggaaaacaggacatggattgatcgtttaatccttatcccaaactcaaaattacccttgcactatctgacattgattgagtaaatagattagccaagaaagacaattcaatcagcagagaggcctgagaattctcttgaactttgtttaaaagcaccctgaaatttgagcttcttgggagcatttgcttccaaccattttctaaattgaaattgcattccacttccctaagaccacagcctttttctaagacaggattatgggaactctgaactatctaagcagaagttgtgtgtctgagaataaaactggaatgaacaaatctataaagcaatagaacaataaccccaacaaagacagcatgattcacattgcaaatgacaggaagaaaaaataaacaagggagcgttcacctcagaaaagacaaccacgatgacaatgatgagacctgagatgacaaaaataaaaggacagcaagccctgtggaaaacaaagcccttcggaatcgatttttaaaatctagctacatcctgtttccaagagacaagcctaatgcaaagtgaatcaaaagcattaagtgga

SEQ ID NO: 82735 - DNA, 1796 bp, Homo sapiens
ccacaatttctcccagacagcttgggtctgaagggagggtggacccttggggaacaagtggatctctccaacctgtcagtccctctcaccttgcccgtttctctcacctcccccactcccgccagcccccacacttccttacatgatgctgacagggggtaccagcacccccaggccatcgtaattagcatctggccgtgatcccagtctcctggcagcacattcctcatcttcctcgccagccaatctcctttccccagcaaccctccgacagcactgcagcagctgccgcaccgacagcctccgcgccaaggtcacccaccaccagcaccagcaatgacgaagcacccgcctgctccctgggtggacatgacaccgttaatgcctcactgtgtctaaaccatttggggtcagaaaattgtgattctaaaaaaaagagaggttgtccttaggaagatgggtgaggctaaactccagttgctggaggggctaagagattcatacggcttaagtttcatcgcttaaggtctccaggagagagggaactgagcaggaggggcataagacattccagaagggtgaggaaagaatgagacaagtttgcgcattgacgcggcttggactctggggtgctgaagatgctggtggtgatgaggtggaggatgctggttggaatgatggtgatggcaatggctcatttattcagcatccgtgatgtgccagacactgcactaggcgctgtgcaggcactatgccctgcagttctcgcactgcctggggagtagaatgtggtacccatgtggtggctactgtcactgcgcccatttcacagatggggaaatcgagcctagaaaacaccccgaggaaacaatcacacgaatccaaaatgtgagatgtttccatgacaactagcctggatgagctcttaaaaatatcaatgtcaggccaggtgcagtggctcacgcctgtaatcccagcgctttgggaggccgaggtgggaggattgcttgagccaaggacttcaagaccagcctgggcaacatagtgagaccctgtcttaataaaattaaaaaataaaaatcagtgtcacttacaaaagggtagaaatcttttctagaaaaaaagagtaaagagacaaaaaccaaatgcaatttctgatcctacattggatcctgaccagaaaaattaaaacagtcataaaaagacatttgagggacagttggtgaaattttaatatggacagcatgtgagattgtgttaggaaatcatttttaattctcttcaagagtgattcgggagttgtgtttgtgtaggaaagtgttctttgtttattttattttatttatttattttttgagacggagtcttgctatgtcacccaggctagagtgcagtggcgtgatctcggctcactgcaagctccgcctcccgggttcacgccattctgctgcctcagcctccccagcagctgggactacaggcgcacgccgccacgcctggctaatttttttttctttgtatttttagtagagatggggtttcaccgtgttagccaggatggtctcaatttcctgacctcgtgatccgccctcctcggcctcccaaagtgctgggattacaggcgtgagccaccgcgcctggccctttgtttattttttacttgtttattttttttgagacagggtctcacgaagtcacccaggctggagtgcagtggtgtgatcacggctcactgcaacctcaacctcctgggctcaggcgattttcccatctcagcctcctgagtagctgggact

SEQ ID NO: 82736 - DNA, 1003 bp, Homo sapiens
ggctggaatgcagtggtgcaatcccggctcactgcaacctccacctcccgcgttcaagtgattctcatgcctcagcctcctgagtagctgggattacaggcacccaccaccacacccagctaatttttgtatttttagtagagacggggttttgccaggttggccaggctggtctaaaactcctgacctcaagtgatccgcccaccttggcctcccaaagtcctgggattacagacgtaagccacagtgcccggccccatgttcatttttcttttgctcatggaaaggcatcagaatctaccagttgcccaaacttgaaacatgggagttcatcccgagctcctcccatccgctcactcaccgcctgcaatcagtcacagaccatgtgagtctccctgtgaaacagtgcgtgaattacatagcaactgtcttgtttcttatgctcatgatctctctagtggccttgtcttgtctctgctcttcagtaaactccatgagggtttgagctttgtctgtcttgttcccccttttatcctcagtacctaaaatagtgcctggtgcaaagtaggtagtcagtacatatctgttggacgaatgaataatcgtctatcacctcttcccttgaactgtttgtttcctctgttccctcctttcatatccattgcccgcgtggttgctggatgatctttgttttggtaggtgtcctgcaagatggtgccagggattcttgccttttgatattcatacgcttgtacaatcccctccccatgacgtgagtgtgggctggatgtagtgtaacacttctaataaatagaatatggggctgagcgcagtgactcatgcctgtaatcctaacactttgggaggccgaggtgggtgaattgcctgagctcaggagttcaagaccagcctgggcaacatggcaaaaccccatctctactaaaaatacaaaagattagccagaggtagtggtgcacacctgtaatcccagctactccggagg

SEQ ID NO: 82737 - DNA, 1008 bp, Homo sapiens
aggagaggaagaggaagaggaagaagaggaagaggaagaggaagaagaagaagaagaagaagaagaagaagaagaagaagcagcttattccaactttcttggacatgcttcttttcttttcttttcttttcttttcttttcttttcttttcttttttttttttttgtcgcccaggctagagtgcaatggcgcgatctctgctcactgcaagctccgcctcctgggttcacgccattctcctgcctcagcctcccgagtagctgggactacaggtgtccaccaccatgccctgctaatttttttttttttgtatttttagtagagacggggttttaccatgttagccgggatggtctcgatctcctgacctcgtgatctgctgatcttggcctcccaaagtgctgggattacaggtgtgagccaccatgcccagcctggacatgcttcttttcttagctagtaggtgaaaccctactcattcttgtattcatacactcacattgtttcaaagtaacaagtgtgataattgaagggatggtgtacaggcttctacaagctacactgtgaatgagatggtgtcctctcaccacggccctttccacctcctctccacccttctggagccacttgaggcattgaccctcacctccagggaagcaggaaaagtgtggagtctgatagataaaaaccaattctatttcatcctctgtgtcagtgattgattcagaaatccaggcctaagtcaatcaggacatggcatttgcctagagataaagaatgattttaagactgggcaatgacccaactaagtccagtgaggtccagagggaagtcagacaaggggctcatgatccttaagagcgagcctcaggatgcacacatctctccccttctggagattcctgagtgtagaagctaggccagcactgtagctgctttctctctatgagcctaggaatgaaacctatataggaatgaaccaagggaaatgcacccagagtcactggg

SEQ ID NO: 82738 - DNA, 1077 bp, Homo sapiens
gatcttggctcactgcaacctccgcctcccagattcaagtgattcttctgcttctgcctcccaagtagctgggactacaggtgcatgccaccaagcctggctaaattttttcatatttttagtagagacggggtttccctatgttggccaggctggtctcaaactcttggcctcaagtgatctgcccaccttggcctcccaaagtgccgggattacaggcatgagccactgtgcctggcccattcttgagtagttttatggcatgcatgtactacacagtttttagctaaagacccaagcatgaccatccatagatctctggaattctctatctgtgtggttctctcctctttggtactctgacctgcaaactagccactttggtctctacagacaccgagatacattgcttcaactcaagaagtccactgtgcttgggttttcccttcctgtgccactgtaccagtacctggaaactctcctcaagcagtaatctagggcaaccattaggtccacctcatttctttcccatctcttggggctcactgtcctcctttgcttgatgtctaatgttttgaaaacagttgttttataaattttgtctgcatttttagccgtttcaggagggaggggtaaatacagttccagttacttcatgttggctggaaacagaaactgttattcctcatcaaacatataatgaatgggctgggtgcagtggctcacgcctggaatcccagcactttgggagtccaaggcgggtagattacttgaggccaggagtttgagacaagcctgagcaacatggtgaaaacccacctctacaaaaaatacaaaaattagccgagcgtgatggtgcacgcctgtagtcccagctacttggggagctgaggcagaagggccatttgcacctgggaggtagtcaaggctaccatgttcacgccactgcattccagcttgggtgacaaagtgagaccgtctctcaaaagaaaaaaaagtctgggcatggtggctcgcacctgtaatcctagcactttgggaggctgaggcgggcagatcacaaggtcaagagataga

SEQ ID NO: 82739 - DNA, 2292 bp, Homo sapiens
gccccacttgctcgtgcactttacacacatgaggtgagcggaacaagggcctccctccgggcgggaggagccgcgggcgctgccgcagggcccgcaacccgcggcggcggcagcagaggcggcggcgccgggcgtccccgagacttcgggcctcggcgggagggcgcaggctgcgttgctgcggaggccgagcgggcggcccgggggagcctcgctgcgccgcgccgcgggggccaggccggggttgcgcctcgcccgcgccgcgggaccgcagtccgggctgcagccccgcagctttgtgagtccccctccccccgtcctctcccctcccccatccggccccggcgcgagcctctgccgcagcagctccgttttcacgcgcatctcgtttttgtgtgtgtgtttttgttttgtttttgtttttgtttttttgtttcagagaattggaagctaaagctaccaaagacgtagaaagaaatcttagcaggtaagatgggcgagctttccgtctcccgccccacgataatcgtatatttctactccgattcgccttttctgggttgagaagttcccccgtgacattttcttccgcacccggagagcagacattcgggagaagcggcctgggggaatactggagggattgcggggagatgcgtaattacgcgtgtgtttctttctttaaaaaaaaaaaaaaaaagcgcaaagcaattcttgtaaacttagttaaagcattctcacccttttagaatttaattaggggacttgtgcattaattactattgtaaatggttgcaggcattgtgtgactcatgattgaggcggcccttatggcgggctgtcaaactgttttggcttccccgttattactttgtagctcaaattgttgcttttataaaaagatactatgtgttcgcattcccccccgccccccccccccccccatacattgtagtcaggcggattctgttgcattggacacagttttgtccttgaactttaccaagcataagctgcgttttgttttccttcgaaactccatttctgtccatgttcggtgtgtgctctttttatcagctggtaaaataattaaaaatcttttctccagaagaggttatcgttcctgttgggccctgctgcttttgcatcaccgtgaagggagaatttttttttttttttaaacgatgtctttatggaatggaaatatttagcttcattgagctgtaattgcttaagcatcaaggaattgtactgtatttaactccttttcacattcattttctttcctaccgtcttttcctttcttattcccctttttcttttgcatcatattgggacactcagggaaacttagccaattaaccaaatccgtgaatagctttctttttttcttttttttcacttgttgaaaataaaatgaaatttctcctatctcaggttttaatgtagtttgctcttgatgattgcgggttttaggtttacattggggtttttaacactcacatttcaaatcgtctgaatattttgcaccgcgtagaattgttccaaattgctggcctattgagtttcataagatactaatctgttcaggtgatcgttaaagaatgtgttcagatggtgaaggataggcatcattggtttacccagtaagggattctctgttactcaaaataattatgggatcatttaaaggaaattaagtctgacatcactgactatttgtggtatatttacataaattttgtcaaaatctagtaaggaaatgttaagatatgaaaccattaaagaaaacaggttgagccattaaggtgtaatatcagcagaacagagcttagaggtctgtttctccttccatttttgttttatcaggtaactatatcagtataattcctatgaaggtgctctagtacttaattaaaaattgtctgtgccacaggtataattttaatattaggtagaactcgagtctgggttggctatttatcagagtttgaattccagctctgctacttgcaatatgaccttgactcttggcaagtcacttagcctctctgtccaatctataaaacgagcggcgtgggccagccagttgctgaggtctgttaggccctttgggttacataaaaggagtaaagtgctgtccgtgttcacagagggcatgtacagtctagtagaaagactatcataaatgcataaataacagtagtactaggtagatgacgtaggaatcaaaagataccatcccattcatgtgcttgagaatattcagtcggtcagaaggcatgaaaggaa

SEQ ID NO: 82740 - DNA, 1379 bp, Homo sapiens
gagttcgagaccagcctggccaacatagtgaaacctcatttttactaaaaatacaaaaattagttgggcgtggtggcatgcgcctgtattcccagctacccgggaggctgagtcaggagaattacttgaaccctgggagcggagagccgagattgtgccactgcactccagcctacttgacagagtgaaactctgtctgaaaaaagaaaaaaaaatcttttaataacatggaagcctagaccctattatgtagatcctcaatttggaagccctggtttctgaatgtcaaagatgtgttgccattctccttttcctctgctaagctgcaaatcctcaagacagtgtgcctggtagccagtgccagttaaacaacattggcacaaataataaatttagtttactatcataggtaaactgtcttttaaaattcacagttggccattaaaattgtcacattatgttagtatcatgggagccataatatctacatgagggcgattaccattagaactgaactttgaagaatggaatcagttttgaaaggcagataaaagggcattgtaagaacaacaacagaagtaaggacacaaaaatccagaaagtacaggagattttgatattgcagtgggtagttcaggttatataaggtatttgtagcaaactggttaaggccagatatagaggttcttgaatgtcaggttgaggaacttgtgcataaatttttaggtatgggagctattgcatgctttttgttgcgtactgatgtgatagaataatcttctggtctgggattactaaccaggtgtatttatgggagaaaactagcgatctaggcaagaagcgatggaggcctgaattgaagtggtggcaaaaagaggtgagtgaggctggacccagtggctaacgcctgtaatcccagcactttgggaggccaaggcaggaggattgagcccaggagtttgagaccagcctgtgcaacatgataagactctgcctctacaaaagaattttaaaaaattagctgggtgtggtggtgtgcacctgtagtcccagctacttgggaggctgaggtgggaggtttgcttgagcccagcagtttgaggcttcagtgagctgagtttgtgccactgcattccagcctgggaaacagagtgcaaccctgtctcaaagcaaaaagagagagaaaggaaaaaaaagatgagtgtataagatactgaggaagttaagaatctgggatttgacagctgattaggtgtcagaggagtcaaaaatacataggaatcttcatcatgggtgaatgagagtttgacccaacctctgaacagaacaagtcagagcagaaataggagtttggggagagaagatgctaagttacattt

SEQ ID NO: 82741 - DNA, 1080 bp, Homo sapiens
aggtcaggaattcaagaccagcttggccaacatggtgagaccccgtctctactaaaagtacaaaaattagctgggtgtgatggcatgtgcctgtaatcccagctacttgggaggctgaggcaggagaatctgaacctgggaggtggaggttgcagtgagccgagattgtgccactgcgctccagcctgggcaacagagtgaaactctgtttcgaaagaaagaaaagaaatgactaggacagcaggagtaaaaccccaaggcattaggtctccgtagctaaggtggatcccactcatgcaattcatcaacctttgtctgaaaaaaaagaaagaaaatctgattttgttaagcttttcttttgctttgctgtgatacggtttgcaggccaacacatgcatattgctataggttggtgcgaaagttaattgtggtttttgctcatttttaatgtaccaacccaatatgctttttttccagcttaatttggcaattaggtggtaaatcacttgataggataaattaatcacaatctgtaaacttaatttaaaaatgtgtaacaaccctctgtggaaaatttgaatataaacatcaaaagaataccattctgtaagctcttttgatttttggcatctgaaatgtctgaaagtataaattgcaaaacatatttacaattttaatgacaactgcaaaagtattgcccatgattggaaagactaaaatggtatgcgttatatgtattctgttcaggctgatgcatgataaatctctcactgaaaaaacagaaatccctatctcattttaaaattttaaaaaattggccgggcacagtggctcatgcctgtaatcccagcactttgggaggccgaggtgggcagatcactggaggtcaggagttcaacaccagcctgaccaacatggtgaaaccccatctttactaaaaataccaaaattagcctggtgtggtggcacatgcctgtaatcccagctacttgtgagggtgagggaggagaatcgcttgaacctgggaggcgagggttgcagtgagccgaaattgcgccattgcactccagcctagcctgg

SEQ ID NO: 82742 - DNA, 1436 bp, Homo sapiens
tgaggttacagtaattacaggtctttgtatttaaatcgatcagccataatgattactgcttttatgaagatttatgccaaaggtagctcccttactgtgggacataaaagttgcttgttttcagctttgaccagtgatgaactgataaccctggtaggaaaatgaaacattggggctgggcttgtaatacgctttcttaaaagaatgccccattgaaattagagtggcacggtgccaccagaccaagggttctcatcccgatgccacagagggaccacaggtgttatgaagtggtttgcaaaattgaatgtatgccaaaataaaataataaaaataaaaataaaaccccacaacaaaagcagatatggtctttagtgctcattagatctcaaagggtcattactcctcaaagattaagaaactgcttctttatgaggaggttgtcagaggagctgaatagtatcaataagaggaagatgtttgagattcaaaaggaagtaatattcgactaaggcatagcttctttccatcttaaaaaaaagccacccatgaaaataaatatagtttaaatttcctatttaagatgtcttattttaaaaatgatttgcatactctgtgtgtttgagttggctatgaaggagaaatcctagcatttccactcttgtaactagggaaaagcattttgaatttttagcagtagtatattatgtgatgatgactcagctgacttcccgtttcaaatggaatgttcaaaacagattgaaacctggttgaagaattttatactttgaaccttacaagatattttctgcaaacagtgactgattggattttgtataataacaaacaagattaagccaactcagttgttttgctgttcttattagtggttttcagtcagggagcacttattgagcagtttgctgcaataatattgaatatttttagagttatgacgtctgtgttttgttgactttggtcccttctttctcccattcttttgaagtttccctaaaacatgtgtgcacagacgggagagaatggtagttaagtgtgtgctgattttaaatgtccttttaaatatcatttattccttgataattgactgtataactgatgtaagagaaatatgttttatatgttattccacttgtgaatctctttgcaatgtgaggcatatagtgaaaatcttacaaagatagggtcataaaatgtgcattctctacactgctgcaggttaatcgtcctcgagccacgtttctgaggcctgtcagtcactatttcttagaaacctttgttggctccttcccagtgactctggaattaaagcccagactcttgttttttgctcagcttatcaatttagcactgtcccttccaccttttgccctgtccctaactcttccttctctgaatgtacctttcagtttctctca

SEQ ID NO: 82743 - DNA, 1324 bp, Homo sapiens
cagctttattcagataaaattcccatatgataaaattcacccttttaaagtccacaaagtgtatgatttaatggtttttagtatattcacagagttgtgcaatcagcaccactgtctaattctagaattttcaccccttcacccaaaaaccccataatagcagccactccccatttgtcccttccacccagcctctggcaaccactaatctactttctattataactctatggacttacctattttcgtttaagtggaatcatactatatgatacttttgtacgtgacttgtcttatttagtgtagtgttttcaaggttcgtccatcatgtcgcatatatcctttattcctttttatgggcaaataaatttcattgtatggctattgcccattttgtttgtccgttcatcagttaatgggcatttgggctgttctaactttggggctattatgaataatattgctatgaacattcatgtacaaatgtttgtgtggacatatattttcaattctattggttatatacctaggggtggaattgctgggttatatggtaactttgtttaacttttgtttgtgttgttttgttttgtttttgagacggactccctctgttgcccaggctgacgttcagtggtgcaatctcagctcactgcaacctcccaccttccaggctcaagccatcctctcaccactgcctcccaggtagctgggactgcaggtgcatgccaccacgcctggctaattttttctatattttgtagagatggggtttcactgtgttgctcaggctctgtttaactttttgaggaactgcccgactgtttgcaaagcagctgcacagttctacattctcatcagcaatgtatggaggcactaggttctccacatcctttccattgccagcatttgttagggttcttgtttctgattttagccatcctaatagatgtaaagtggtatctcattatggttttgatttacattttcctaatggctaatgatgattagcatcttttcatgtccttattggccattcgtatatctgatctgagaagtggccattcagattcttctcccatctttaaattaggtgatattttttgtcattgaaaaaggtctttatatagcttagatacaagtcccttattagatatatgatttacaggtattttttcctattttgtggcttttcctttcacttttttttttttttttttgagacagagtcttgctctgtcgcccaggctggagtgcagtggcatgatctcagctcactgcaaactccacctgccaggttcaagcgtttctcctccctcagcct

SEQ ID NO: 82744 - DNA, 2953 bp, Homo sapiens
gtctgtatgcatttgattattctagatacctcattagtggagtcatagagtgtttgtccttttgtgactggcttatttcacttagcatagtgtcctcaagatttgtccatattgtagcgtgtgtcagccaattgatttttgtatgttgatactgtgttctgcggctgtgctgaacatgttcattagttccagtagtctttatgtatctggattcattaggactttctgtgtacaagagcctgtcatctgtgaatagagacagttttacatcttcttttccaattttcgtgcatgcttactcacacacgcactctcttttttctgactggaacctcgagctcagtgtcgaataggaagtggcaagatcagacatccttgtcttgttcctaatcttgaggaaaagtatgcagtctttatcattatgtatgttgtgagctgtgggcctttatcaggttaaggaagttttcttttattcctgttttgagtgtttttgtcttgtaaaaggatactggattttgtcagatgctttttctgtgtctcttgaaatcatcatgtagctttgtccttcattctattaacatggtgtatttcgttgattttcatgttaaaccacccttgcatatctgggataaatccactttgtgtagtcctgtttgttgctagatttggtttgttagtcttttgttgaggagttttatgtttgtattcataagggttattggcctatagatttatcttttgataccttggttctcttttggtacctggtacctgatttgctctggtttgcaatctgggacctttagctgttggttttgcgtccacctaattctgcattgtacaataataattgtttttatgtattcagttttattttctactgtatgcacttcctcctttggttgcaaccttctttgcatcctaaccttagcttagtgcagtgctttgtgcctagtctctcatggctagcaattagtgtacactttttacattttatttatttattttttgggggacatggtcttgctctgttgcctaggctggaatacagtggcgtgatcgtggctcactgtagcattgaattcttgggctcaggtgatcctcgtgcttcagcctcctgaggagctgggactacaggcatgtgccactgtacctggctaattttttaatttttgtagagacagggtcttgctgtgttgcccaggtttgtctcaaactcctggcctcaagtgatcctaccaccttggccttccaaagcactgggattacaggtatgagccaccacacctagtcccactgtacactttttacatgcatctgttaagtacttcatctgcattacccaattaaatcttcacaaccacccattgagggaggtacagtttgagacgtctcataaattagatgatgaaggcttcagagaaataaaataaattgcttaaggttacacacgtagatggtggaattgaggtttaagaccacttctatttgacatttggacccaggggtcttcactgcatgctatgctgcctaggaaatgcttgtttgaatagattggaattgaactggtccttaaaggaaaagtaacatatggataagagtaagaattaaaagagtgcatttttggcagtggtgttggtgttacagtgttagtaaaggcaaggaagcaggaattggaatctaattagagtgcccagtgacagggagtattgtacaagtaggactgttttttgtctccagagcagtaattagtcctatttggaagagtgagattaacatctaaaataattagaaaatgtctgggcgcagtggctcacgcctgtaatcccagcactttaggaggccgagacaggtgaatcacctgacgtcaggagtttgagaccagcctgtccaacatggtgaaatcttgtctctactaaaaatttcaaaaattacctgggtgtggtggcaggtacctgtagtcccagctgctcaggagtattgtacaagtaggcaggagaatcacttgaaccagggaggcggaggtggcagtgagccgagatcgagccattgcactccagcctgggtgacagagcgagatgctgtctcaaataaaataaaataattagaaaatgagtattgtttaattagaggtcaaggatgaggtttgtttggattggaaagaatcatgaagggactagtaattaagccttaaaagaagagtaggatttgggtgggtagatgtagcaaactgagttttgggtcagccttaccacagccttgtaccatctgacaagtcattaggactttctgatcctcaatctctttaactgtcaaaggggaataataccagtgctatgtttcagggttgtgagttcaaaatggataatatctcagagtactttgtaaattgtaggtgtttctgtccttatggtggagtatctattgttttctaagtttctaaactcactaactttcctcaatctgagcttttaattaattttttattattatttttgagaaagggctttactctgtcacccaggctggagtgcagtgtggaatgatcttagctcactgtgcgacctctgcttccctggctcaagtgatcttcccgcctcatcctctcgagtagttgggactacaggcatgcaccaccacacccagttaatttttatatatttgtagagacagggttttgccatgttgcccaggctggtctcgaactcctgggcccaagcaatctgccttggcctcccaaagtgctagaattgcaggcatgagccacctgcagagctttttattttgagttaatttccgatgtagagaaatgcaagaatagaacaaagaacttctgaatatccttaacccttaatcctcaaacattaacatttaatcacatttactttattccctctttttatacatactgttttttaccatttaagagtaacttacagacatgatacccctt

SEQ ID NO: 82745 - DNA, 1702 bp, Homo sapiens
ccttccttcctaaggggaagacatgccagctaaagctaagctaagaaatatacagcattgctgccactctgtctgttgtcctcttttgtgctcatactctgtcacaaatatatattttttattaatttgtatatgtacacgtctccagaatttctttatgcacgtacaaggacatgtaaatatatatatattcatatccctcccaacacaaaaagatagcacactgagccttagattttgttttgtttttccagttaactttaagccttcctgatcctttcacatcagggtgtagaggagacctttgttttgcagctgcataatattccattttatggatatatccattttatttaactactgtatttgcagataattgtcagttattgtaaatagcatgttccccacccttcaatacgatgacccctttccacttccagataactattagttgtccttactttaaaaaatatgcaaaacttcattttatcctattctcttcattttacagctgaagcttttgaaaaaccgatccaaatctccaacttccttacctatttttgctccagttcagttttcatctctactgtctggtgaattctatagttttgaaggttgctagtgacttcctgttgtgtagtgctagacaggttttggtgattaatttaggtaggaggataaaaatgagaaaaggaatggggggtggcaatcaaatgggaaaagaggaagactggaaggaaatagaagaaggtgggatctgcatgggagaaagtaggagaacagaatgttttttggcagaagatgtaaagtgtatttttatttctagcttgtaacatacagctggcttctatgtgaggatgagctagcttgtggtgtgttgctgactgataggctagttgggccctcaggaaagttgcttcctgttttctgtctcctaaagcaaaatagagacacctaaccccttgtcccattattgtcatttctccctctgttgcccagggtggcatgcagtggcacaatcatagctcactgcagcctccaactcctaggctcagttgattcttgggcctcagcctcccatgtagctgagactacaggtatgtaccatcccccccccccccagctaattgttaggatattttgagttatctcagatttattctttgcttgcttttttcactgccaccatgctagtttggggaactacacattcacttagattttcgcaacagtcttctcacccttgtttttgccaatttattgcctattcttacccaacattttccctccctttttcaattccagtcagtgctggtccctgcaattgtcatgctgacaagtctccatacttcgcttgtgcccacacctttctgtgctcctaaaaaatcttgcctcttttgcaagagccagatcaacttcttactgctccataaagccttccacagttgaaacagctcttatacctgtcttacttcactaatcttgtttacaacctgtaccaaatgtttgcttgttttcttatttcagatgtgttcagttgtttctacaaaattgtaggaatttttttcctataaaaaaaatcatgtttcctagctgagtgcagtggctcacccctgtaatcccagtactttggtaggccgaggtaggaggattgcttgagcccaggagtttgacaccagcaccacctcattccagctcgggg

SEQ ID NO: 82746 - DNA, 1131 bp, Homo sapiens
ctaactggagtgttgtcttggtggcaggtgcatcaaacagggtggcccacttaggcctttcaaatccatcagtccttgctcctcttgatagttgtggtaaatgatatagtcagatgtcttaagtgagtctctatgaacatttaactcctggaagctgacgtgtttgggcacaggtgttgttgttgtttttccagttggctttctctgaaggaggagatatgggaaaaagcatgactggttggctgtgatgatagtgttgaagaacaaaacttactcccctctgtgcttacagtatcggctgatactgtgatatttccttgagaagaaatgtctggtacatcttttaagtactaaaggggatatttttggccaggaaaacacttgctagtaacctcatcagaaagtcttgaaaatgaagtttgagaaaggagaaaatactccagatagagaccattacatggagtaaaattatagtgacatagaagatcagaaaaggacatgtctgtaattcacagcagaacatgaagaacaaatgctgaaggtgctagatgtttctgaataagtacctgtgctattttgacacaagaagggtaaagacagccttttgggtgccactgaggactggtgagttggattcatggctaggcaattgagtgcttactagataagctttgtgctaagtaagcagtcctaattcttataaaaatattaagacattgacatgtatggtcatttgcccccagttttttcatgaagaaacagaggctgaagaagattaagtatttttaactagtaatcagcttttaatcttgacttctgcatgtctcagggtaggtaacatgacagtggtgtaacctagttgccgttgtttactgattttactctgctgctctcatatgctgtggctttcttgctccttgacttccctgggattgtagtgtgagtgagcttgttcagtcttactacctcctgcacacagaattcaaaagagagtgagtcatggccacagttggcaggaatctgttatgttactccattagccacatgacacttctgcttgtaacaaaatgacagcgaagtatagcaacagttatcatactcttcttccagttatccttttagctgatttta

SEQ ID NO: 82747 - DNA, 1041 bp, Homo sapiens
atcacctatttattaataagttatattctaaaaatatttacaaagctttttagagcaaggaaaactaaaggtagcttccagaaacctaggtgagagaggattgtggggaggtctcaggcattgccattagctactaattgatacttggggccagtagcaaggtaactccagcttaaatgatgaagtttacattctaggattggaggaaattgcttgtttcccaatgtaaaatttgctaattttaggttgtcttccttgatatgatattgagataaaagctgtgctacttgtggcttattaaagtgaattgtaccatatagtggctatatagttagggttaggttgcaggttgtgttttatttcaatgaatgataaaataataatttgccatgtcttctaataagagtgaaaaagtgaaaatgaatctgtatgcaacattatttttatttcttaatacattttgggaaacttaattgcaactgtgtggttcagggatttagtgcaagaagaagaacagttgatggaagaaaagaaaaagaaaaaagacgacaagaaaaagaaggaagctgctcaaaagaaggtagtatgtgtgtaaactatttatattaagcagtttaaacatagaattaaaaaaaaattactcttacagattttgaaggcatttatttgatttaatgttttagctttaatggagattcattttaatatttaatgtctttgaatatgcatataaagtaacttgctgagtttgtacaatttaatgcatatttaatcttgtcaatagtttttcaaaggtaagtacattttatggatctttatctttcaaatagctgttcctaggtgtttcataatatatcattttataagtgggaagagcatggaatttgcagccaagttgagagtatttgaaatctcactctcccacatagcacatagaatggtgtgactttagattttatttagcctctctgggccttagtttccttgtgttttgttaaatgagggttgaattgagatgatgttattatatgtaatacagaa

SEQ ID NO: 82748 - DNA, 1028 bp, Homo sapiens
attaaagtaatccacagaatttgtttaaaggatatagagggagagtcagcttagattgactcgcaggttccagatgagtgactacatttgagaggagttaatcaggctaggggatacaaagaaaggagaaatgataaataattcagttctgcatgtcctgagcctaggggtgtcatcagcaagtattaggggaggagaattaagtatgagatgagaggagatgatgtggccctagccacctgccttttgcttgctcttaggggtgcctgggaagggatgcataggtatatgccatggttagggttttggtaggcttctcgtggtttggtattgatggatgtcttgggcctctgtcagaggctgtttatgtaggacagtctttgcagtctggtcggtcattgctcgagatttcttatgagaaagttgtgtcctctgtaagtctgaggttggggtaaaggcttatcagactcttgttccatggtgtgaaaggccatttgcccaatgaaaagagcttctaagaaacttaagaggtttattgaaaaggatggttggatatactttatgtagattcagtagtttggcaagcatctgagtgttgaattaggctctgttggtccctgtgtctaaggagttcaagaattagctgataagtcagaatgtatgtgaaatggctagagaagaggcctaagacaatatataagcgtatttgtttggaatttattctatttactgagaaattttaagaaagggaggggtcacttgaatgatgtctttaaatattgtatttttgtgaatataattttaaagttgtaacatatacagcaatggctctaattgttacaagtaaatctttacattcttgtataatcaaatctctaaatcaccaagtcagtataagtggtcacttatgtgtaggcagcttataaataagcctgtaacacatgagtggtgattattgtgccatttgacttctcaccaaatctgaagtgacagcttttcatactgttgcccacttcattcctgtctca

SEQ ID NO: 82749 - DNA, 1683 bp, Homo sapiens
aattgtgagtcacagggtttttaagacaggtttcctggaacttgtcttttgtcgctagtaggagccagcaggtgtatccaggcagatatctacatgagccaggtgggcaggcccatttatataaatgttggcacataaactcactacagtaaaaagtattttatgtaatttatattttcttatttttgaaaaaggccagatattatctgttctaatacatttgttcatttttaatataaggaacctaagcatcagaatgaattaagtgattgaccttggttttatcatggtgacagaaccaggaatataattgaaatctctctcctccagctggtgctttgccaaaaccctgtgccatgactttatccttttcatgcagaacattatcttatactttgctttattttttgtcatttaaaggtgaactttaaaattggaaaataatatattgtgataatttttataatagggtataaaataggttcttataccatgaatacagaaaatgcatacatttaatggtccccagtagccactgtggtttttttaaaattaacaccatgggttattttctattttaaataaaaagccagataacacaacttcctataaaaacaattagacaccgacgagccttacaacgatattttcgttttgatagtttttattatcctatcatttaaatattaatttacatatttagattctttaaagagctttttcacattaaaaacagggtgatttgtattgtatttcagccccaatacatttctaattaatatggagaccgatgacttttgttcttaaaattttttgaaaagccttttcatcaaagattatgtataacactcttttctgtttcatatctaagaaccagggctattattttctgattcttgggcttagaaaataatttgacagagcatggaaatgtagtttccatactttaaaaaaaggaggggggtgacagtagtagcagtaggttaccatggatttctctccaggttctgtttttagaagaaatttctccaagggatcttaagggaaatgtaatgaggaggaaaatagaggttgagaaataggttaattatagaggggtagtttagtgtaacctttacttgaagcatgcaattgtagttcctagaaagcatataatcgttgaaggccgaggggaagcaacaatacaagttgggatctcttggtgttgagaatgtttcaacatccatgggctttttgctgttactgtgttaagagctgaagggatttttataggtgttattgacttaaatataccaaattcaagtttaaatgagacctaggttttagagagcttccagctttattgccatttttgaggatcatattcagcagcttaattagtaaattttctcagtaaccttggtggtaacatgaccaggcctgagttgtgctctcatagagggcagttaggtgttctcttacagtcttgcccctcattgcaccttacacttctcttttcctcttttataaaactcattttattcaacagatctggattctagactgagtgctgattgctaagtcataggaaagctctctgagcactaggtgtctcatttaaaatcagtgaattgagctagattaattctttattcttaatgttaggttgtaatacttggcactgttaagacattgtagatgatc

SEQ ID NO: 82750 - DNA, 3941 bp, Homo sapiens
atctgcctgtcttctgcctcccaaagtgctgggataacaggcgtgagctgcacctggcctactttgggtttttatgtggtcattgtttctatgttctgaaacttagtttccattggaagtaaattgtgaaagagaccaggagagtgttttttgtctgtttgttttgtttttttttaagcctttcaacgtgtaaaagaaattttctgctaattctttggcttcagaagattatgcatcttattgtttgacatgacatttctgatacctaaaagtgttcatatactaacttctctctaataagacttgtttttctactctcagattttaaaaatgattttcccagaaacaaatgaagtgttgttagctagttgactggttgtttggcattgtctttccatcaaaattttttttttcatttaaattttgatccatagagtaaaagatgagcctccattattttgtatttcactagtgctctaaaacttagcaaagcacttacgtggtggagcaagactccctggctttctggggaaagattaatgtttggtgtggcttcaatattagggagttactatagcttttacccatatatctataatagtataatttaaaatggtatttttgataacagtaatttcatataactaagcaaaatgaattatgccccatggcagctaagaaaagctttattgctatttagaaacaacaactggttattcagttactaattattcagtcttttctcacctcctttcctgttcttgtatctgttattttcaggattcccataatattgatcttgatcaacagattgatgttttgcttgggtttttctgtctgtggttctttttgaagcccttgggagtttgagctagtcacctcgagttaaccctgctgtcctcaagcccctctcctcagttgtggtgtcagaaaataaaggaagagcagacattggaaggcagtgaaagcagagttcatgtcagttcagcttctgatcacagtaattttaacagattgtcagatgtgtcagaagtgataaatcagtttgaaatttttttccactcaaaaatacttagatacttaaaagttgactaagtttaattgcaatagcagcctaacctccaggagttaaatttattactaatttggctaaagtgattatatgtacagcttttcttacagaaaacctaattcgtctttttatcacttgtaacaatttttgaagccatttaaacatgcaaaatatattaaatccattaaatgtaaaggtgacagtttgtataaaaatcatttttaaaggacatgagaaaagtgcagctcccatttaaaaaattatatactgtcatacagtgatgtcttctatgcttagtgtcacaaaaattaggtattttaaattaataaacatagtatcagggataatggggcacatctgtgggaaaagcatgctttccttgcatatcttttcctgtgcagttcatctatttgagaaattccttgtttaataaaggtgtatatgtcttatattaatatatgaacattttatcataacagtccatttctttcagtttcatatttacattgttttttgtttgtttgtttttattttaggccactgaacaaaaaatcaaaggtacgttgtttaaagctattttttatcccttttttcattaaagcaaggttgtttatgtgcatttttgttcacctcaaggatgggagagagaagagcatgaaagaagcggttgggattagccttcttcagtaacataccctggggtcgtcctttggaatttcatggttattgtggtgtatgtgaccacatttagagtgcactgcctcagacctgccttaaagctgtgtcataggataagagtaagcactgcttcctaatgtactcccttgttttgactcttggggcacaggcacctttccttcagtcttccttctaaaagtcttcttgtgtggggtaacctctaggaccccactgtatcccttaagagttctgcctcctttatttcttgttctctgaagaatgtcccccattccttcttatagacagatagtgacatccatctctgtattatcacttagaatagtagattgcaaaccttacacattgtgtcaggtttgaacagcacccattagaccccaagcaaaagacatcggagtgataaggaaacaggacactaattcctctcagatcctgaatcaggagttcttcaccctcccaggagctacttggtaataaaggtgtaaagctctcaggtgctgaacttattaagcctcaagattctgaatttttattttaagctctatcaaaagtataatcttacccctcaaaaaaaagatgaataaaggaatgaaatggttcaaagaaggaatgaaatggttcaagcatgattcaagacacagagataagaaataacatgatgtggcttgcagtggtggaattccataacatgatgtagtatgcagtggtggtattcctagagcgttaaatattcagtgataagtgggcagggttgaggctgaaaagatagataggggccaggtcaaagtgggttaatttatgtgctgtttgtaccaacaagcttggactttgtatgtgacaggcagttaggaggcattcaagacttaagcagagtgacatggtgctttgttttacgttgttttccattttttaaagctatcaactactgtacatggaaagtattggttggaagacaggtagggatttgaaaggtagagctaagagaagaaaggcattgtgagcagaggaggcaggtagacagcatggggaatacgacgtgcatcttttgtctctagagttggggggaagtgactgaatataggcctggagatagagggagccacagggcttcatgctggttaagccagcaaaggtgtttggatttggaatgtcatggtcataagctgtggaaatttaactttgccagtagtgcctaaagtcaccaatagaagcaagattagagagggtcatgagggtttgaactgaggtcttggcagtagaggtagaaggtgggtgacagatgtgtgagggataattgacaggactggcaactgatgagatcagaagaggagttgaaggcgcatttgtggctttgaacttggaatgtctaagacagttacaaggatgcggaatgtagggaggaacattgccaaattagtaggaatgttaccaaattaattttcctaaaactctattttccccacccctctcccccacatagcaatggtaagttgtccctatttgttcttgcttcaagaccaaactcctttgcttagctttcaaggccctcattaatctaacctcccttgacctaaccagcctgtttcccatcagtccttatactttttagagcattcttagctctttcatgttcattcttgtttcttttttattcaatttatcagccaaagatgtctttatcaggcctttcagctttcctaaacctctcagagttcatccttgaatgggtctctccaagtaccattgatctctccctttccagtttcttaggatgttataatctcaaatttgggcacttggttatattcttacatttttgactgatccttggatatttgtttcttcaacatctttgagtacctagtgtttatatcatttctaaatgtaaataattttcttctagccttacataaaatatgaacatatttagtcttcttgtttttagatttttccacgactctgtagatgataggctgagtatatgaaggtcacttcagaatacattttgttgttttgccagtgatttcactcatgtcatccttcttttcacgctgtctctcttcataattgttcccattttttctgattcatgaaaatgtattgttttatttctgtgctatgtatttgtctaggtagtatttatagtttggggttcacatagtggttagagatt

SEQ ID NO: 82751 - DNA, 2033 bp, Homo sapiens
cagtaatccccctgtatccacagagaatctgttccaagcctccagtggatgcttgaaatctcggatagtactgaacctcatatatgctattaataatatgctttttcctatacaacatacctatgataaagttcaatttataaattaggtatagtaagagattaacaactaataataaaataaaatagaacaattataatctgttgtaatagttatcagaatttggtccctctctcaaaatactttattgtactgttctcgcctatttttgtactgtggctgaccatggggtaagactttggaaagtgaaatcttggaaaaggagggggactactgtatacctagaagaggaattgctgagtcatatggtagttccagttttaatttttgtgggaatccataagaccttaagtttcccaattacaagccttctattataacgaatttcaggaactttgatggcttcataggggttactgtactgcctggattctcagaggagaaaactgaggctcaagtagtttgtaacttcaagcatgtaacctaatgatacacagagaaaatgatacttgcagggccattagggtaaacagaaaaggccactcacagctgaagatgacaatcccagagagtcaagtctagtcaccccatctccccatagcctgtttccatcacacaggttgggtagttctgctgttacagttggggcttagttcactgtttttctccacagtctacatagtagaaatgatttttgtgttgtagggtggtattaagtaataataccaggattttaaatgtgctacggtggttttttatgagatatttagaaggcatatgtgcactaacctctttaaaatagaagcataggttcataccggttaagaatttactaatggcaggtatttttcttcctgtggaagatgtctttgagctatgtaacaaataagatttgtagctctgcactaacagaatgaaaaaaaaatggccttccactttcatgggaaatagttaataaaatgattatttttaggtagatcatgtaacaaagtcactattttttctttcctcctattgtgaaaggaaaatgatttccatagatttatacatgtaagtctagatttatgtactcagggaggctatgaagaatgctaaggagacccgttttggctttaggcaaggattatttctaacaaacgtagatttgttgcttttaaatactaatacatttattaaatttggtagaaatttatgtctgatgagactgatctacaggacaaaggaaacaggaagtagatatgaaaaaaacattaatggctatgaaataatttttaaagtggttaatcggtacttagccctttatttttagagagtttgtttttgcccttataattaagatgaaaataatgtatactagaaggaacacttgtttgggagtcacattgggttttaaatttcacctctgccatttactagacgttcgagcatgaatagctttctgaactgcatttgcctcatctgtaaaatgggaataatatttcaaatttatggactcacaaagagaataaagagataacagatacattgcctggcatctagctgatacttggtaaattttaatatccaccattgtggttttgcaatatcctagcaacctttcagtcccttgaaatgacatgctagcagtttctccagctaattcagggttcctccatacccagaagtgatttgcttttgcttcccattaaagtagaacccagcccagcaaaggtgaatcacagtgcagtgcaaggaataggtcttaaaacatgaggatgggatctatcaacttcataaatttggcaggccaaaattggtcttttttctttgacttgtatttatttgtttgccatgcataatcacttgtacttttttctttttatcttttttttttttttttttttgacgtgtagtctcactctgtcgcccacgctggagtgcaatggcgcgatctcagctcactgcaacctccacctcccaggttcaagcgattc

SEQ ID NO: 82752 - DNA, 1046 bp, Homo sapiens
gtgttggcttggttttttgttttgttttgttttgtttgatctattcgtatttggcttttttacattctcatttttaatttttttagaatcctgtgctagtcaaactagacaactctgcagaccagccctgggctgccattttggggctgtgcctcagacacttattgatggtttaaattgagacttgagacctcttttttgcagttgaccacttagaccccaaagaggtgaaataactgtttaatatgggggcccacaaaccatgtaatgaaagtgaaggctttggggggatgactaggctcaacaggagcaatattgttcttataggccaaagtgttctatcctattttttatccacctgacatgatccatacagaaaaattaagaagactaacatagtgaacactcgtataccctccacccaaaactggtggtggttaacattgtcccatcttgacttgacacacctctctttctctctctcatatatgcatgcatgtgcacattattgttgaaccacttaaaagtaagtatgcaaacattatggcacttcaactttaatccttccacaggtaattatcctaagaataagcatagtctcctatacaaccacaataccattatcacccctaagtaaaagaacaacaacaatatcttctgatagtttatatccacatttttgctagttgtcccaagaatgtattgcttgcttgtttgttcacagtatgttagtgtttatataaaatataaagcatatagaacactatgtattgcttaggggatgaattcaaatgtagtgagatataaagatttacatgagtgattaccactggtatacctactggcgaaggaaagagagagaatacctgcgagttttttctgccatattagtaacgcatttcttaaggtgtatgagtatattttatattactcttttatggccttatctattatgtttgaagtagttttttttttttaaagaaaaagacatttgaggcataatggtgaatgaccaataattgggatgttttaaccaaaagtgttaa

SEQ ID NO: 82753 - DNA, 6710 bp, Homo sapiens
aattttggctattcacttctccttacctgtctttccatgtcaggcttctatgcctgggttgttccgttatcctaatgcgtagctgcctcctagaccttcttgactccaaaattcttttttttttttttttttgagacggagtctcgctctgtcacccaggctggagtgcagtggcactatctccgctcactgcaagctccgcctcccgggttcatgccattctcctgcctcagcctcccgagtagctgggactacaggcgcccaccaccatgcccggctaattttttgtatttttggtagagatggggtttcaccatgttagccaggatgttcttgatctcctgacctcgtgatccacccacctcggccttccagagtgctgggattacaagcgtgagccaccacgcccggcccaaaattcttttatttaccgatatgttaacaatgtattcattcagcaagtatttatcaaggggctgttatgtcctctaggatcttaggatagtatcagttgaacatagaaagttggtggctagaagataaccagtgcccttgtcaccattctgccaaggatcatagcttgttaaattgaggagccacatatatttataacatattcgtcatttttcttagattttagtatcattttgaaatggcctaacactttataaatagttgtacttctcctttatcctagatataaaccacagtacttcaggatcccattatgaaaattcccagcggggacctgtgtcttctacaagtgattctagcacaaactgtaagaatgctgttgtaagtgacttgtcggaaaaagaagcatggccctcagcccctggcagtgatccggagttggcttcagaatgtatggatgctgattctgcctccagttctgaatcagagagaaacatcactatcatggcttcagggaacacaggtggtgaaaaagatggccttcggaatagcactggacttggttcccaaaacaagtttgtagttggtagcagcagcaataatgtgggccatggaagtagtactgggccatggggtttttcccatggagccataataagcacatgtcaggtctctgtggatgctcctgaaagcaaatctgaaagtagcaacaatagaatgaatgcttggggcactgtaagttcttcatcaaatggagggttaaatccaagcactttgaattcagctagcaaccatggtgcctggccagtattagagaacaatggacttgccctaaaagggcctgtagggagtggtagttctggcattaatattcagtgcagtactataggccagatgcctaacaatcagagtattaactctaaagtgagtggtggttctacccatggtacctggggaagccttcaggaaacttgtgaatctgaagtaagtggtacacagaaggtttcattcagtggtcaacctcaaaatattaccactgaaatgactggaccaaataacactactaactttatgacctctagtttaccaaactccggttcagtgcagaataatgagctgcctagtagtaacacaggggcctggcgtgtgagcacaatgaatcatcctcagatgcaggctccatcaggtatgaatggcacttccctttctcaccttagcaatggagagtcaaaaagtggaggctcttatggtactacatggggtgcctatggttctaattactctggagacaaatgttcaggccctaatggccaagctaatggtgacactgtgaatgcaactctaatgcagcctggcgtaaatggtcctatgggcactaactttcaagttaacacaaacaaaggaggtggtgtgtgggaatctggtgcagcaaactcccagagtacatcatggggaagtggaaatggcgcaaattctggaggaagtcgaagaggatggggaacccctgcacaaaacactggcactaatttacccagcgttgagtggaacaaactgcctagcaatcagcattccaatgatagtgcaaatggcaatggtaagacgtttacaaatggatggaaatctactgaggaagaggatcagggttctgccacatctcagacaaatgagcaaagcagtgtgtgggccaaaacaggaggtacagtggagagcgatggtagtacagaaagcactggacgccttgaggaaaaaggaactggggaaagtcagagtagagacagaagaaaaattgatcagcacacattactccaaagcattgtaaacagaactgacttagatccacgtgtcctgtccaactctggttggggacagactcctattaagcagaatactgcctgggatacagaaacatcacctagaggggaacgaaagactgacaatgggacagaggcctggggaagctctgcaacacagacttttaactcaggggcatgtatagataagactagccctaatggtaatgatacctcatctgtatcagggtggggcgatcccaaacctgctctgaggtggggagattccaaaggctcaaactgccagggggggtgggaagatgattctgctgctacaggaatggtcaagagcaatcagtgggggaattgcaaagaggagaaggctgcatggaatgactcgcaaaagaataaacagggatggggtgatggacaaaaatcaagccaagggtggtctgtttctgccagtgataactggggagaaacttcaaggaataaccattggggtgaggccaataagaaatccagctcaggaggtagtgacagtgacaggtccgtttccggttggaacgaacttggtaaaactagttctttcacttggggaaacaacataaatccaaataattcatcaggatgggatgaatcttctaaacctactccttcccagggatggggagaccctccaaagtctaatcagtctctaggttggggagattcgtcaaagccagtcagctctccagactggaacaagcaacaagacattgttggatcttggggaatcccaccagctacaggcaaacctcctggtacaggctggctggggggacctataccagccccagcaaaagaagaagaacccacaggctgggaggaaccatccccagaatctatacgtcgcaaaatggagattgatgatggaacttcagcttggggagatccaagcaaatacaactacaaaaatgtgaacatgtggaacaaaaacgtcccaaatggcaacagccgttcagaccagcaagcacaggtacatcagctgctaacgcctgcaagtgccatctcaaacaaagaggcaagcagtggctctggtaagtttctattttatgaaatcaagccttgttttaacttactgttattataagatttgtataacaaagtacttggatatgcacacaaaggctgttcttactgtaatccagaagcagcttgaaaaaaattataggggtgatgtttaccaccagagaacagaactccacttttggcagtgttgtttgagtcctgcacacttcattctctattagaaatgcaagagaaggcgaattggacaaaggcggtcaagtgggaatgctgtacacttctccaagttgtttttgagttaggccttaacttgtggttttattatttgactaaaatatctccagaaataaaacaagtatctcataaatacagtactctctaaacattaggttgtatatttggctttagaagggatttttttttttaagtaggtgagaaatccaactctacttagatacagtatatatgtttgtgtatttaaaacatttgacaatacctttctagtatatccttactttcctctctaataatgaactaattcctatctctgcaaattttcccaacaacatttttgttaagtgtgattggctacattgtctttgttaataaaagttttattgacttaatagtctcattggaagtggatatgggagtgctttcatgagctaactttttggcactgaattttttttttttagtctaagtatagtttgttgtattaatttaggtttgattcttaaaaggaagaagtatgtatctaagatgaagcctgttggctttgattttttttaatgaaacatttatggctttttttttttttttttttttttttgctttggacaacctcagcctaatacttcagattttaaaataagcattgttcagcatatgtaaaaagtaggtgacccattattgttagctgggtagtaaattgtttttccagtgtaggtggtgtggaaggggtacacttgtggcacaattttttttttttttttttttggagatggaggctttctccgtcacccaggctgaagtgcagtggcatgatctcggttcactgcagcctccacctcccaggttcaagcaattctcctgtctcagcctcctgagtagctgggactacaggtgtgtgccaccacgcccagctaatctttgtatttttagtagagaccaggttttgccatgttgcccaggctggtctcaaaatcctgacctcaggtgatccacctgcctcagcctcccaaagtgctgggattacaggcatcagccactgtacccagctggtacagatgttatacatacactgtcacccagcttatcacctgctccaatttacaaggtttggtttagaatgacttgactttttcaggaattaaactgatgctcaaaggagagtggttttccataactatgcaaaaatcagctctaggtctagagggtaattatgaaaaaagttaaaaaaattctcaccttatattaatgggaaatagtttgtctttttttaacataaaacagatgccatctttttgcctatcacagtatcattattcagtacataaacatgaagttcttcatccttggtccctaagttttctttattgtcccttattccactgcacctccttaccttctatgctgatgacttcttttcccacactttctaaaggctggggtgagccctggggggagccttctactccagccacaactgtggataatggtacttcagcatggggtaagcccatagacagtggtcccagctggggggaacccattgctgcggcatccagcacatccacgtggggctccagctctgttggtccacaagcattaagcaaatctggtaagttattgacaatgcctggtagctgttatgtagcagtggcgaacactcactgactataattaaataattagataaggtttctatgttatttataatatattcatataatgtaacatgatagatgatgttcagtattttgctctttgattttgtaacgtggtttattctctttctgaattttcctcttttctcatatttcttagaactgtaactattcatttgcatatacttcatcaaatctaaattatattttaccaaattaggttatctaggaagagtctactagcaactttcatgccatccagcctgagaggccaactagtgtagccatgaggacacatattcagactgtcagatgattccctgaaagttacaattagcatagttcagaaaagacccaagattgaaattaacattgtcattatcccataggctgtgtacaagatgcccggtaggaatcccaagggccatgtgtgaagataagatgctttctgcttaaggctttgaatactctctggccattctccctaaaaatatatataaaaattaattctttcaaatttcattcatcttctttgtcctgtgcatcactatgcagattattaagtgggtacaaacaagagtgctaccattgtccatgttcaagaactatgatttgttaaaggcatggaggagttttattaaatttttaaataagaatatattatttttcatggaaggtttagctcagtataaaacatactttccttctgtgcagatgcaggaagggaaataagtgtgcacgtgtgtgttttcttaggttctctacccaatttttaatatatacttattctccagaaggaattcttttattaaagtatgtttctctttatatcacaaatccacaatcagggccaaaatctatgcaagatggctggtgtggtgatgatatgccattgcctggaaatcgccccactggctgggaagaggaagaggatgtggagattggaatgtggaatagtaattcatctcaagagcttaactcatctttaaattggccaccatatacaaagaaaatgtcatcgaaggtaaacatttcaagggcaaagcccttgaaactttaaattccaaaggtagtttacccacagaaaattaacttttcgcctgcccatttctggcggtcagtacagtccaggcagcccccaccttaggtatagccacttgtatgggcagccacctagagaaacataagaaagaccacaggaacttcctttctccccactgctacagcttgggatttctctcttcctccccctccaccagtgctgcctgggacaacccctcatcctagggtggtgcctgcagtggtgaggatgaagaggagggcaaatctccatgttgactctttccatcccactgccagttcatctcccatttcatttcctcacctggagtcccccgccacccgcttacccagagtcaccatcctccttattcacctgtcatgtttgtccctatcccatcccaaaaggtcctgtgacaaaaatccctaggaatgatctgagcttggttttgcttttatgtgtggacaaatcatattcctaaagctggct

SEQ ID NO: 82754 - DNA, 1222 bp, Homo sapiens
ccttttgagggaccttagaagtcagataccagtggatagctggactaggtaactgccaaggttcctcacttttaatcctgggattctaagtctaggacctgccattttcatttttaaaatttttcatttggctgaatttgcctattgccttgccatatagcttatgaagtgcttttacatgttttacataagtcatttgatcctcacaaccatctaagataggacactgatgaatttgagactggaaaaggtggtgacttgcccaaagttgcgataactagtaagcgacagagtaaggacttaagtttaggtcttccagttccaaaccccatgttcttcccactggaccatgctgttttgtgactttgtctttccttacagggtctgagtggcaaaaaaaggagaagggaaagggtgtgtagcctttttactctttctcctttgtttctactagtaaaaatctttagaaagcaactgcaaacatttatttagcctctgctgtgtgccaggtactgtgcttggtgctggggattcaaatacactaagatatgagtttcacctttcgggagctcacagtctagtatggggcattaggagagcttcatagaagtgtcagcttgaatttggaagatgcttgggatgggatgtgttaaggaagatagtagcccaacataaccaaaatgtagaatttttaggaagaagtgacaagagatctggctctgtagttgaggcagattgtagtgtcttcagtagcatgccaaggaatttgaactttattttgtgtaaaatatggaaccaacgaaattgagtagaaaacaacatcagtggggtttttaaattactaattttaaaagaaagctaatcagtgatagtatgaaatataaattggtgcagaggggagaccacagttagggatctcagggagcatctgcgttaattcaagctagaaaggacagcttgagttgggaaataagaatggatatatagtggaagggactaatttgagaggcatttcagtcagaatagaaaggacagaagaacttggcaactagttaggtatggggatggatggggtgaaaggaaaagggatcaaagccaacttcagaatctgcggagagagttagatgcttgcttcagagacctgcatttggggggaagttgtgaagctgtgttctgttccacagtcagaaggaatggacagtagcaatgggaaggggtaatg

SEQ ID NO: 82755 - DNA, 1005 bp, Homo sapiens
gtcattccatagaatgagtcaagaaaaacagttttggtgggggcagccgtggtggtggtagtgaaagatcacctggataaagatgctagaaaacaaggtcggtgctgagtcatgaagagcttgggaatttgaactttattcttaaaatatgggattaaagtgaagcaagggaatgacatggtttggatttatgttttagaaaaatcatcttgattatagattgaaaataggatagaaaacattggcagcaggagatagagaaaagacactgaagatagcaaaaccagtagatagttgttgcagtagccagtaattatttcaaagctccaaaccaagacagtagatggaaataatctaattccatggagacataggacttggaatcaacaaaaattgataaccagtttgaaccaatttgttaggcaggatgagggagagagtgtgatggaaacttacctggacagtttagtagatggtattgtgttaatccgagtccagtcaggagaaactacgcagtaatttgctaacaggaaaaatgtagtatacaagactttaacaaggaattggagtagcagtagcagatacaaggggaagtaactcagtgaggactgacatagcatgcccaagaaagaacccccttcctctcactatggtgccatgccagtaggagtgcaggaaatccaccctctaagataccagtgaaggcagggcacaggagaggtgtctcatgggaggcactcgctacggagctaccagagggcatgctggtagatgctgccaaccactggcgaggtgagcattgtaggtgccttgttgctggcaaagctgctgtgctgcaggagacagcagaccagaactaagaaaccaaacctctcctcttgcaccttctatttacaaaatgtcagtgctagctggcgaaggaaaaaaacctataaagggcctaagtccattttttttcacagagcaatccaaaagggtaaaattggagctagaggaaataagtca

SEQ ID NO: 82756 - DNA, 1015 bp, Homo sapiens
taaagtgttacaatccactaccaaatcttattactggattttgaagttcactgtctttttatgtctcaatttatcatagaggttgcatttatatttttcttcttaatcccatgaaatatgtttggctctttttgtgtgctctagaattaacactaatccgatctcttctgttttctacctgtttcctgttgatgctggaatgtcatgtgacttctcttctgttcctgcaatgatttctcccttccacttgtttgcttggctggtgttgcacatctttctgtctgtccaatcaggatggcattgtagcagatgaatcccaaaacatgcagtttatgtccagtcaaagcatgaagcttcccccttcaaatagtgcactacctaaccaggcccttggctccatagcagggctgggtatgcaaaacttgaattctgttagacaggtaagtccagatgtgtattttaggctctcagttgaatgatttgtattagtaataagatctctcttacatgtagttactgtgtttaaatcatagtacagtgtggtaatgagatgtttgtccctaaagaatcccactgttacttgttgctgtttgtttttatagaatggcaatcccagtatgtttggtgttggaaacacagcagcacaaccccggggcatgcagcagcctccagcacaacctcttagttcatctcagcctaatctccgtgctcaagtgcctcctccattactctcccctcaggtaaataagctttccttacattctcctgtttacctgcaaaaaggatcttgcatgattttgtatttgaataaaatggctaactaagcattatcatatttattggcatctttgagattcagctagttttgaattaactattaaaaaaggttgtagtaaggaaaagtcaaggataatttaaatccaaaatttaccattttcttctttaaaacattcttgagagtaggacaaaagcaaagtaaaattgactagtttaagatgcacctctgtcatctttt

SEQ ID NO: 82757 - DNA, 1050 bp, Homo sapiens
gaaatttccattcttgttccaagagaatatccaagtctgaggggcctcatcagcaaaggtcaagtaaattgtgccttaagatatatctgtccccagcctaggtgtaattgctagtacaggacatttttactttagaatttgcaagcaaaagatagcaactgaaagtgaccacagatcttcatgcataggtacacttgggaaatagctaaacagatacattttattccaagtaaacttatacatctggcttccttaaaacttttctccctcttattttgccaaggagttttaaataaatcatcaaaattttatggagaaatattttctacgtataactaaattatagtattaacagttatgtggtttgaaaacattagttacatgtttttctaggaaatagaagttgtgctactagaaagaaaatgtgctgtattttctaaggttttgttttgttttttaatttttcaggcttgaactcaaacttgaatgtaaatatggatatgaacagtattaaagagccacagtcaagactaaggaagtggacgacagtggacagcatttctgtgaacacatctttggatcaaaactccagcaaacatggtacaaaagatacatcttaccaaaaaaaaaaaaaaaacacacacacctgcagaatactagatttaggcctttattttattttaaatgtgttttcaaagccaaattatcttagaacttttcctcatttaaaaaaagttgttattaagtcttagttacaataagagactttcagatgaaaagcagaatttacctctactctgttttataaaggagagatcagatgatacatgtttaaaaattattttctctttggctttttacatttttctaagtgattttattcttatattattacacttattaacatttactggatttaatttgatatgttcttaggacatttaaaacttctaccagggtcccattccgtcacccaggctggaatgcattggcatgatctcagctcactgaaaactctgctcccgggttcaagcagttctcctacctcag

SEQ ID NO: 82758 - DNA, 1106 bp, Homo sapiens
tctgcctgcctcagcctcccaaagtgctgggattacaggcatgagccaccacgcctggccccatcctttcttttttaacagtttattgagatataatttacttataattcggtgtcttttagtatattcatgatgttgtgtagccatcaccacaatccatttttaaacatttctattgcctgaaaagaacccctgagctatcatagccctccaccatacaagtgttttaatgatttggaaataagtttgtactcatattctggtcacttaatgatgtttatgcatctcataaacttaaaatgaaattcacagttatcattttcagacattcttcaaatgcgatgttagaatctcaatataaaagagttactctagagaacacagcctagagcccacagatctaatagaaagtgttcatgctacatttgaaaagctataagaaataaatctgtgtgtattttgctcacatttctctattattcttcccttgttaggtgctatttcaagtggtttcaggctggaagagtctccatttgttccctatgactttatgaacagcagtacttcaccagccagtcctccaggttcaataggagatggctggccacgtgccaaatcgcctaacggctctagcagtgttaattggccaccaggtaaaattttttctaacactttctttcatgagactgtgtttccattaaggttttgttacatctggacttactactgatgtagcccagatcggcgtgcttagactgacgtgtgcggatgagaaggaatgcagaagtgattgaggaaaagttaagcatgaagtcttgggcaagtgagtgtgtcagcctgttacctatgcctttatgctcaagcagcagaggtagaagtgagccccattgaccagcatgaagaattatattaaaaactttaggctgggcgcagtggcacatgccagtaatcccagcactttgggaggccgaggcgggcggatcacgaggtcaggagatcgagaccatgctggctaacacggtgaaaccccgtctctactaaaactacaaaaaattagccaggcgtggtggcgggcgcctgtagtcccagctacaggaggctgaggc

SEQ ID NO: 82759 - DNA, 3903 bp, Homo sapiens
ctgggagcagtggaggtggggaagatggctctgcaccccgtcagagcaacgtcagagtgtcagtgaagagtggtgccaggagcacagagcctcaggaaagagaggaggggcagcagtgcagcctgaaacagcctcctggagggcccgcggtgacgcctctcactggcagtttccacactgtttcctagatcgatggctcaactctgcgcactctgtgcatgcagcacggcccgctgatcacattccacctgaacctccctcacggaaatgctctggtccgctacagttcaaaagaagaggtagtgaaggcacaaaagtctctgcacatgtaagttggctgttgggctcccagttggaagagtctaggggaaggagtgtgagagcacagcctgacccggggcagtgcacagggtcctgcgtgggtggctcctgctggctgcagtagtgccctgattccaaggtcggcattcctaagcggggaatcagacctggctagatggccctagaaagtcccttacgttgcccatggcagacagaggaagttcgctctgggcaaggcaccaggccctggagagctgtgggtgcacactcgggtgaagggagggcacgcaggttatgtggtgtagtctctccctctgtgccttctgtggcttttctagcagagacaagttgcaccctcacttgtgagtgaatgaagccctcctggtgtgctgtcctcacgtgtccgcggtgcctctctcctctaggtgtgtactggggaacactactattcttgctgagtttgccagtgaagaggagatcagtcgtttctttgcacaaagccagtctctgaccccttctcccggctggcagtctctcgggtccagccagagccggctgggctccctcgactgttcccactcattctccagccggaccgatctcaatcactggaatggtgctgggctgtcgggaactaactgtggagaccttcacggcacttcactctgggggaccccgcattattccacaagcctgtggggtcccccaagcagcagcgacccccgaggaattagcagcccatctcccattaacgcttttctttctgttgaccacctgggtgggggtggagagtccatgtaacagtgtagatgcagactcaccgaccgggacctcagacgcgagggaaaggagcactaagtggggctcgccgcctgcagccaggggccgcctgtgggaacagctattctctgcacattttccactttgttttccccaaaacatatcagtttgaatacttgaatcatgcaggccaatattataatgtgaaaaggtatctactctatttacactcccaaatagcgccatacatgctaaaccgtagagaatgagctcgcttgtgtctattcatcatgtttagcctttggattctttttttttttttccttctattcctccccaacccccccccccgcccctttttttctctcttgcaaaaccattttttgggctgataacgtatgagcttttccctttgcactgaatgatgttctctccgtctcatcggcagtatggggggcagctgtcccagtgtcaatgtttactcaagggtgttcttaggaggcgtgcgctctctactatgccttgatgttgcctaccttattgtggtatcgtggagtttaaaagatcaagttaggatgctgacttaggattattaatgaaagtgttgcaccagttttttcatgttgtaaaactaaagaatttcgctctgcagtttgaaaaactgtggccacagctgtgacttgcagcccacctgccacccaggacgggccctgcactttgaataggctttccattttgttttggaggttctcactttgaaccttcttgtttacagatttttttgtttgttttttgagaaaaaaaaatgtttactcttccatcatttaaaaaaaatgtaaaagacaaaaaaaaaatggaggatgatttaaaagatgctttctatctctgggaaaaaggagcagcatttggccatgttcttttgtttttctattcctgtcccaaatcaaagagcatggttctcaggaaaaccagttccccagtttaaaaaaaaaaaaaaaaattccttgtagtttcttagaggaaaaaaagaaaaaccccaacttttagcactgatactacatattgctctgttaaagaattttctctgccaaaaaaaaagaaaaaacaaaaaaacgcttaaagctggagtttgacattctgctttcagatgctgtctttttattagtgagtgatgatggtttgctaataatcaataggtaataattttttgtaatcccatcaagtggctccatatgtttctgctctctcgtgactgtgttaatgtttaactgttgtaccttaaagccgaaatcagtaactatgcatactgtaaccaaggtattgggcttacagagttgtttgttgtataaagaaaattttaaatgttgttgcaaactaacgagttacaccattttaaactttctttcctcccccctttttttgcccacaaatggtattataatgcttgcttagtcaaagaagagagactaaacaagggtaaaaattttaacagtacagaatttgccatcatatcattgccttgattctaactgtttgtgtcctaagatgcaaaagaagtcagtggcttttaactgtttacaaatagaatgtgattgtaaaatgtacagtttggttgtgtttgaattatgaaatttcttcagatataataaaccatgactttttggctgctcaacattaattgtctcctttttgtgaatttatttgtaggctcttttttataatgaaagtttcaaagttgctatgtatgagggttctcatagagcaaccgattaaaaatctaagcaaatatttgaacattttatctgaactcatcacaatttcaccctgaaataatgtgagaacaatgggaaactgtagcttgctccttcccaccctctctgagcatctttgggatcttgttgctcaaaactcttctgtgacttcatcttccccaccatttgtgcccatctcaagcctcagcaagaaaccatgtggaacatgaagcttaatgacttgacagtgtactagtgttaaactctcatacctctgttacaaagcgagaaacgccacacccggactggccttttcttcccccttcacggccctcgcttctccctgcaggagctcgggggcgaaacctgtgtatggatttcagtgtatgacttcagatcatgctccaacttgccaggtgtgagctaatgttgtcggacaccttactataagcaaatgttattcagtgcgttcaatgtatattgacttccatactggtttttccaaaaaccaaaggtagctttgaaaaaccatgtctggaaatgtttggagcgttaagctgattgaccttctgaccttggggctttgagtagtatataattcataactgcgttaattgtattgttaaagtgtttgggagttttttgcgcttgttatgtggaaataaagtgtttgatttaaaattttttaaagtggtttggatctttgcctagtccttaaataaatacagctctattccctaagccacccttacttctcggtcttaatcccgactgccagtgcctggatgctgccctttgtctggcacagacctgcagctgaccatgctgggcccatggctcggggctttctagtcacgcagagccaccaagagtcagggtaaactttttaacacaggcacttaacacgttttttctttgttttcttttttccttttctctttctactttcttcctttttcttttttctttctttttctttctttttttttttttctttcgacagggtttcactctggatatcagttcactgtcacctctgcctcccaggctc

SEQ ID NO: 82760 - DNA, 1257 bp, Homo sapiens
tcgacttcaggcagacacctgttctttgccatgcctctgtctgaagagtatatggaaaggggttgcacaagcaatggttgctgttcctgttgctgccactgcggtgagggctgtggctggacgtccctcctggcactttgcctctgtcccctccatccgccgccagcatttttcctcccctccccttcctccagctcgtcccaagcctgcctgtccccagcgtggaggcgggacagtggaagactgggtgagtgaagcaggatggtgccttgggctccagcgtctccccaacccctccatgccatgggtccccacgcaggtgaggaccctggtggaggacggtgtgggcagagcgtgggacatgtcaccttccccacctgctcagagttcaagggtcctgggctgggccccgttctctcttctgccctggggagatcattcacgcttcctttaatccccgctgcagctgaggctggagtttggagtttgacccgcttggaggctctctcagcagcgggcatataggaggaagggtcactgctgtctccggaagctcttggctgcaaagagagaggatcccgggtatctccctccttacaaccaccgccacctcctagtgccttagaagccactgacagcccccagggcaggtgagccctgcatctggaataaggtaagacaccccctgcccccaaacaggtagccactctccaaactgggaagttggtctggggacaggtgctggcagaaggactccagctgtcacctgtggggcaggggaagctcagccctctctgcagagaaagcttgtcatacaccaggacaatggagtgtgtttgtggggtgggcatggtggtatgaagccagcagccggcagccagcagcaccgtacgtgggtcccagctcttccacttaaccaaggtcagggacattgagccaaacattttgcctcaccgagtctcaggttccttatctgtcaaatgggaatatgaacctcaggctgacccaccccacaggtgtgttacccagagataacgaaggtaaatgtatccacataagcattaaaaagctataggaatgtatttactacaactgcagctgctgttaactacaaggcaaatacaagtcttcactggtacgtgtcagacacgtgcagagaactttacgcctggatctcatctaactgacacagaaaccctgtaaggtaggtacagcaccccctaattcatggacagagtctaagggtcattaaataac

SEQ ID NO: 82761 - DNA, 1035 bp, Homo sapiens
gactctcacccagctgtgaggtaccacggaagtggagactgactcaggtgtctcatttttctttcactctgggacacgtgcttgctgaaatcatctgtactattgcaattgtttatgcttctttctattttgccaagtgagtgacaaaattgactgcagatttgatgtgacttcattatgaatatgtgttgaatgaatgaatgagtgagtggatggtggatggatcgatggatggatctgtcttccctgaagatctgtcttccaccacacatccctccacatgggtcctctttcatggatggcctagggaggtagctacagaaagggtgagaagaatgatgctaggatctggcatttgactggcatttgcccttcctcaggatccagaggtctcgttcaggaccatggagagcggcaccagcagccctcagcctccacagttagatcccctggatgcgtttccccagaagggcttggagcctggggacatcgcggtgctagttctgtacttcctctttgtcctggctgttggactatgggtaagccaggccactgggggatgggggatgaagagagaaggaaatgtctgtttagaggtccggagttaacctcatccttttggagctaagatactgactgtgagaggaagaaactaacacaaggttatagagtaatcagaacttaaaaattttaaacatgcattgggtgtggactattgtcagacactgttttaagcattttcacttacatttctcatgtaattttcacaggcccctgtgagaaagatgctgttacaatacccattttacagataaggaaacacaggcccaaataatttaagatcctcatcctgtaagttaggagagttagggttagaatccctgtctcccttacttcgaagctcatgttttgtttttgtttttgttttgtttgttttgctttttgaggtgggatctccctctgttgctcagggtactagaacgcagtggtggcaatcatagctcactccggcctcgacttcttgggctcaagtga

SEQ ID NO: 82762 - DNA, 1032 bp, Homo sapiens
cactctcctcttccttcccgaatccattccccatgttaaaaaaggaaatttgaaggccagcacaggtgaaccactcagcgagtaagagactacaccagaggtggagttcaggccaggctgcctcagggcgcagagggaaatccaaatgggtaccttgttgtgagctgggggccaagtcctgactgtgttttcttgagcagggcttgttttctgtgctgatgttggcctggatcttcctacccatctacattgctggtcaggtgagtcgggggacattgggatgctgtagaattgaaagatgctttgggaatctcagccctgcagtccctccctcatcccgccatccctccctcctgcccatggtcatgtattcgattgccactcagaggccccagtaaaggggagggatgatccacaggtgagacaatgaggaacccagtccatagcacttcctgccagtacccaacatccaaggcacacagaaggcatttggaggttggaaaaaatatggaccccaaaattttaaataccaaaacacaaatgtaaagctcacaatctcttttaaatgtttaaatcacaacatgtttctgctatatttttttgagacagggtctggctttgtccccaggatggaatgcagtggtgcaatcttggctcacctggtctcaccagcctccccagcagctaggaccacagatgcaagccaccacacccagctaatttttgcattttttttttagtagaaaatacaaaaatcctgccatgttacccaggctggtctcgaactcctgggctcaagtgatctgcacacctcagcctcccaatctgagtagctggacttacaggcataagccaccatgcccagcctatgtttctgctttttgctaaaaaataaaaataaaagtatatagcttatgcctgtaatcctagcactttgggaggccaaggcaggcaggtcacttgagcctaggagttcgagaccaggctgggcaacatggtgaaaacctgtctctactaaaaaaatacaaaaat

SEQ ID NO: 82763 - DNA, 1231 bp, Homo sapiens
taacaggaggaaaacccagcagtctggaggagagacctcttcccagggcagcccaggggccatcaggagggttcatctcatgcattagaggtcttgggaagaatgaggcttcctttcctccatcaaagcaagcaaatcctttaaaagctgcatctccaagggctgctccgggctcatagcaagcaacgtcggagcccagaggcaaggctgtgctactcagctgccctctggggtcacaaaggcttcacttggcttctaagagctgatgaggcctctcgcaagggaccctgtgtgcatgggctgaccctgaaacttcccagcctctcttcttctcagagcaccctcaggtggcctctcgggggttacccctcattgataccatgtctcctcgtgtttttgtccagactccaattccagggtttcagaaccgcatcgcagcatctttcctgaaatgcactcagactcagccagcaaagacgtgcctggccgcatcctgctggatatagacaatgataccgagagcactgccctgtgaagaaagccctttcccagccctccaccacttccaccctggcgagtggagcaggggcaggcgaacctctttctttgcagaccgaacagtgaaaagctttcagtggaggacaaaggagggcctcactgtgcgggacctggccttctgcacggcccaaggagaacctggaggccaccactaaagctgaatgacctgtgtcttgaagaagttggctttctttacatgggaaggaaatcatgccaaaaaaatccaaaacaaagaagtacctggagtggagagagtattcctgctgaaacgcgcataggaagcttttgtccctgctgttaatgcgggcagcacctacagcaacttggaatgagtaagaagcagtgcgttaactatctatttaataaaatgcgctcattatgcaagtcgcctactctctgctacctggacgttcattcttatgtattaggagggaggctgcgctccttcagacttgctgcagaatcattttgtatcatgtatggtctgtgtctccccagtcccctcagaaccatgcccatggatggtgactgctggctctgtcacctcatcaaactggatgtgacccatgccgcctcgttggattgtcggaatgtagacagaaatgtactgttcttttttttttttttaaacaatgtaattgctacttgataaggaccgaacattattctagtt

SEQ ID NO: 82764 - DNA, 1070 bp, Homo sapiens
caaagtgctgggattacaggcatgagctaccacacccagccagaacctgctttctaaaagcaccctaaacctctttggttgtgaatttatatattctctgccttccaagggctggtctttgaggatattgcttggaactaagttcatacagtagatattttatttaaaaaaaaaaaaaacagaaaagagacctccaataaaaggtttcttttttgtctgattttttgcttttttttaattttgaaatataatacttgtcatataaacttagctccaagcagtatgctcaaagaccagcccttcttggaatgcaaataatatataaattcatagccagagacgtttagaggtgtttaaagaaaaccaggttcttacaagtgtctttctaaaataacctttatctcttttttacaacaatcaaccagagtgtttaagactcaaaccgttcactggtgaaggaaggcattccctgagactctaggtctgagaagagggatgggtggtggagagggggagggagtttattcgccctgcagttgtgcctgcaccacttactttcaagggcatatttggatctgttacttgtcaaagtggctatcagaatcaccttggacttcttgaagggtgagttcacaaccgagaaagcacatattcaaaattgttgaagtaataagtaaatcttctagaaccttaccctcagtgataacattccacttctagctcttaaatacccacttctgtttcctggatgagatactcagtgcaggaaggaacctgggttacatttgtcagagccccaaatctgagatgaactgtatcaagttctgcctttgggctgaggctggttactggaggtcatcctctgtttctctctttttttttttttttttttttaaaaaaaagagagacagggtcttgctctgttgcccaggctagagtgcagcggtgtgattccagtccactgcagccttgacctcctgggctcaagcgaatctcccaagtagctggaaggtggaactagaggcatgcaccaccacacccggctaatttttgtgtttttcttatagaga

SEQ ID NO: 82765 - DNA, 1067 bp, Homo sapiens
ttatgatgaatttgaagcatcagtatcatgcctgacattaatacgtaagttggcttatcattttcccactacagctattagcaataaatttcttgtgaaaagtttgagtgactgtatgttgggtttggagtccaaatcatccagtatgttaaaaggcaaaattaatcaataattgtacattctgtaatgtcttttatatatgctacttaatttaaagtataaatcatcttactaaataaaatttcaaagaatggagattatatattgctttgtggaataactgtggttttaagaaaatttaccatgggacaaaacttccataatgtaacttctgttttccttttgacttaatatgtaactttgaacaagtatagagaaaaggaaaaagtggcctcaggtggtaaagtcactcaaaaccaaacaaagaaaattttctagaaagtgcccctagaaaattttccttgtttggttttgagtgacattaagtgaccagtcagaatagtttacaggtgatatgcctggaatgttacttgtccttaaattccgccttgggctctcctactaagctaagctacatactgccttttaaatattccctttgattaatttaactcacccaccttggaattacagatactcttcctctattcagtgtatatggtgagagctcagtacttcttagtatgttgagagtttggctctttattttgtttattttactctgtaattgttactaattgatttttgaatagggagcacattcccatggttcaaaattcaaatggtatacgatgaaaaatctctctcctgttcccataccccagccacccagttcctctcctgggatgcatccagtgtttacagtttcttatatatcctctcagcaagagttaatgtagacgtaagcagatacattcgtgtgtacatacttgcctgtgtgtttttcctctcacaccccctttttaaaaaaccaaatggtagtgtatattgtatacgtcattctcccccttaccttttttgcttgacagcttaaggtatttgcgtaatacatcttggagatttttcct

SEQ ID NO: 82766 - DNA, 1526 bp, Homo sapiens
gttaaaatatatcttggagatctttctttgtcagtcatgtaagaagcctccttattctttctgtatggttgtaccaggcagttgatggacatttaatctgtggtgctttccatcactttttcatctaagagctcacagagattgttctcagatgccattttgtttcacttcttttttcttcaataacctcttatcttccatttacccaggatcaacttgcagcagacatgtacaactttatggccaaagaaggggagtatggcaaattctttgttacggtaagcaccttcccttgagaaaatgttaaagcattgttaaaatggagtcattttagcttttttgcaaaagatttcatttttagttttgctcagccattgtgtgtgtgtccatccgatgctaacgttacttttgtttttgaatgtgggtctgttctcagttattagaagcccaagcagattaccatagaaaagcattagcagtcttagaaaagaccctccccgaaatgcgagcccatcaaggtaatgtaacccgcgtgcggctgatgcttccttcttgcctctgccacctctgcctgggttcttcttcaccctgactcctctgcatgcacgtccttgggataaagcttctctgcctaggagggtactgtttcccagcataatttcatcttccttgctgcattctctaatttcttccaaacccaaattaacacactaatggaacatttgtagttcttctgaaaccttcagttgaagagaaagctggcctctttggggagtacctgtgtgttttcccatcttctgtaggcttgaaaaagtccagcattgaatgatccttttccacatcagttatttgttccacaggacttaattctggccatgtgactccaagagcatccattctagggaaaatattttggactttccaaaagagaagccagtacttgatgccacatcatgcacgtcacacttaataataagtgtgattgaatcctaagaccgtggtcgcttcgttcagactcctcctttgtctttatactaagcttttgttcttatcaccattaatatttctcctatcatattcaagcacactgcagattgtatctgcaagttaggtgcagactgaactttccccttatgttgaattttaagttgggcatctaaagctgcttttttttttttctctccctaaagctttcgatgctgtgtctctctgatttaccattagagcatttaccagcagagatgagcacagctgttgagtcagaaattgctcggccgtctttggatctatttcacctgtggtgtagacctgacatttggagcttatgctcctctgcagaaccactggtcttgagctgaaaggggatcaggccaggtgctgagtgggatgactttgtgattttgagaccgagcatgtgtctgtgtgtgttgtgggggggatgctttgtggatgtgcatacataccagcaccttcaagaatgcgacttcttctccccctaagttccaggagatcctcacaggttctgg

SEQ ID NO: 82767 - DNA, 1032 bp, Homo sapiens
agtggaaagagccacaaggagttctcaaaagcaggagctgattcccagtggcacagggaacatttcagctcaaagcaagagagcaaggagagcaccttgctctcctccggtggcagggattccatggttggccaccacaagaaaggggttccatggatttctctccagtagtagagtttgtgtgagacaagatgtggttggttatgctcaaagcagaccactactcctagcactatgagagtcctgtcatggtgagaagctaaagtctccttttgcctgcttccattcttagagaataagctcaagagaatttggcatcctgggcaatgataccccttccaggtagaatcaattgtggggaaggatctatctccaccaggtcctgcctccagctgttgagtatacacagctggttctcagatgctggtgacccctttgttttgcaggtggaaccaagctcacaaatcctcaggaaccaactttcaggggcttccatcaaaaatagatactctaaaggaagagatggatgaagctggaaataaagtagaacagtgcaaggtatgagaattccttgataaatgtatcttttcggtttttgcaaatgagggatgaaagttcaaatgtaagttacttaatgttttaaataatttctatcagaatattttgaatgattttaaaggtaggttttattttcttcttctctaagactatattattttatgatcagaataaaacattttaaatttcaaataggatatttttaaaaacttgacaagatgtctaagcttatttaaagatgaagtcagaaaaaaggaaagaaaaccatagcaaaacatataataaaattacagcgattaaaaatgcataagaaatacaaaagtaagaaaaaagaagtaaaactgtataagaagcattaaaatagatcagtgaaatagtataggttttctggaatgaatgctataatgtaaaatttaatatacagtaaatggctcatatgtccttggagaagataaggattacttttaaaatgtt

SEQ ID NO: 82768 - DNA, 1050 bp, Homo sapiens
atattttcaaggctcgttaggtagcaccctaatgcgttcctgttgtatggcaagcagcactgatccacacgataatccagtgcctgatttaatgagcacgtgctcgttgttgggggtcttgtttttaaaggaagatgctggagacgtgtggagatgctgagaatcagctggctctcgagctctcccagcacgaagtctttgttgagaaggagatcgtggaccctctgtacggcatagctgaggtgggtgcttcaccgtgcagcacggaagagccgagagtggtgtgggctggacagtgagtgttaaaattttaacagtagttgctggctttaacatacacttctttttggaaataaggggagtcaattgaaggtacaaaatcctttgccttagagaaaaaacgtttgtaaatactttaaaatggttaacctaaaagccctgaagtgcatcccatttggtatgttcttatttttaggtggagattcccaacatccagaagcagaggaagcagcttgcaagattggtgttagactgggattcagtcagagccaggtaacagcttgagccagcaatgcagcattgtgtcccattcccaccacgggggagaagaccactgacagtggacacaatggaagtgctcaccaattcgtgcatttgacccccagactgggtgccagcctgccagcacctcctataggccttgttctcccaagcgtggcagtggggatgttgttagaacatcctgttcttagtgagccagcagtgaaaggaaataatctaaggaaaatgaagtgagtatatttaacggaagaggggatggtggcagttttgagagcacaactcagagtgtaggaataaacacatctgtggccctaacagctcatgagggtcctgccatgtcacaaaccctgtgtacttgtaataccttcagtaccaaggaaggaggcactcacatggcaggaactcatgtaaacctatgtagccaaatcagcgctgctgatgtggggactgatgccagcgaaggagtctgtcaggattcagagcaggact

SEQ ID NO: 82769 - DNA, 1009 bp, Homo sapiens
acagttctatctagttcctgttgtcttccttgagacgcagtccaagacatatattcaatagaaacaaatatttatcaaacacctactgtgtacaagtgctggagatataaaatgaatgaaatgtaagttttcatggtctcatgggggagatacatacaaatggatcattataaaacaagatgctcaataaaacatgcacagggttttatggggggcccagaatgggtaccagaggaagagggaggtagttaggtgaggcttcctggaggaggtggtgtctgccctataaaggagggaaattagtggcaggtggtgggaatattccaggcagctggggcaaagtgcttggccctcatttctgaaacctaatgctttagctttccttttccaacgtcaaacgaaagtgccaaagacagggctttgaggatgcctacactttgcacttgggaagaggagttaccacaacaatggtgagagaagactaatatggagaaaattgcagcagtctccagggctctagaaaacacaggaggaacctcccaaaggcctcataacatgcttcctgcatgggaagaggcaagaatagaagggaagagagagacatgaggcaggtgacctttgcagcccagccaccattgacatggcagaactgtcgtgggtcagataagatagattattagattagagaattatttctttttgtgcgattggcatgcattttacaaattaagtctttagagcatttaaaattcatccctggccaggcatggtgctgcactcctgtaatctcagcactttgggaggccaaggtgggtggattgcttgagctcaggagtcgataccagcctgtgcaacatggcaaaaccccggaagtgggttgcagtgagctgagatcgcgtcactgacctccagcctgggcaacagagccagaccctgtcttaaaaaaaaaaaaaaattatccctgatgatagaaagctgttcacctctaggaagcacgaagccctccctg

SEQ ID NO: 82770 - DNA, 2167 bp, Homo sapiens
gatctgtttaaaggatggaaaaaaattcctatgtgagaattgaggcctgtgggctttttttttttttttttttaaccagaaacagaataaaattaattagtgtgattttgagcaggaaagaaaacagttttgttgcatgatgatgaaaaggggatctgaaacccagctacctgggttcgaatctcacgtctgcgctggttagctttgtggcctcagggatttactgaacttccctgcgcctcagtttccacttctctaaactgagggaaaggccttatccacctcacaggttgttaggagggtttaatgagttaagcaggaacagcactgggaacggagcctggcacgtggtaagtgctagatattagtgatctattattattactgccactgcaagccacagagactgtctgtttctgacgtgaaacatcccttgatttgccctgtgttcttctgcctttttttcagtctctgttagagcagttgtgtggcatttccccagggggctgtgcatcccagcggggcagaaccagcatttatttgctgttgattcttgaataccttgcacaggaactcagtagacatgggccctctcaacgaatattaaatgagcaccttctgtttctgtgaaagataacgtcccaggcactgggagaaatcagtgaacaaaacagatccaggcttctgtccttgtggagtttacattctagtggaaattggaatcaaaattaaatcatggaatttgttcattttttgcttttctctggtggcaaatgaatgtggattagttttctaatgtttgaaaatctggtcattgcaagatttggggaaggtaatgtggaatctgctcctaaatctcccattgcctgccagccctgagtcctggggctatgggcttggatctgaagaaacgctgcccttttgagaaagaggcacagaccatctcgatgcgtaaaatggtttggggtcaaatgtattctgttttgaatttgttgatttatctttaaaatagaaagcatcccaaagggcctgctctcattcttcatgagtcatcagaatacacatttttggcattccttcctgtaaaaagcggctctctttgccataaacagccatattctagcaatagtattttgggaagctgcttatgatgcgtgggtcccctaagtcagtgtttcttattgctgactgtccattctgctttagaggtttatttaaaacacacacacacacaccccaaacccaataaggaataattttgaaaacacagatcttgcagttaaattgtggaacgtttattttgctgcttctgtctgatgtacattgtgtggaaggctcagttgccatgaactggagagagctctttggcatctctggttttttccagttggcagtgggtctgggcccggatcattcattttcatttctgcctggtccaacctggtgcttttctggtgctgtagtgtgtaaactgactggcgccactcagtgtgatagcaaggtgtagccaagatcatcccttttccctgcatgtagattcagccatgcttttcctaccagcatgcagacaccacaaaagaaagaggatgaatttgttctcttttgtctctgccttgtcagattgagagacgcctggacacggtgcggtcaatatgccaccattcccataagcgcttggtggcatgtttccagggccagcatggcaccgatgccgagaggagacacgtgagtatcagatgtgactcagacccacagttcctgcgtctctctgaggcttttcaacccctggattggttggttgtcctaagtggcatcagtggatcagcctttggtgacttctatcaccaagcacgctcatgacacctgcgtgaccatagcattcttttgtgtttaagacatcgctgggctggaagccctccttacacggaatcttctccaggtgcttttaaaagctccacgatcatgtgtcattgataagagaatggctgtgtcggttatgcatcttttgctggcagaaagcggaaagcctgtcttaaattgacattgaagtagaagtaatgtattggtttgctaactgaaaagtccagaggttgggatggacttgaggtcagggtttatctaacattttagtaatgtaatgaaaaacccagtttctttccttctctct

SEQ ID NO: 82771 - DNA, 1094 bp, Homo sapiens
tccacaaacacaggaaacaaaggggaaatttctttttaaacagtacattaacattttcatataatatattcaatatagttttcagcctccagaccttttcatgtaaagtacctctaaagcagagggtccagttaatttgaaaaaaatggctggaaatacactgattttctttacattttagatactctgaggtatgttttctgttgtgcatttgtagagcttgacattggaccaattctttaagttaggcacacttcacccctggccatatcaatcaagcatgctacttaaaagtgtaagtaacatgctatttttaaaaaacctcaaaactgtgattcatgtagtttaaaaagtcaaataatatagtaaaagacttaccacaaaatacggtgggttcactccctactctctgagatttcccaactccagaagcaactactttgaaatattaacagtttattgtgacatttattcatattcataattataagtaatatgtgtaaactatcgtttgggttatcaaattagttactgtctgttgactttctgttctgataaatgagggtttagggccctttccctctgcttctgctccccccatcctttcaatacagttataatttttcattgtattactatttgatatttatattatgtccaatcaattatttgcagctgagcatactagttactatgactatctttatgtttccagtggactttttgtttttcctgaagttaatacttgcctcgtttttatgtttgctttattttctttgtggctgttgcagcactgtgctcataactgtttaacaactgccaagctcctatttgaattgtttgcagttgtttatgtttttgatttcaagtaccagtgtgaggttactgagcaaggagttgggagaagatgcacatggttggttggtctgagttggctctagcatacctctgagctattactaactttcccacatctgcttatagcccacattgggattgtagagcaagttcttctcttcttctgttattttttaaaaaataatttgctctgaaaaaggacatatttgttctgattctcaggttgaatctctttt

SEQ ID NO: 82772 - DNA, 1632 bp, Homo sapiens
ctgagtcagagcccaggtgtggagggagcccctgacattgtgtggcctggccttgggcacttttgctttagactttttgtgtggcttttcagctcctcctagcctctggctgcctcaccagagcagtaaactggactcctcctgagctcctttcccttaggcagtagctctatgtggatgtactgtctgcattgcaatattttgcaaaatatttctcacatatttttgcctgcttaaatgagttttaaaatctcaaactcagctgcctccaggtccaagcaggtaccatgagtgactggagcaggctggggaataaggcacttggaatgcctgagaggccgttgaggtggttggtggcagaagggagatttctttcagattttgctataagcaagaatcggtggtggagctttgagacaggccacgtggttagagcagggatagcaaatagattccatttcatgtgccagaggggaaaaagccaactgaccgaacaaaacgctgcgtgggtaagcttacatgtgcaggaaaacgataaacctcaattcaatttagggtaaaatgtaactgttcatcttagtcactggaattcaaataatattatcaagattaagttaagattgagaaggcttttattgtcatttaaagtaaaaattaaatgttataaccctgtcctagagaagctgtaaatacatgggcaaaataccatcatttggggaaataatgcagagtatagaactattagatctatttttcccacgtcattgccaaaatattttctgttgaatcatttccccccgttaagtatcctttttcttttcagtgttaggcatgggaacaattttttcccaataacatccctttagagttctgtaaactctcttacggcttttaaactgctttgtggcaggtataacaaattgcttcatttttaaagtttcagagagtcgtttattttaaaaatccaattaagtagattttagattccttcccagaaatctaagacgacagctaatctaatgagataaaacagtaaaaactcattcagtagtcctccagctcactatgaaatcaaactattgcatccaaactgggctcagaggctcaggtggattttgtaaacacttgtaacgggaggtgacagtgttgcacaaaatcagattcccagcagaatgaaatccactgcctagccctgggtgggctctgtaatttcactgtgaatacaaatcatgttgcatgcagtaatgtttatgttgttaccctacatacaatattcagatccttggtagattagtcacagtctgtcttatttctcaaaaatgcgtcagatatttcctggtaactagcattgaaaatgagctcattaaaaattctctccatgcttcattttttcattttaattgacgtatcagtcagtgtgcaagtgtaaaagccagcagaacagtgatctctcatgtgaaattgtaaaccaaaaaccaacagccctgtgagcccagaggcagtgggagccattgatgtttgatgctagtgttggcgcctcggccacatatttgccatccttgggttgggggtgctcttggtggtagaaagatgagcccctgctctcaaggccccagaatggctgaaaggatt

SEQ ID NO: 82773 - DNA, 1385 bp, Homo sapiens
cctgctattctacttttcattctgaaactcaaacctgttgccattccattactgaaaaaccatcagtggctccctgttgcccccgagttccatggcaggcaaagcctttctctgcagccacatctccacctcctgttctgtaccctactatgtacacactcctccccaaaccttttctccccatgcctgacttatctgaggtccacttggactgtttccctgctttcctggccacacagttaatcactcttctatctgtgcccccaaagtgttttcattaaggatgagacctttttttctcatgagctcctcaagggtggggactgtatcatttctgtctccttttttctttctcagttcctgacatttagtgggaactccgtaaataccgtctgaatgaacaaatatctaaaatctgaggctcttgaagtaagtccatcctcggatggatggtttatacttggagacttgcttttgcttctctgtgaatgcatgctcagctgagatctgctggtgcaggtgtttctatagcttccttagcagtggtgggaagcccagcagcttaagatgttagcttctgatgcagggtttactaactctccacgtactctgtccctgagtttctgtttattgtttgcctgtgattctctttggtgccatcccacacggtgttgtcacaaccaaccctttgttttaattgaacgtcctgcgctactcctgctctaactctgactagctttttgtttttgtgtggtccaggctcgactgtgacttcttccagagagaagctagaacagcttgataaatttggaaaggtcattcttagataagacttgggatttatctgaaggttgttattatttgttgtaattctcagaacagctaacactccatgaaccctcactaggtgccacgaaacacgttaaatgaagtacatgagatggtgttcctaaacaaccactatggtggtggtatcattattataattttatggttataattattcctatttcacagtggaggaaatgtttcttagtaaggtgcacatgtgaacgtctagccttgggtttcaaagtctggtatgtttgactccagagccctaactcttagttctgactgtatcctacattcttatcctttgctgagagtgaaacttagaattgggtatcactctgttttttacaactgagtttactctgtctgtgaaggccgcagcgtaaagccagttgtgaatcatgcacatcagctccttctgaaatgtgtttatggcctaggacacagggaccctggagactatggtgctgcagtgcattatggctgctacccttctagtctgtcctgctgctcgttctgccacctgccagctgttgctacctgaaccttct

SEQ ID NO: 82774 - DNA, 1149 bp, Homo sapiens
accctaccccagacacccaccctctctccttggatgacctgcctcctaatttcctaagaaaactggacatggccacctttccccagtgtctgaggcccaggttgacccgtggtcatggttgccgtcaccacccacctgcctggaccccaccctctgtccaaggccccgccacctgtgccgctgtcctgggcgctgccttgccagcctcccctctgtgccatgcacctttcacctccctccatctgctgcctgtttcttcttggctgctcctcatggtcaggcttttctcagccctccccttccttctggggctttgcgtcttcctctgtcatccacgctctgcgtcttggcttcccaggaccctctcctcccactttcctgtccctgacgtccctgtgcccggggcccagtttgcatcatcagccagtccctcatccatgcttcacccgcacctcgctcctggcttcttccctgccctccctggggactcctatcctgtcccctgccctggttctccttccgctgtgtcccagggcctccatcctcagcctccgtcttctctgcagggtctgcttctgcatgaactcccccagatccgtgtttgctgctggtcctcacagcaggctcttcgtttctggaccagatgtcttttctgtgcttcagaaccatctagaaaaaagggaactggatatctccacctgaatgttcaacaggtcccttcacccagcatttccagagctgacctcattgtaccttcatatcctcccagtgtttctcttttggtgaggaaaaacacacattgtccagccagtccctcaaggcagaaacctggtggtcatcctcagctcctccccctcacttcctgtccacccccaagtcaccgagtcctgttcctttctcctttgcagtggctctctgtgccctgctctacctacccactatttagtgtgggctgtcctccatctcacttggatctcgtgttttggggactcttcagattctcctccatggcttccctacccggcagcatatctttccctcacatattccacactgcagccagagggatctgccaaagaaataattgtgataatgatagagaatgcgcatctgggtgtatactgggtgccttgcactagtccaagtgct

SEQ ID NO: 82775 - DNA, 1021 bp, Homo sapiens
cgactcccacctgtatcccagttgttagggaggcgaggcaggagggtcatttgaggccaggagtttgagcccagcctgattaacatagtgaggcccgtgtctgtaaaaggaattttggaaaaattagctgggtgaggtggcacacccctgtagtcccagctatttcaggaggctgagatagaagaatccttagagcccaggagccggagctgcagtgagtcatgattgtgcccctgcagtccagcctgggtgacagagtgaaaccccatctctaaaaaataaataaataaataaataaataaataaaacacctgtagatttaaccacataataactacacttctgtctgttttattatatcaaagttaaatttaaaacgatgactaattggaaaaaactgagagcaaccactacagaggtgaatatactgaatgtataaagctctctagtaattttaagaactccgctctaatgagcagatatcacagacagaaacttctcagatgaaataccgatgaccaggaaatctgtgagaccactttaaaaaattcgaagtcattgaagaaatgcaaagcttccaggctccacttttcactgatgaaattggcagagtttgggacaatgagatgttgctgtcccgggagtgtggatggggctgtgtcctgtgatggcggtgggcactggcactcttgtccagaaagacattcgccactgtggttcaagaagcacctcaaaggtcttcaccttggtcccttgtccacctctgcccgcggtctctcctcctttcagcctcctctttcccacacagtccctcccgccctggcttggtcccctttcttctctgatggggtcaggcatgtgggtgactgacttccaaggctctgtctacctggcctttttctttcacctgttctgcggaataatagcctgattcattcctctttttgggtccttcacttccatacctgggattcggggcgtggcccagaaagaccctgcagtcgtgcagtgtggggctgcc

SEQ ID NO: 82776 - DNA, 1896 bp, Homo sapiens
gtgcgatcttggttcactgcaacctctgtctcccaggtttaagcaattctcctgcctcagcctccccagtagctgggattataggtgcccaccaccatgcccggctaatttttgtatttttagtagagacagggtttcgctttggtcagattggtcttgaactcctgacctcaggtgatcctcctaccttggtctcccaaagtgctgggattgcaggcatgagccactgcacctagcctgcatcagtatggtttaataactgttgatctgtaatatgttttaaattgggtagagctggtctcttacaaatactctttttcaggctgggtttgtggctcacgcctgtaatcccagcactttggaaagctgaggccggaggatcgcttgaggccaggagttcaaggctgcagtgagctgtggtcctgccactgcactccagcaagagaccctgtctcattaaaaaataataataaatattcttttttcagtatctctcttacttttgtataaaggcgagttttggcatctcatcttctctagtttctagaaaaaattatttaggattttgattgagttgggactcatttattcaaatgatgtttattgggtccctgttgtgggctaggctctaaaggttcaaaaataaataaaacccaggtttttatggcctaataaatctgtgaactaaactttgagaattgatatctacaagatgagcattgcacatgactttgtgtgtacaatcttttatatgcttcccaggtatttttttttgttttttaaattgagaatagtgcctatttactaaactatgcaactgatcatttttgttattttaggtacataatattatcagtgttgtgcttctatttctgcttttgctatttagttcaatgatttctttttcatcccttatttaattggttagactccaaaatagtgtgtagctgtataaatgtttataggaatattgtgtaaagggcatatgattctacctttattggacatttcaggaacatgataaggactatttaaatcctgctaaaatacaagtgttgtaatatgaattgttcccaatggaagtttgcaagcaacgttctcctcattttcgaaccacacaacttttagtgtgtctgctatttgagctttattctgtgtctgttttgtgtcatgaggttggcaggtgatcttaaatgcagaatgctgaatttgtagtagtccaactatatggagaaaacaattgcaatgcactttagatttaggaacaaattggaggagaaagttgagaaatggtaagaggagttttaatggagcgtatgtggcagtatgctaatgtcacttctaaagaagaggtggttagcaggtcacaaggcagtagactgaattgtagcctctgaatctcagggcagtctttaggaatggaaaccttgctgcctgtagatttaggtagaggttttaataacccccccgttgccagaaaaaatcatccacacacagatttgcctataatcttatggacttcacagacatcctcaagcgcatggacaaaaaccccaagattcaagaaaagccgtccacatggtcggcagctcaagaaagcctgccagttgtccaagcaatgcttagttacagttcccatgctgggagctgctctctagagaaatgttatttgcagatgtgcacctcgtgcgtctgtgtgtgttgttctgcctgtgtccaaaatacatgctttttctagatgggagcctttcccccacaaagcagaaatgtgttctgtcatgggatttgatgatcatcaaattactttccctcaagaattggctttcttggcgattagttaattcagttttcaaaacttttagataagggcttaatcaacgtaaaactgctttgggg

SEQ ID NO: 82777 - DNA, 1812 bp, Homo sapiens
gcctgccttggcctcccaaagttctgggactacaagcgtgagccaccttgcctggcaccttcacattttaaaattccggccatgcttgcctaccttcagtttccacaggaggtcttgctttcttacctgctagcatctacttggaactcctggaagcctctcccaccacaccttttctccaggcacctcttgctcattcttcagccttctgggaaaggtccctctgcctctgaaaggccttctatgatgctacagcatagattggatgcctctcctgggcgttcttgtaatcctgtgtagcacttgcttttctgtgctgtgactgcctcttgtgtgtgttctccatcagataaataccttgagagtccttgctgtgtctcctttgattcccagggtctgctgtggttcctaccccatggccagggtgcagtagacattgttaattctggtatttgagttcttactagatcgccttggtggtgtgggcccgagtatgggaaaacatgaagtggatagagtagatggtgattcatgctggagctgtaattctgggcctgacctttgactgtctttaaaaatctttattgctagatgccagtggaagctgaagctattacagaactattaagggtgtggcaattatgcacccaaagtcagaacatctgtttttaactgggaaacctgttgcttccttgctgttgatttcctagatgtgtgtgtgtatgtgttttctgcttaagtaatcagaaaggactaaggaagataaacggaggctggagagtgcctagaattgttactgcttggaagtaggtggttggttggccccagaatcaggattctgggtgtttttaggtcaagatgaaggctacaaagcaaagggtttttttgttttcgcccctgcgatctaggtggagaaggaagttatatatgtgaatgtcatgcccatcgtgttttggtttatcaatttgtggaattctaggtggtgtcttgcagtgagatattctcctcagaagggagacctttgagtactttcactgtaaggttccaggggagggacttgtagagaattagtaatgcctggaaggaatgagttcgcatgatgcagtttgtttacgatgggtgggtaagtctatttgagaagacggcctgaaactcacaggggcaaggcttatgaggtggtctcatggtgtgagtgtcccaaagaagagaagtaggatggttcttttagtccacctgccttttgttgattcatgcattcaacagacacttgttgagcctacactgtgtcctgttatccagggtattaaagaatcaaaggtgaatacgggcatggtttctgccctgagggagctcaggagatacgtggaagaggtaggcaggcaaaaaataattatatacatgagataagtgcttaagagggatggctaatgcacagagcaaaacccagctgtcattggattgagggaggtaacaaaagcttcccagaggagaaaatctgagcacctttctctgccttcattttcaagcccttatttcaaatatctcttgtattgattaggtctcttttggttgtaagaaaacccagttcatagcaaagacgggaattgattggctcataagtgaccaaaagagcctctaataagtagtgtggctgcagatttggcttcttctgggggttccactctttttttttttttttgagacggagtctggctctgtcacccaggttggagtgtagtggcgcggctcactgcagcctccacctcctaggttcaagcaattctcccgtctcagcctcccaagtagctggga

SEQ ID NO: 82778 - DNA, 1039 bp, Homo sapiens
agcctgtgcgacagagcaagactgcttctcaaaaaaacaaacaaacaaacaaacaaaaaaaaaccccaaaaaacaagaccctaactagacctattttgaaacaagttaaacactgatagcagcttgaaagtaactcattagctattagctgagatagggcttatgcccaaactgattattttagtgaaaacaagcaatgacacctggaaaactcccagagcaaccttggcagtggaaattttacataatccctgctttggagagggaggaaaacgacgttgttcaaggacgtataaggggctggcgggtttttaaatggacttttctccccattataaaggaaatctatgcttcttgttctaaaaagttcctcaagcattctaaagtgcatgaagtataaagtagttgtccattctgtagtcacacctgggaggtagcagttcttaacatattggggaatattcttttcctacatagatagataaatatttattgatacatagatttctattttttgaatctgtggattcatactacacatactggtctgtaaaccaccatcctttttgaaaacaatagattgtatttgcctttacatatcaaaatattgagggttgccatatcccatttaagggtacatagggccaggtgcggtggctcacacctgtaatcccagcactttgggagcccaaggcaggtggatcacctgaggttaggagttcgataccagcctggccaacatggtgaaaccctgtctctactaaaaatacaaaaaattagctgggcatggtggcgggcgcctgtaatcccagttacttgggaggctgaggcagaagaattgcttgaacctgggaggcggaggttgcagtgagccgaggtagcaccatttgtactctggcctgggcaacaagagcgaaactctgtctcaaaaaaaaaaaaaatagggtacatagtatttatattgatttacgcagatacagtatattgatgataatttttaagtaattaaaaatgtctgtagctgggcatttagttgcgg

SEQ ID NO: 82779 - DNA, 1960 bp, Homo sapiens
gaaatagcaaggctatttgtgcagattaaatgcggcagcatgaaggagccagtgcataatagtgctcaataaatgctagtttcctttcccccagaatggcacaattatttttaaacctcaagtctgtctgatttacccagcccttcactgagaggcaagattcagtactactatactgttttatgcctccccaaatttatattatgatggaatgcattgcaaatgtccatgattgagagagacagagagagagagagagagagagagaggaagggagaaaagggaagggagggggaaaggaaggctggggaagggaaagggggtagggaaggagggaaggtaccacagccatagtctcacactgagacatgagcgggacctgagcattggcattggcagtgccctttcaatcagatgtgtgctctccagttcccacagtccttacctggtccccttcatcctgtatttacttgcttacccccggaaagcatttgaggctgtgatcccagctttagggtactgtgtttttggggattgttctgaactcacagataaaatggtgaatttatatttgttggtgtttcaatacatactcatctcttaaaaagagagacagcatgaattaaagggtcaaagcccagattactaatcgtttctttctattcttacagctcggccttctccctgggttcctgcccttgctgatgaatggaataccctagatcaggaagtgacaaccacacggcttcctgctgggtcccaggtacattgtaattgtcttttttttctttgagatggagtctcactctgtcacccacggtggagtacagtggcgcaatctcagctcactgcaaccacctctgcctcctgggttcaagcgattctcctgcctcagcctcctgagtagctgggaccacaggtgcatgccaccacacctggctaagttttagtatttttagtagagacagggtttcaccatgttgcctaggctggtctcaaactcctgacttcaagtgacccgcccgacccggcctcccaaagtgctgggattacaggtgtgagctaccatgccctgccgtaattatcttctctggccttccttactagggtgtttaggcgcaatgctttctgtgccttcactgtcctcaaatttttatactcccgtcaagagtataaaagtgtatttcccccttagtcctttacttatacttactttaaatatacttatactccccacaagagtataaaagtatatttccccctattcctttacttatacttactttaaatataattactttacttaccttaaatatactccccacaagagtatatttcccccttattcctttacttatacttactttaaatatacttactttacttactgtaaatacacttatagtcctcacaagtgtataagtatatttcccccttattccttttcctgaaaagatgggacccagtcttctgagtaatgagactccttgctggatcatcttgtttatcttgtcatcttatgattctttctcttctgcttcatttggcgcaaactatccacttgttccttgatttcagttctttagggttcttctctgcctcatctgtgattgctcatcctttgaagacctgtgcagttatcttggtagtcattggtgttagtgtcattacaggaaccagtgaaagatgtccacgtggccagaggcttttcctacagaaagagtgtgcatcagattcctgcccaaagggacctctaccgggatttcaggaaggagaatgttgggaacgtggtctccctgggtaaggattccttccctttccaaatataagacttggagctttctaatgtattcatttctactgattagaagataggcagatagaaatgttaacacttaaaggatctctaaggattgtctagtgtaatcacttagccaggttctcttccctcacccactcc

SEQ ID NO: 82780 - DNA, 1303 bp, Homo sapiens
ctaatctccgcctccttcgcaacagattggagcttctgtcttgtgagatgttcatctccctcctttcccaccgtctgccggtggtgagagaaaggtaggagagaggactagaaagttaagtgcaggtaaaataaattaataatccagctttcctgccagccataacattttaaacggcactggtgcagatgccccaaacgcaaacctccttcgcctttgttgtttctctttctctctttcctcctgttttatatctttctgggaaacagatctgcatggctggctgcatctccattgcatttcggtaattaattgcaaatgtcaaacagaaacacagcctttgtcagctgaagtgatgttatcatcttagcagagccaataggtaaaatcaagattgtttctctgacaggttgcctgcccgttgaggagatgtgctttctaggtttaaattacagcctgggaaagttttagaaataacttaactgaagaaatacataataaatgtgtgcattatgattgatttcttccacttttaaaaatatgccttatgctttaaaagcttgagagaagtacacttagtcataaacattccagcacattacagggaagcagcaaatgtgtctgttaacgtcttgtctgtttcaacagagagaactaattgcagtattttaggaggcttcaaacagccccttcctatcaaaacataaaacagcaaatgcctaatttaactggaaaatcagtatttataacatcagaagccatggcttccagtttgtgattataattaaaaaggtgttaggatgattaatgcagcaacagcaaaataaagaaggggcacgatgtctgggaaggttttagttgtttaattgctggttgtaggaatgttctggtttcttctgtggagtagctttggccttatgagggtaattgcgttttttttttttccaattctaattttagaattatgagaattgtcaaatgccccttcagggaggcagaaagatcaaatctttccaagatctgaggtgtttgggtttgtggcagctggaaacagagggccgggggtgttttatttgggtgacttaaaataaagttaatgaaggatgtgtggtggaatgtgtatcaggaagtcttatcactgggtctggagagttttccgaatgaaagaatagaagatgccagattttcctagattcctttatgctgatgttaggaagagaaggtatagaaactaccttgtttgacgtggctcctgattatgttattccagcgctgtggtatgcccagccttctactcccaacc

SEQ ID NO: 82781 - DNA, 1060 bp, Homo sapiens
caattatttaaaaaatatctaccatatgccgtgcactgtattaggtactggggataaaatggtgaataagatagatgaagcacctgttctcctggaactaacattttagtgggagggttgtggagacagcagacaaagagccaaataatatgtaatacaaattctggtggtgataaagactacaaagaaaaataaagtaatggatggcccagagctgttttgtctagtatggtagctactgtctgtatgtggctattgaataggtaaaatgtccaaattgaaatgtgctgtaagtgtaagatacacagaatactaaattactcaataataattttagattgcttacatgttgaaattatactcatatcaagtaaaacgtcttgcaattaagtccacctctttttaccttttcaatgtggctactagaaaatttaaaagtacacttgtgactcacatatttctactgggcagcacctgtgtggtgtagtgctttgtaaactttaggatcatctagggatcttgttaacatgtagatttggattcagccagtctgaagaggagcctgggagtccacatttcgtctttcttttctttttttttgagacggggtctcgctctgttgccaggctggagtgcagtggtgtgatctctgcttcaagcgattatcctgtctcagcctcctgagtagctgggactacaggtgcgcaccaccacgtccagcaaatttttgtatctttagtagagacggggtttcaccatgttggccaggatggtctcgatcgcttgactttgtgatctgcctgcctcggcctcccaaagtgctgggattagaggcatgagccaccgtgcccggcccaggagtccacatttctacaaggttgctagatgctgctgctgctgctgctgtctggatctcactttgagtagcaaagtcctggaaagtaattggggaatgtgtgtgtgcatgttggttattattatttgaaaaaatttttttaaagacaggggtctcactttgttgcccaggctggtctcaaactcctggcctcaaggaatccgc

SEQ ID NO: 82782 - DNA, 1097 bp, Homo sapiens
tatgtttattaatctttttggaaacagtttttcttaagaacttctgtaggaaattcctagagatgccttgggcccaggttgggtcctgtgccccattcctaaagcaataattgtgtgggattctaatcaggcctaggagatgtagctagccctttggcttggggtggtggtaagagtagagaagcagggttctctattctttacggggaaactgttccatgtaatttccccattgcaaccacatgaaatagtttccccatagagaaagaggggttcaagggtgctatttttagaaaagtgggggccagttaagccagatgtacgttaagtatataaagatccatccccggccaggcatatgatctctctaatccactggagggattagagagactggagggaggtgcagagggtgtttggggacttgttatttagttattaattctgtgcagctgttatttagttattcattcatgtatttattcattaaacatgtattatcaaccatgtgctatgtgcttggctgaaacatgaaccaatcatggccagcgatctgaaagaactcacagagtggagaaatggacatgtaaatgatcacattgaaaggtgttatcagtcttgacagaatgggatttattctaagaatggaaggatggttcaatcttggggaatgtaataatgtgatttattgttaatacaggcaaatgagaaaaatttgtgatttattttatggatgctgaaaagatatcttataaaaagaaatatctatttctgattttcagaacaacctgctattaaaatagggtcatacctaaagccagcatcatctttagtggtttaacactagaagcatttccactaaatccagaaccagcctgaagtgctcattactgttactattatttaaccattgttcaggacttattagataatacaattagaaaaacaaaaggagaaaggggggaggtagaattattactatttgcaaagtaattttaacttttcctttttggaaaacctaagattaccaatcctcctatgaatctattggaaacaataatagaattcattaaggtggctggtaaggaaaaaacaat

SEQ ID NO: 82783 - DNA, 1456 bp, Homo sapiens
gggtctctgctcaatcatcttatcctcagggtggctttttcttgtaccacctggactcacctgctagtggtaagagcatcacttattggaaaatgctggtgaacagtgtcatcattgacatatgcctgtattccatagttactccacacccacccaggtttctggtatcctaatttcctgttttttaattcccctattctggagagaggatctagtcattgatccggtaccacaaaatgaccttaatgttgctggggtcaaaatttaaaagatgtttatgtaacactcagctatccctgctatttaagtatgctgccaccaggtggtgattgtgggacacaggttgggtccaaagtcaggcatttcctgagatacaaaacgagtggctccttgctccttccaatctggattaaccctgcatattttgttcttatatcataaaataagaggctttataaaatattcactttcagtaaacaataagcaagtatcaaaacagatgtgtaaagccgtgtttaaaacatactggaatacagttgtgtatttgttttttctcttccccattctgaaccaatttcttcatttgtgttcagatatagaaaaaatcttggcaggtggaatttttctttccttcttagcattcttatgactatctaaatatggacaaaaatgaaaatgccatgttgccataagtatatcttaaagcaattaatattaagaaatattattataacacatatgccatatattaaattgctacattacccatttagaatttgaaaattgcatgttgatttcaaccaagaaacctcttgacctcaatgagaaccatggatttcctcatttagaacaaaacaatgagtttcttctgtatttatgggttctcactagcctgtgtatctgtgtcaaaagttccttccttcttttagtttaccttcaactcttggccttgggacttttcaattttcctgggattcccttttcccatccttccatttttcatccactaggaggaagaaattgccccaaatcacaatatgttagaacatctttaaggataatcattttcagtggtggttcaaaacttcatttcagctccagaactctattggctagaattcctctggttataacacagaaatccaaggtaaaatctgaaccgagcataaatcaaaaaggaatttaatggctcatgtatctgagaagtcccaggaattggggatatcttttttttttttttggcttaattagtgtttaaacaatgtcaccagatctctgcttctggattctctgtcgccgctcagatggttgactgagttctcaaaacttctctccttgtggctgtaaagtgggtgctagcctgattctctttccccaagtataggtggagaagcttgtcatctttgtcctggaagtctttgctgaagactcgatgtagctcattagttcttagggg

SEQ ID NO: 82784 - DNA, 1102 bp, Homo sapiens
aaaataaagactctctccacggctcatcatcctccttcccgcactgccaacctcattcgccagacgggaaccactgcttagagccggctgtgtctcctcccctttgtctgattaatacagtagattaagatgtggtcattgatagagtacgatgacactgacgagaagttatccagagtgaacacggctgctgatccctctagttaacacaccatgctgactcaccgcctcctagactagttggtgtgtttaatcctcacaaagatcctatgagatatcctgttgttatctcattttattagatgaagaaattgtggtttagagatgatgcagaacttgtccacagtcgctgagctgggaagtacttaagccaccctggttaacttcagaagctgcatctgttttgtctccttgtttgttatatgttgatggctttgtttacttatttgcctgttttgtttgctttgttttcttgtcatgagatggtgaacacttttccctgacatggcagagaagtctagctcgttatttggtagtatctacattgtatttttccatggggttgggtcatgctttatttaaccacttctctcctgatggacatctctgtagtttccatccttttacaaacaaggctgcagaaagtattcttgtgctctggaaatgtttgtatagaaaatggaaggagtatgcactttaaaattctggatgccttttgataagtggtcagaagacaatcttatttctaagttcttgggagagacctccatgtattcccccatgtactgatagatatagatttagtaaaactcagcgccggccgggcgcggtggctcacgcctgtaatcccagcactttgggaggccgaggcgggtggatcacgaggtcaggagatcgagaccatcctggctaacaaggtgaaaccccgtctctactaaaaatacaaaaaattagccgggcgcggtggcgggcgcctgtagtcccagctactcgggaggctgaggcaggagaatggcgtgaacccgggaagcggagcttgcagtgagccgagatcgcgccactgcagtccgcagtccggcctgggcgacagagcgagactccg

SEQ ID NO: 82785 - DNA, 1281 bp, Homo sapiens
ctgaaccaagattaagtttctgaagcagtggttagtgacagatggagatgccctcagtgcatcaggtacaacaaagccggagtccctctgtccatgatttgccctatagggggattctgtggtcagaagactgccttggggcttcctgagaagtccagcttggcagctgtcagcaccttgtatatatccagagagcaattccccctatagtcataggagaatgacaatgccaaggacctctcaaagctcctcttccatcgtggcagggaaagaggtcagggggatcctgagcaggagcagagctagacagcttccctgtgaagcatgtcctgtggattaagaagggtcacatctggtgtggcgatggtagtggtttttcttaaaattcaacaaatacatttatgtgtcgcttactgcaacaagatgagttgctgtggatggtgcttctgcagacttcttttcccatataatcttttatggagatgctccttgacataaaatccccagtgttcatagaaggattctcttttcgctgtcttgctgagatagaggttgtttcttgtgtctccatttttcttgggcacctgacaatctggaataaagactacatttcccagtctgctttctggctgatgtggcttcatgaggttaagtttggaccaatgggatttgagagtagctgctgtggcaacttctgggaaacagccttatgaggaagctcccctctttgctgttggtgaaagggagaacctgatggttgaagcttgaacagtcattaggtgccaggtagagaaagccgcatcttgaaaatgctgaggcaaccagataaaaagagcccaatgggagccctttggctaagacaggcatacatttcttcattgtttaagccatatcattttggggtttcagttgctcttagctaaacttaattgtaatggatacatctgccttctctgttccaggcatcgtgctgagggtttcaggcagagcatcttatgaagccctcatgagaaactttgctgttatccacattttacagataaataaagaaggggaattaggtcagacgcggtggctcacgcctgtaatcctagcactttgggaggctgagacaggcggatcacctgaagttgggagtttgagaccagcctggccaacatggtgaaaccccatctctgctaaaaatacaaaaattagccgggcatgatggtgcacacctataattccagctactcgggaggctgaggcaggagaatcacttgaacctgggaggtggaggtc

SEQ ID NO: 82786 - DNA, 1058 bp, Homo sapiens
ttcttccagtagtccaggaaaaacatttctggtggcttagactagggagatggcagtgatgatggaaagaagtggctgactttgaatgatatttgggaggtaaaactgaatggctatgtcactggcttgcctttgaggggtgagagagaggaaagtcagcaggaactcctaggtttgtggctggcttgtgtaacaggatgggagaatgatggttttattcaccaagacaaaccataaggacaggagcagggttgggggtagaacacctgtgctcacttaatctgttcagcacaccctatacccacttcctttgaagaactgttaatccagtcatagggtttttggttacatttaccttcagaaagccctgctgacctggctgtagtgcactgtgcttcagtgtggtaacagtgttgatgcaggcagtggcttagtgacccaggcttgcacgatgagattccttttcatgaatgtttaaggttggaagtgaaaatgaacgggacttacctttagagtcttggagcagcaaggatagggtgtcggagctgctttctggtcatttcttacctatggagaaaagtagttggcaataggagagaaggtagatagaggtaagcagaaatgggagagagagagagagagaaagaaagagagactttcttttgttgtttaaattcctaaatccaggcatgctcaagactaactctatccaagaaatttctagttacttaagccaatatatttccttttaagtctcaacccagtttgaggtgagtttctccaattaggtatgataacgagcctccaagaatgttgagtttcaggtgattttgagacatctatgtatagatatcagataggcagtgggatgcatgtacctgagctcagaagagaggacagggataggagatataaatttggaaattatcggcataaaggcaataattgaagccatggtctgtggtgattttgcacagggagtaagtatatgctgataagagaagggggtttaggattggactttgaaattggagaatatagaaagatgagcttgtaaa

SEQ ID NO: 82787 - DNA, 1048 bp, Homo sapiens
actgcctgaaggattctactgggagtgggttgacatacttagggtttttcaaagaataaaactactcaattaattctgtcctaaaattaacttgctaccttgtgtaccttacagtgcaaatggttttcattaaaacctgcagggctctaccagatctcagagggtacaaaccccagaactgacagagctgtcttcctgcataccttggagactccatgagaagggttatttggtctaccaaaggtagatatatgttctcacgtatcattttactaacaccattttatttgtgtaggtccaatacacacactgcccaacaaccctcatgttccttttcttttgtttgattttgatttgcttttcacctactgaggaatgatgctggccttacgggaacttacgttgatttctcagacaataccgggccagggcatatggatacagtgtcacctgggaaaggtcacaatattttaacaggctatttcaagtggattttggaagaaatgatgtggtacagtctgctgaacatttatacagccttgaaaacacagggcagtgaggcatcacaggctctggagccaactgcttggctgtggttattgactgcatgacctgctggctgtggggcctgggatgagttattgacctagtatgtgactcagtttgcttatcagtaaaatggaactactaatagcaggacttcatgggggtagttgtaaggattacatgagatggcacatgagtattagtctgttttcatgctgctgataaagacatacccaataatgggttatttataaagaaaaagaggtttaatggactcacagttccacatggctgaggaggcctcacaatcatggtggaaggggaaagtcacgtcttacatgacaggagacaagagagaatgagaaacaagtaaaagaggtttccccttataaaaccatcagatcttgtgagacttattcactaccgtaagaacaatattggggaaatcacccttatgattcagttatctccccgggtccctcccccatgagggaattgtggg

SEQ ID NO: 82788 - DNA, 1102 bp, Homo sapiens
gtgccaccacgcccagctagtattttgtatttttagtagagatggggtttcaccgtgttagccaggatggtctcgatttcctgacctcatgatctaccctcctcggcctgcccaaatgctgggattacaggcgtgacctaccacgcccagccgatacctgtagcttctatgccttgctcatcctctgtctcctacgggaagttttcctaggctgatggtgtggagacctagtaaaccacagctaagcatttatgactatcagcgcagctcttacctctttccccatcactccttacatgccaggcaccctggccttctctctcttctttgaatagtccaatcttgtttctaactgagggccttcatcctagttctcccttttgatcagtggttctcgaacagggagttattgcctgtccttttgggaagtgggcagggacatttttggctgctctagtgccaagagaagggaccctacagatgttaggtgggtggggtggggtgtcaggagttgctgaatgtcccacaatgctcaggacagacccacacaagaaaagcaatcctacttcaagtgacagtagcatccctttgaggaaacctgcccctcaatgcctgtttcccttagtttttcctggctttctccctggtcacttattcaccgtgtggatgacgtctgctgtaagtgtcagagcacagcctacattgttaggcttctccctccagctcacctccctccagcttgtctgtgtgtctgtttttgtcccagaaccatactctctgattactgtagctttgtaatataacttgaagcaaggaagtatgatgcttccagctttgttcttgctcaagattgacttggctattcagggtcttttgtaatttcttataatatctgttgctccatgtagtttaatacccttcatagcacttgccactgcctagtattatctttactgctctatattcagcccccagaacagaaccttgcactttataaatacttgttgaggttgggcgcagtggctcatgcgtgtaatcccagcactttgggaggctgaggcgggcagatcatctgaggtcaggagttcaagacaagcctggc

SEQ ID NO: 82789 - DNA, 1043 bp, Homo sapiens
ccaagggtggatttcaaatcctttctctctagccttgaccattctgacaaatttgtgcctctgatttctaatgcatctcttgaactaccttccaattgtgttaccttcccatgatgctccacatgttgttatacaaacccagcatatccactgcttcacaaaaccagaatcccattgaacttccgcaaagcccctggtcattgaagatatcacagaagtaagtccacgatacccagttgcaacctcaacattccagagagttagctgtcaaagtctcttccagtaacatggcactcacgggaaaccttgcatgtttcagtgaggaagaggcagtgtagcctcctggtgatgactgtgtgggctccgaggaccagaacactggaatcttggctgtgcatgcatcttcttatctgtgtgaccttgggcatgttattaaacctttccttctcagtttgcttatctgtacaaatagggataataatagtacttactttagagagtcctgtgaatgaaatgaattaaacatataaagcactcagaatagtgttatcacataatcactttaaaatgttaggtatttattttgggaacaagttgaggtgtaagtcaattaatcaatcggcatatcagaggaggctggattgcataaggcagcttactttttgtttgatgggtctttattttattcttttttgaggtggagtctcactctgtcacccaggctggagtgcagtggtacgatatcggctcactacaacctctgcctcccggattcaagtgattcttctgcctcagcctcctgagtagctgggattacaggcgtgcttcaccatgaccatctaatttctgtatttctagtagaaatgggttttcaccatgttagccaggctggtctcgtactcttggcctcaagtgacctgcccacctcggcctcccaaagtgctgggattacaggtgtgagccacccaccttggccatttgatggatcttatgctgatttcctctgactctcacatcttgttcccctagctccttctgtagca

SEQ ID NO: 82790 - DNA, 1019 bp, Homo sapiens
aaactttataccattacacaaccacaattttattatgctcatatattctgtggtggaaggactagagcactatacaaaaaggttgtttccctccatggtatctggtgtcttagatggaaaatcccaaatggttgctactgaaatcctctggagtcttcttaatttatatgttttggatctaggctggtatgaaacaaaaactgggtcacctgggatggttgattggcgtttctacatatggcctctccatatggcttgggcttcctcacagcatggagacctcagagtagtccaacttcttagagcagctcagagctccaaaatttaatgttctagtgacaaagttagaagccgcatgatctttataacctaaccttggacatcacgtaccatcatttcatactctagtggtcaaagcaatcactagcccaactgtgttcaaggcaagaagacatagactcattttccatgggagaaatgtcatggactttgcagctatgctttatagccaacacacaaactgttagacctgatgctacctttgtgtctagatgttgacagctgttacttactccatcaagagtacagtgtggctcttgaaaagctcaaagctcagagtatgaactacttgaggcactttctcagtacttgtgagcccagcccttggcagcattgccatcttggaagctatttgcattcacacttatgcaatttctctcccatgaatattcaggttcccactcacttgcctgggcctgtgtgtgcctgtgtgtgtgcatgtgaacgtgtatgcctgcatagtatcagcctcttctgtcttcatcattccaccctcctacttcattttccttccccgcttttcccttctacttctttctttccagtggattcaattagttctctttgctgccttaggaataaaacagttccctccgcagcatttgaatgagtctctatcattatttcatttagattgttgttatgtttgaaaacttcagggcagggcaggcaggaggaaa

SEQ ID NO: 82791 - DNA, 1045 bp, Homo sapiens
aggtgaggaaacagaggcttagcaaaattaagtgctggtgtgttcaagatcacttagtgatatcaagtaacgagtcctagtctcaagcccaggcctgtctggctctaatcccctggcttttaacaatggtaacatacagtttcctgcatcttaataaggaaaggagatttcttattcccagtgttgtcttttatgccacaaggccaataaaagcaccaaacaaatgggtttcacttatttttttaattgcttatttcttctgttacaaatcaataaatttattaaattttcccgtatttattcagcacctacaatgtgtctgacacaacggtaggtatagatctatagcaatgccttcatgcaatttgctagtggaggcaagtgggaggcataaaataaacaggtaaacagaaatatacaacgtaatttaagacagccagaatcgctaacaaggacaataatgtaataattattgacttggttgtggttcttatgatgggaatggttgaacaagacttttctgaggaagttttatctgagttgaagcctgaatcatgagaaagtgccggtcttataaagagctggggaaagggcaagttcaaagttctcagtaatgaaatgagctttgtatcttctagctaagctagaacttacataaagccagagtgtctagactaatccatggcagctctatttaaggccctggtaaggagcctccaatcacacactccatacagctacccatccacttatccatccatccacccacccacccatccattcatttagccattcatccacccacccacccattcacttagccattcatccacccacccacgtgtctgtggattcattcacctaccacccatccatctatccatccatccatctacccatccatccacccatccacctacccatctgtactagcccattctcatgctgttaataaagacatacccaagactcggtaatctataaaggaaaggggttttaattgactcacaattctgcattgctggggaagtctcaggaaacttaa

SEQ ID NO: 82792 - DNA, 1043 bp, Homo sapiens
agtagaggcatctgtagcctcttgaaacctacagtacatccttgcggtgaaactgctttgttgataaaaatgatccctgtgtgaaacagatgtcactggtgctggcacagagagatgaggaaggataaagaattacagtggagttgaaaacactgttaaaaaaataaaagacctaacagtatagcacagcaaagaagcaaaactgctttgaagctacatattttttctgcacctgacagtgaaaacctgtgaaacttcatacttcatggaaaaaactgaagtgaaatttgttacagtagctcccttcaatttgtgctatacatacgtcttatctctttaatatgaccaagagcaacctgagggaaggtacctagccatgtgtctcctagcttattttaataaccctgtgcctatgtttatagttaaataaactcagttttctgatgcagaactggcatgtaaggctgagcaggttgtgcacaaaatagtgtcctaggaggacactgtttacatagatatcattgtgaatagtgttctctagatttttgccatggttcagcctgtgtaactgtacttggcaaccttattagactagatcccagtaccacattattttgattactgtagctttgtagtatattttgaaattgggagttgtgagatctccagctttgttctaataaaacttttaaaaaccttggttcaagttatttaactactttgagccttatgttccttatctttatagccatacctcattttatcacacttcactttattgcactttgcagatattgcatttcttataagttgaagatttgtggcaaccctgcattgagaaagtctataggcatcatttttccagcaatgggtgctcactttatgtctctgtgtcacattttagtaattcttgcaatactgtaaaccttttcagtattactatatataatatagtaatatattatataatatatataatagagagagtgtaaaaataacgaatgtgtcctcccgtcatgccctggtcatatgttctggaattt

SEQ ID NO: 82793 - DNA, 1042 bp, Homo sapiens
agtgaaactgaaaaaatgcattgattttaccagatacacgcacctagtctgggcaagagcctcccacttccaaatcctgcattcttttgacttccccataatctaacttctgggaggaaggaagaaatgcaaactgacaaaaaaaaaggaaggttttcaaaatatgactttataaatgtaccttaagaagttccatgaattgcaaagggaaaaaatagctcactcagttacttttatttttatttctgcctttaaattcccatagcacacttcctctgagtggttgggggaactttagcttcttgttttgccaggcaaatgtttatttatacggataaggcaatgccatagtcatctgcatggtcgtactaaagaaagtctcccctcactctggggttttatcatccagtgttcttgaggagtttcctcctttcttcttggattagcccagggactacagtgcaaatacccagtgcaaacagatgtgtcaaattagtgaagggggccaggtgggaatattgtgaaccctaagcgaatatgtctcctcggggggtggctgagtgtcaactccatccagtttccatgggaggtggggggtgacagtcctcagtattgtcaaaacttctcattttgaaagagaaacgtaagtcaaatatttttgtgtaatactttcattttaagttttagctcagattcaacaaaacagaacaaaactcacagtgtgggccaagccaaacacaggtacaggccattttggaccagaggctgagagtttttggtctctggattatggcagtttctggttatgggatactgataacttctgagcacccactctgtgctcgagtactcagccatgtctggcacatggcaaacgctcaagagatatttctgaatgggaagggaaactcaaaaaggcaaagtcccatactcagggttgcacagctagtgagtgccaaagctgccactcagctgcatatgaaagtgttctctttggtttcttaatggtgccccagtcaattagttcattcctaatatgctg

SEQ ID NO: 82794 - DNA, 1041 bp, Homo sapiens
ctatgaagaccttggcgacgctgtctgtttgatgtgtcggaggatggtttgctaagggcctctggcttacaggacatcaatactgaggattctagagaatggatttggacaataagtgttgttggcatgtgtctgcaggatgagcagctgttgcctgcctcttgccctcccataaaaaagacagcacgtgactacagaatgctctgtggctgaagggacactgattctgtcattaaaagacatcagggcttgttatatggtttactaggaaaagcccttcctgtgccaattcgagcatctcacctaaccacttgttggcccgttaagtacaaagtgaactccaaactccttagctgacatctaaagcctttatgatcccaggtgccccacatcttgctgtgtctgaaaagtcactccatccccaccacatgcacctcgtaatcactttcccctgaattcttgactggtctccagatagcttacaattcctcacaacttttgtctgtgcacgtgttcttcttttttctgaatgctcttcctcctctttgccaatggcaaactcctacttattcttcaaaacccagctccaatagcaccaaatcctctaagcagcattacttgccttctcttctgtccctttccttgatgctcttctctgctgtgactgtgaatccactttctttttgttatgtctcttcatcagatcaaattccatgatggcacagaccatttatcttggaactccgcatacagtcttagtcctgtgttttcttgacaggaatgaaaaatgagttagaagtcttagtttgaagtctggtttctgcagagccatgcacacttggtgaagctcagctttgggtccagcagtggtattttgccaaagaagttagcctcctcctctcagtccaggagtctggcctttggttgtcttgcaaccttagtactgatggctggttcctcctcttgactcctgtaccttgatttggctcagagtttttctacatagcaatgtaggaacatgaggcgggtgacacaatctca

SEQ ID NO: 82795 - DNA, 1078 bp, Homo sapiens
ctactttggtggtcttgggcatatgattgagactctcacatgtttcctcatctgtaaaatggtaatttcacttttctacatggttgttagggctaagtgaattattttttataaagttcttagaattctgcctgccgtgtattaagtgcttaatgttgatagttctgtctgtctgtctatctatctatgtatctacccatctatctatctatccatttttttagaaatgggtatctcactatgttggtcaggctagagtgcatggctattcagaagcatggtcatagcacagccttgaacctctgggctcaagtgatccttccgcatagctggaattccatgtgtgcaccactacacatgatctgacagctatatttttgtttctctccctctccttccttccttccttccttcttgccttcctgccttccttccttccttccttccttcctgccttccttccttcctgccttcctgccttcctgccttcctctgagtgtcccctagatcattgactccattggttttattatttttcttaatgctgtttatttgataagtagaaatagttgtcaaattttaatgtaagtttcttttaaccttagttgaatagaatgtttgaaacctaccattattgagcaattttggcctatttatgggagtggaatcacccacttaaatatcttgtctatttttctgttagctggtaacacttttcttctttccctttttctttttctctgtctctttttctctccccctctctctttttctctctcccttccccctactttctctcccacctctttctctctctgatggaaatatatctacttttttctttgttattaacttcaaatacaatacatggcagttggaatacagaagtatataaagcagaaaatgagttttcctctgaaacgctaccctaagaccatgattataaacaatttagtgtcttttttttaagatttggcagtggttctcagagttagtgtgcatgagaatctcttagatgatgctgttgtctaaatgggttcctctaaaattcatatgttgaaacttgatcttcagtgtg

SEQ ID NO: 82796 - DNA, 1027 bp, Homo sapiens
tgttcacccattaatccatccattctttcatccatccattcatctacccacctattcttccatccatgcatccatccatctatcctgccctacatccagccttatacctgtttagtacaattgtttcctctttaagggtcatgtggacatctctttaaaagccaggtttgacagtggggaccaacacgtacaatagtagccagcccaagtgaagcaatatgggaacatcaaggaggaaaagtgaattatacccttatcaaacactctcatcgcacctcacgctttcctcttccaaacactcatctatccatatgttttaattcccctgtcctctctgctttaccagtatttctttgaacactaagggcatattgtctaatttactgttgtatccttacccctagtacaaagtctgcataaagaacacattttgtaaatatttgttgaattgagttgaattgaaaactacagaaaaaaaaaagatgacatttgatctgggctccaaacaatagcaaataacatttagtccacagcaacagtgtgagtagagtagctggggttattctcattttctaagtgaagaaacaggtccagaggggttaagtggtttgctccaaatcacacagatggtaaagggttggagccaggcttctaatcctggagcctgcatgaattccactgacaaattaccattggatgcaggaaaaaaacagagaaagactcatggcctcttctactgatgactttcccatgacatttaacaggcactttccacatatttgaatcccacccatccatcaatttttccatccaccaacttatccatacatcaactcatccagctatccatctgtttacctatccactcttccatccattcattcatccatccgtctatccttccatccagaaaatgtttaatgagcctctgacttctgtttattcatagattgttccaagtagctagaaatgtggctggcatatagtagatactcaattaatatttgtcccagacagttggaaagta

SEQ ID NO: 82797 - DNA, 1063 bp, Homo sapiens
gaaatgtgtcccccagcctgaaattcatgtctacccagaatctgtgaatgtgaacttatttggaagtaaggtcttttcagatacaataaaattaagatgatgtcataatgagttagatttgcccctaagtccaatgactggtgtacttatgaggaaagggattatttggggacacagggacagacacatagcaaagattttagaaagaggaatcatgtcaccccaagtcttctctctctgttaatcactcccagtttcttcaaccaccagaggtgtcattcaaaatctccattacctctctggttatatttgtttcatgatgctccagagtgctaatatgacaacagagacagagattggcacgatgtacctgcaaaccaaggaatgctggcagccaccagaagctagaaatggcaagggaggattcttacctagaacctttggaggaagcatagcccctgctgacactttgatttcagacttctagcccccagagctatgagataagaaatgtctattgttttaagccacccagtttgtggttttttgctgcagcagctctaggaaacagataccatgatgattcttactacagagagttcttccttgtataacactgtagcttgtctttgttcactgatttcatcatttcttcagcagatatttgctagacatttactgtgcgctaagcactggagatgtggtaatgatcaaaacagtgtcctattatctcaggagcttccagtctgggtcaaaagcagtcaggtaaacaggcatttctttgatttgccttatgtaggatgtgtctctgtggaaggaatctgtcttccatagagcttataggttgtggttaaagtgctgaatctggagtcagacagacctaaactcatgtcctagatccaccattcaccacctaaatgaactttggcaaattgtcttttaacctcaccaatttcagtttcttcattttaattatggataacaatggcattgtgatgaggaccaaatgagatgatgtatgctaccttttcagcctattgcctggttcaaagaagttactgtt

SEQ ID NO: 82798 - DNA, 1012 bp, Homo sapiens
atttgctgaccccttgatcttgggcttcccagcctccagaactgtgagaaatacatttctattgtttataagctacccaggctatggtgttttgttatagcagcctgaactgactaagacactggtcaccactaaatattggaactccttgagagagagggttgtttattcaacagatatttgttgagcaattactgtggcttggcactgttccaggcacgctggatacctgagtatcgttgcccttgcagagataacagctgttaagccatatgcttacactagtcttggggacagcaacattagaattactggaagcttgttagaaatgcaaattcatgggatgcacccaaacctactgaattccagtctctgagcatgtgtcctagaaagctgtgccttaagcttttcagatgcttcttttgtccatcaacctttaagaaccgttgccatattgaatgcctttccttgggctgtgcgtctcagcctggctcactcagctttggcagaaggtcagggccattggtcagttttcctctgaagggcctgttggagcggcaggcatctagaacataatataaatttctctgatgaaaacacagttgtttgatgagcacagcagctacccttagaaattaggttttcttcctctactacataaagtttaccaacttgtttttattactcttgcttcttccatttttagccattgttgtacaaatccatgtacagagagaatttcaaacaagacattctaggatgactgttcaaattctagttttctcttctctggaacttctgaagaagtggcagggtttcttgtgagttttttgaactgggaggaaaagctgatgctaattggaagatacccaaggctatactttgtattaaacaaagttattaaatgcacgccctcagccaagattgccttattcttttctgtgtctctatgtccaagctggcaagctcagggcttggcttgtcaagtctttccaggactgctaaacagaga

SEQ ID NO: 82799 - DNA, 1130 bp, Homo sapiens
gtaggtaggtaataaggctgattattcacaaatatgttggttcttatgcacccacatggatgtgattcctctcccaagcagacctcggaggaggtcagagctttattccgattacatggcaatttcccagctattctgggaactgctctttggaaattgccatcagagcctgaacataatttttaaatgtcctcaattgtgagaaatctccagatttgattttttttttttttttgaaacagctaagagttatttggagctaagtccagtgaattagtctgatgattaagctattctggggccactgtgatgtacgattaagccttaataagagcatggtcaggataaggcatgctagggttaggcaccaggccaaagaggaggaggaaagagaaggtaccaagtagaatcctggttagtatggatttaggctatacttacttggttccaaaatgcccaagatgtcaaggcaaagcataactgaacatggttcagaagggatttacaacatgagcagggatttgcagaatgaaccagaatgttggagttcgttccagctatgctgagagctgggagagctctcatgtttgggagagctctcatgtttaggcaagtctgcaagccttgaccaggggcatggacagcagagccaaactcctggagaagaagatttgcaagaactatgcacagatcataattcgaggttagggagagtactccagttctcttgggaggttggagcatgaagtaggttgactgtatggatgaaagtgccaatccaggcagaaggtttgcattcagagtgaacataaaactcctaaccaagtccttcactgcccaagtgatgtgttttctggcttcctctccatcttcatctccccccagctctctcccttgctttctgaactttaactggaaaatccaaccaatggttttctttctgtttcttgagcacatctagttcatttctgtcccagggctgtttgtccttgctgtcctgcctgggatactcttacattagattgttagattttcacttgtctggctctttctcatgtaagtctcatctcagctgttaatttctgacaaaggccttcctgcaccattgagaccaaaatagttcctcccca

SEQ ID NO: 82800 - DNA, 1321 bp, Homo sapiens
tctgctgttcaagaaactcatttcttgtgcatcgattttgaaggtgatggtgtagacaacctgtcgagagagtttgcaacatccagatgttttcatcctcttccaattgcaggaggcttttggattgtaaaattacagtgcagatgttgagggacatgggatgaacacccatcacatagattggccatattgcagtgtgttaaggtcatatttcctggtggataataacagattgataatgcattcgcaccacactgctgctttgtgagagatctgtcttggcaaagtctcagagaaatcaagggagagttgaaagggctgatgtaaggaagagggattagttatgttcttgtgtgctttgggcaaccagagtaatccattgtcttctctgctatctaagctatcatcccacagcattctttcactccacagatttcactgagcatcagcaatgtgccagggagtgtgcaaatgctgtggatacaaagacaagggggaaaaaagaccctgtggctgctctcaggaagcagacaagttagtggcagacatggacacaaatcaaattttatgcacaaatgtgaaattgcaactgcaataagtgaaatgtaacagaagtgcatggtgctaagagcatagggaacgggggcaatttacctaaccaaacagatcaggaaaggcttctgggaggaagttacaatgcaagtgagaggtaagtaggcaaagagatagggaaaaaaaacacttctagcagcaaggaaggcaggtgcaaaagtcttgtggcaaaaaagtagtgcacactcaaggaactgaagggcagtgtgattgggagcagcatgcaagggaaagcataacacccaatgtcccaatgtggttggggagctgagcagggtccagacagaagggccttggattatgtgaagggtttggggttttgtcctaaaaacaatggaatacattagaaaggtattaagcaagtgtgtgtgtgtggtgatggggagtggagctagtgactccatttatattttgaaaagatggctctgatcgcaatgtggaaaatcaaaggcatttcatttcatggttctccataaaatcatttgaagactctccattgctgtcaggatgaaattgaaaaacttcaacattgtttttaggacatgacccaatatggctaatgttaactttaaatcctcatctcagaaaatactccattatccatgtcacgcccagcaagtctaacaacttgttgtattagtcagtgattgctgtgataatgctgtgtaacaaccccctccgcaaaaactccaaatctcaatggcccaca

SEQ ID NO: 82801 - DNA, 1047 bp, Homo sapiens
atatgttcgtatcttcttatttaaacccagacatattttgaaatttagaactattcttactttagaaaggcaatgaggtacgtacaccatataatacagaacagctccgacagtctcaaggtctcagacctaagtatttatccttcttcagcttgagacggtgcaacagctactgacctgattctgaggcaacagcccataaccaaactcttgtatattctgccatgaaacgtgatcattcaaaatgggaaaatagaatttgtagacatgtttaaatcagagcagctccagtttgggacaaaaactagttatatgcaattttttttttcagagcattttggattttaggcttctggatgaaggttgttggctggtgttagctttgcaatgtgatggggccgtgcatcttcccctgtgtgtgttctcctcttgaaatgcactcgacccctcttcatgtataaattccagtcatacatggtcccagcatcactgctttctttgactatctctcatcccccaagctggaaataatttctcctgttgctgcattctcacaatattgcccagtctgtacccctttgttctaatcacttgtattgattcttgagtttaggtatggtgtaaaactccaggcattccgtaaatgttctttgattctgatgctaaatgccactatcacctagtttcttttcttatgcctaatgctgatggctgctgcagtagtcatcatcatggtacctactgagcacttatagtgacaaaaccactctacggagcacttacactcaccacctgacgtgacctccgtggcactgtgcagcaatgccgttgttaagcatattttacagatgaggagactgaagcaaagcaagacttaatatcttgccaattcataaattctggggtctgaggatgataacattgaactaacaatcagcccagagactttgcagatgatatttatgactccctcagatgcagaacagctgggtcccactgctttttggagcaagtgttatctggtaatttttttttttaaagtatttt

SEQ ID NO: 82802 - DNA, 1073 bp, Homo sapiens
ttccaccaccaggcccagctgatttttgtattttagtagagacagggtttcaccatgttggccaggctggtcttgaactcctgacctcaggtgatctgcctgccttggcctcccaaaatgctgggattacaggcgtgacccaccatgcccagcctgctaatatacattttgttagaaatgggaactgtgctatgttgcccaggctggtctcgaactcctgagctcaagcagtcctcctaccatggcctcccaaaattctgggattacaggtgtaagccactgcacccggccacctgtgttctttccacttaatttcgcagtctgtcgttcaggtcttaatgaatgggtcccacctcgtatataccctcccatggatgtaaagaaatgcctgagctagggccactttttcctaatttactgtaagaatactttgggcctgaatctaaatcagtcttaaaacacgcctccggagcagtgtgaagaagaggcgagaacgacccccagaccgaccaaagcccgcgcgccactgcatcccgcgtccagcacctacgtcctgctgccgtcgccgccaccaccatgcccaagagaaaggctgaaggggatgctaagggagataaagccaaggtgaaggacgaaccacagagaagatccgcgaggttgtctgctaaacctgctcctccaaagccagagcccaagactaaaaaggcccctgcaaagaagggagagaaggtacccaaagggaaaaagggaaaagctgatgctggcaaggaggggaataaccctgcagaaaatggagatgccaaaacagaccaggcacagaaagctgaaggtgctggagatgccaagtgaagtgtgtgcatttttgataactgtgtacttctggtgactgtacagtttggaatactattttttatcaagttttataaaaatgtggaattttgttttacttttttttttttttaaagctatgttgttagcacacagaacacttcattgttgtttttgggggaaggggcatatgtcactaatagaatgtctccaaagctggattgatgtggagaaaacacctttcc

SEQ ID NO: 82803 - DNA, 1042 bp, Homo sapiens
gtctgtcttccttagcgtcaagggcctggatgtggctctggctcagacagcagctctatctgaggagtgaggcttggggtggaggggtggaggggtggaaaggagaggagaaggagctgctgagtctcagtacttcctcaccctggccaagtgcaactccagtttcatcaccttccctgactgtatcagtcaggccagaccatgtgatgctacagtaacaaacagcccctcatcttagttgtggtggctgattaccaccaagttttcactctcaggtgtgtttcatgtccctcctaggtctgttgggggcttggttcaattcttcctcactcagggaccctggtggacaaagcctctgccatctggagacatcataagtttccatgcagaagcgacatatgtcatttccacctacacatcatggctagagcacatcacgtggccacatctaatatgaaaggaaatgcaatcctggcatgtgaccagaaggaggggagactaaatattcctgaatggccctgatgacgttcctattgattgccttcccttccctggccatacccagttttcttttcttttttatttttttgagatggagtttcgctcttgtcgcccaggctggagtgcaatggcgcgatctcggctcactgcaacctcctccttctgggttcaagcgattctcctgcctcagcctcccaactagctgggattataggcatgcgccaccacacccagctaactttgtatttttagtagagatggggtttctccatgttgggcaggctggtctcgaactcctgacctcaggtgatctgccctcttcagcctcccaaagggttgggattacaggcgtgagccactgtgcctggcccatatcccgttttctagccatgcccttgtctgtaattacctcatccctggccacaccccttccctcagagcctctgcattcctgatcatgtccccatgagtgaggcagtgctcgtgtgactgtgagtcctggtacctgcttctgaaaatgttgccctgtgtctattctcca

SEQ ID NO: 82804 - DNA, 1007 bp, Homo sapiens
cagtggctagatctcagctcaccccaacctctgcctcccaggttcaagcaattctcctacctcagcctcccgagtagctgggattataggcgtggaccaccacgctggctaatttttgtatttttattagagatgggttttcaccatgttggccaggctggtctcgagctcctgacctcaggtcatccaccctcctcagcctcccaaagtgctaggatgacaggcgtgagcgatgcacgtggccttaatataagactttataaacagcaattcagtgaggagttctgggaagccaatcaataaagccaggccataaggctactctggctagtcctttcctctagaaaacctcttgatacaacaagaagcctttttatcagaccagtatatgggaaatgccagaaggctgatgagcctggacctgaggccattcagaaaggcagtgacctgtggctcgcacctgaccttcccaggagggccatctcaagtggttggtggtgtgaaggctgcttctcatagcccatgaggccagtgaccctggaagattgtttcatacagccagcaagagagtgtttccccagccagaccaagactccttctgtaaggccattttgcatggctaacaggagccaatgtgaggctgctcccagcggggtagatggacacaacaaacaattctttcctggcacaatgaagaaaccacagatcgatttgtaaaactaagacaaaatctgacttcacctggtcctcagacaagcccccatctataggaaggccagtttttaaaacaagttacaagggccgggcgtggtggctcacacctgtaatcccggcactttaggaggctgaggtgggtggatcacttgtggtcaggagttggagaccagcctggccaacatggcgaaaccccgtctctactaaaaatacaaaaattagtcgggcgtgatggcatgcgtgcctgtggtcccagctactcagaggctgaggcaggagaatcacttgaacct

SEQ ID NO: 82805 - DNA, 1032 bp, Homo sapiens
agtgggtcagagatattttgcgtgtgtgtgtgtgtgtgtgtgtgtgtgtgtgtgtgtgtgtgtgtaagatgggaaaagaataggaatgagaagaccttaagatggtgaagttggagatagtaagttttcctttattgcagaatgtctgtgaaagcagtttataatgaaacaaacatttttgatgaaatggttaagaaaaaaaccaccttgatctcatgaggagcaaatagtaatagtagcagtaataataacaaacgttgtctattgttgttactggtactcttgacagctaagctctcctacccctgacacaggttcctggtggaatacctcaaatgtcgacttcctgaggtggttgctattttgttctgttttgattttaaacagaaagcaagggcggaccatggtttgattccagatgtgaagttagaaaaaacagtcccccggctgcaccgtccgtccctccagcatttcagggagcagtttttggttccagggaggcccgtgatcctgaaaggcgtggctgaccactggccgtgcatgcagaagtggaggtgggtggtcgctgagggaggtgaggtcccttttcccattttagcgttccccagggctccctgaattcctcccgaccatccccagggaaatgcaaccttgtagatgcttcactagcagcccttgactgattgccaaggggttaaaaaagagtgaaaagtaaggtgctctgaatttatgccgcaggttatgggattcttaccttctaccttgctcgccttaagcggttttttaatgagtccctaagtggcagtcctagaatgtttctgttatgcaattttacaggatcctagcaatttcagaccatctcagggccctgaagctaagagcagaaataacccaagagacagcccctctctctctgagggattctgtggtctcttgtgtttgtttctagtcctttctcagaatcatgatggggagatcagatcaggcagctggagcgtggctgtcatgccgcggctctgcatgagtttggaa

SEQ ID NO: 82806 - DNA, 1029 bp, Homo sapiens
actgcactccagcctggatgaccgagtgagaccctgtctctaaaaaataaaaaagaaagaaaaacatacacgtggaaccataagcatgtgtgtggtggggaagggcaggctgggcccagggagcagcatgtggaagggcacagaggccagagtgggcttggggcagcagtggagtgaggccaccagctgactgtcagggtctctctccccaggtgatggggaggaagtacatccggctgtattccccgcaggagtcaggggctctgtaccctcatgacacgcaccttctccataacacgagccaggtgggcactgggggtctggggtgacgttgcaggttctccccactgcccctggagatgatgacgtcctttgctttcttcaggttgacgtggagaatcccgacctggaaaagttccccaagtttgccaaggccccattcctgtcctgcatcctgtctcctggagagatcctgttcatcccggtgaaatactggcattacgtgcgggctctggatttgagcttctcggtcagcttctggtggtcgtagccaggataggagctgaaagggcctgacatgcagacagcattcatctgttcactaatttcctgggtcctggaatctatagagacaagcaggactgaacctgtgtcctgaagagccttcactgcccagtggcagccctggggggctgagctccagcactggacaggcacagagcaggggctgcccaggaaggagcacactccaggccaggggtgcatggcagaggaaggtggggagagcccagaaggacattgcagacagacagcctgcatggggactctggcatcagaaagccgaatgtttttgggaaacgggtgggtcacacaggcaggggtgaaacatgggctctgaggttggctacctgattcaaacccggccgcgctgtgcacctgctgggtgacttggccaggatcccccacttcgctgtgcccatatggaaaagagggcaaggccagtcctcactgccgagggccgagaaggcg

SEQ ID NO: 82807 - DNA, 1001 bp, Homo sapiens
tcggctcccggggctctgtacaggtacttcccggaatcctggctctgggcccagccctcctgcactgctggcgcatcctcccacaagagctggcggaggccatctcccaggacgtgtcaggacgcctccctgctgtgccccgcagggacgcactgccgccctcctccctggttctgctgttggggtccaagggccctcgcttactttatttttctcaggaaggctgagtgttctgtgcaacctgcatcatcttggtagttttgtagtgagtgtctcttgtcgattgctgctttctggagtggtcttaacactggtttgcagggctttgcaaccgctgaaccagcgtggacattgatgtgtctttcagtttctatcgttttgcagctgtagctgtttgtaattgcaattgctcttacgggcctcgtacacctgtatccttgggcacctggtgattatttccttgggcggagtttctgggacaaagtgcactttttttttgaaagcttttgattcacattagcaaataagcttctgaaaagctgtggctgtccacacgccacctgcaggatctgagtgcaggagtttgggagccctcggcttctgtcactgcgttcatgtgttcagaattgtttagtaaaacccaccgcaacaagcagcaagcaaacaaaagactccactgcactaaggcgtttgggattattttcaatattaatctggggcccagaagataacacgatgccacctgctgcccatttcccttgtggcttccccggaggtttgcagaacatggaggtgtgcaccagctccgccgtcattggcctttcctgtttcagggtcaaagctgcgaaacctgtgggatcaggatgcacttaccctgcgtggccaagtacttccagtcgaatgctgaaccgcgctgcccccactgcaacgactactggccccacgagatcccaagtgcgtgggccctgaggagctcatgggaggggctgggccagcaggac

SEQ ID NO: 82808 - DNA, 1038 bp, Homo sapiens
tagtaagtgggagagccaggccctgaatcccggcattctagctccagaatccacacctcttaccactgcccagtcctgatgctgtgactcgtgttcttcttctcacctttgtagtaaacagcatgaagaatgacttttaaaaatgatagcaaatttatatttgttaatgtaaattagtacaagacccaggacgttgcttctgatgtgcttggggttgactagtgtcatttacttccttttcagttcgttcccacatgcagggcagcacaaggagaatgggcgtcatgactgatgtccaccggcgcttcctccagttgctgatgacccatggcgtgctagaggaatgggacgtgaagcgcttgcagacgcactgctacaaggtccatgaccgtgagtaccgtttccctgttcccagggcgctctggtgctgtgttgatcagggaccagtgacataggtacaataccatgtaacttgttaaccggtactcctgagctgagcattcaagcctcttcacaatcttacacgggcccatctttctaatttcatcttccacttttattttttttccaagtaaacctgacatttagccctgtggataaaaacttagagtctaaagctgtatagttgtggttcacaccaagcctccaggacctgccccagcctcagtttctgtatctgtaaagtgaggatagtaattgtacttaacacataagtaagtgcatggttcagggaattgagagacatgatatgtacaagacagtggcgcagagacagtgcctagtggggtattgatggacacagggcagcttggctgggtgcggtggctcacgctgttatccctgcactctgggaatcaaggtgggaggatagcttgaggccaggagtttgggaccagcctgggcaatgtagcaagaccctctctatttttttatttgaaaaaaagaaaataaattataaaacaaaaaaatgggggagcttagcacaacacttaagggcacagccttagactgggccggacctgaagagtgtgtccctgc

SEQ ID NO: 82809 - DNA, 1071 bp, Homo sapiens
gcttgggctctgttgcccaggctgttctcaaactcctgagctcaagcgatcctccctcctcagcctcctaaagtgctgggattacaggcgtgagccaccgcacccggcttccatatcctttctaattggtcatggcttgggataatggtgttgcttttaattatcatcatccataaagactttttcttactcaacagatctgagcttgtatttggtgcccaggacatgtgctgggttcccgaaatcccaaagacacagaccctaccctcagggatttctcattctagcaacatagactgatcaattactgattataacgttagaaggcatgtctgaagtagacagccatcaggacatggtgatttcaggctgggctttgaagaatgaataggagtttttcaagtgtcgaaactgaaccctgaccaacctttgcttttgcagacactggaagaattgtcttaccaagctcttgccctgttttctggagcacaacatgaaaagggatgaagatcctcacaaggctgccaaagagatgcctttccagggctctggaaaatcagcatggtgcccagtggagatcagcaagacagtcctctggccagagagcatcagcgtggtgcgatgtgtggagttgtttgaggccccggtggagtgtgaggaggaggaggaggtagaggaagaaaaagggagcttctgtgcatcgcctgagagcagcagggatgacttccaggagggaagggagggcattgtggcccggctaacagagagcctgttcctggacctgctcggagaggagaatgggggcttttgccagcaggacatgggggagtcatgccttcttccaccttcgggaagtacgagtgctcacatgccctgggatgagttcccaagtgcagggcccaaggaggcacctccctggggcaaggagcagcctctccacctggagccaagtcctcctgccagcccgacccagagtccagacaacctgacttgcacagagacgcccctcgtcatcgcaggcaaccctgcttaccgcagcttcagcaactccctgagccagtcaccgtgtcc

SEQ ID NO: 82810 - DNA, 1720 bp, Homo sapiens
ggtgagcctgccagcgccctcctggagcgccaggtgaggccacattgaattagatgaggagacaggactctgcccggaaggtactcaggcaagcggggaagagagacacaaacaccgctaggtgggaatgcagcaccttcatctgggatgggacagagagctttagggaagaagtggggcgttttgcttagttctcaccataatggtttgacgtgctcatagtccatccaaatgaaggcttcccacagctggccctcagtcaggcccttcctttctttttgtctgtaggatttttacgtggcgatttccaagcaccatctgcacggagtcattccagtttttggacagaatgcgggctgccggcaagttggaccagcctgatcgtttctctttcaaagaccaggataataacgagcccacaaacgacatggtggccttttcactggacggccctggaggaaattgtgtggccgtcctgaccctcttctctctgggcctcatttctgtggatgtcaggatcccggagcagatcatcgtggtagacagctcaatggtggagaatgaggtcatcaaaaggtaagagtccggcatccgcagcatcaggtctggccacgtgctaggcattggccagatacagacgggcaggggtcagcagtgccttctgggagcttgtgggatgggagttgcagatgagtgactggggattataggccggtgtctaaggtgtcctctgctggtgcctcccaggtgttatgggaatcagccaaagagaaggacgcagcacagcggggcaggggaggggcagggaagagaagggaggactgttcctgagggcctcgcaacagaactggggcttcctggggaaatgggtgttttctgggctgagagacgggcaaaaggaacagtccccacagagatacagctatgtgacaaggggtgagcgcggtgcacgggaaggtgggaaaggggatggatctggggcagccatccacaccagccttggtaatgaagcatagccagttgctggggccactgctgaagcccagccacagaggcctcttgagggaggggagaggctgcagtagcaactggctggcctatgctcaggtatccaggtcacaattcccttctagcttggggaaggacggcagcctggaggatgacgaggatgaagaggatgacttggacgaaggtgtagggggcaagcgccggagcatggaggtgaaacctgcgcaagcctcccacaccaactacctgctgatgaggggctactactcccccggcatcgtcagcacccgcaacctcaaccccaacgacagcattgtggtcaactcctgccagatgaagttccagctccgctgcacccctgtgcccgcccggctcaggcccgctggtgagtgctcctgctggtgctgtgggagggcctggcctcgccatcatccaggaagaccctgaggcctggcctgggacctagaccttcaggctccccaggccaggcgtgcagccacagaacacacagaaaaacacaccccatccttgcagccaactcaagggatgccttccccaggtgcctgtgctgtgcccacacctctgtgggaaagctccccgcaccgcctcttttagtcacagctgtgctgcaggcaccagcagtcactcaggtgggctcacaaggaagagcagagcacttccgcttccccaccccgcccactctccacgggcg

SEQ ID NO: 82811 - DNA, 1004 bp, Homo sapiens
cagtagattagagagcttaagaataataaaccccaaagcctgtttgatgtttttaaatgtgtgatgcactttcacataggtcagcccatatggtcctggacaaacccctgtgagagacagtttgggactcagtgttctcggttacctatgaaggacggaagttcagagaagccaaggtgtaaagtgtgaacagacctgactgaggtcaggcttggctgaccccaaatccttcattcgtaaaagctgcagttgtgcaacaggcatataagtaactcatgcttcaaggtcggccaaggccagaaacatgagaatggagctctctgaaggttctgaacatgggcatcattgcaattcccagacttcagctttgtctcctcttcctgcagagtgtgcctggccgaggtgtaccaggataaagcacttgttggagatttcatgaatcgaagaggtgactatgatgacccaaaggtaggtcctgtgtgagtgtagggcttggtatgcttgggagattggggcagctagacttcagtcagctcctctcatcccacagtgcccctgccagccttaggaacgtggactttgtttcctgctcacttgagaaatcaccgagtcagctctctggtgttggccttcacttgatctggcttcaaacacctgtttttaaagatgattagaatctgacaggccactttgaagggctgctgtgccttgggcctgttttgttaagaaaatagaacatttcttcagaaattacaggcttcctagaaagctcgcagactgggtgtgggttttctttccgagttttctgtccagaggggccaaggcggtggctgacaaggagggaagctgtctgctgacccagactcctgcccttcgcctcagaggctgctcatctttcatttctgtgctaaccctggacactacagtgtgtgtggcaggacttgtgccaagtgaggccagtggacaaggagaggctaccttttccgccaaggaggccacaggcg

SEQ ID NO: 82812 - DNA, 1050 bp, Homo sapiens
cataacatacaagcacaacatacagaacgtttctgagcacacatgatgcataattaggacactaagacctctaactaaacacactttgcatccccatgattccctctaatacagcgccctttcaggcagttcccccccgccccgttgggcacctttgtcacacatggcgcttgctaaaatacactctttcccgctggtcactgaggcctcgtcctatacttgtctgcccagaatctccctcagtgtctggcacatggtgggcccagtaaatattgtgaggtgacagttgtggggattctctgaggaaggaggctgcacaaaacacattttgtccacttttttatggtaattccccatgatgtcgtctctgaggatactgactttttgtcttggctctgtgtttgatccaggtgaagggcccatttgtcacctggcaggtggtacgggacattttgcatgccacgtttgaagagtctttggataaaacatctcattccgttggacgaagagctcgctacatagtcaaaaacccacaggcctatctcaactataagtaagcctcattgaagccccgtcactccgggacacggttacgttatcccgtttgcttaagagtctggtgggaagtgtggctggagcacactgaggtgtctgatgggctggccaagtgttggagtctgctggggagatggaccttggttttttgagggtgagggccaagcatgattctgggtgctttcccatgcaaggtattgcttagaccttatagcggccatgagaagtaggtggtggtatcctttttttggatgaagaagcggagactagataggctgactcgctaagtaccacgtgcctagctggtggtggaggcagaggcagaggctggcttttcctgctgtttttggccctcagagcagttcctgagagctctgattggtggctccctccagcagcaagctaggcaggacctgggatcattggacaggatgccctctgccatgttcttagcagagctgagaactgtcttcctgccctgcccttgtgtgtgtg

SEQ ID NO: 82813 - DNA, 1010 bp, Homo sapiens
tgaaggttcttttaaagtaaaatctgctgctagtgtctgcaagtatcggaattttttttccctttcattacttttactttccaaatcaaatccctagtgtcgggttgatctctgtggccctggttgggtgttaggttgggtagttctgggccttagtgcagtgtgggcttgaggctggtcctccagtgaccaccaggtggaaaagagaagaaggaagtcgcacccctcaccccacatgcagacccctgcggccggctgcgagtgtggtgtgatgagaacctcccgccccctctgttttctaggcgttacattttttcggtggtggagaaccttcagaggctgtgctacatggggctgctacagtttggtcccacggaaaagtttcaggataaagatcaggtaatgtccctcaagcccaaacgaaggaaattctgattgttaaacggtctccaagcagccagacccaatgtgggttctccctgtctggtgtctccccttaggtctttatcttcttgaagaagaatgcagtcattgttgacactaccatctgcgacccacattacaacctggcccgcagcagccggcccttcgagaggcgcctctatgtcctgaactcaatgcaggatgtggaaaactactggtttgacctgcagtgcgtctgcctcaacaccccactaggtgggtgtcggctgtctcggctgaacctggctgcttttgctcctttctgtgtgctaactgggatttagggctagaaaagcctaggagttgcctcaaccagtggtatgttccgagtgctccccagaggcccagagcacccctggggctcccttggaaaggaaagtggcgggccttgaatgggtggggtgcttccggttcccccactcagttgagcccaagtagctgcactttgtcttcatttgttcattgagtaggtatttattaaacacaccggctgtgtgtcacttcctgtgcctgacagtgccacaatgagaacacagcccgccctgcct

SEQ ID NO: 82814 - DNA, 1050 bp, Homo sapiens
aaaactcaggggagggagaaagttctcagctgtgtctcaactagaaactctcacaggcaggcagagggctgatctggcttgcacatgatagtttgtgggatctgccaagtattggccacacatactttgaatcagttgctggttaatttctcatataattactgacttctagcgttgatgcacatgtctgaagatctagcacgttgggttccctttctcacaaggcagcacccataagtgggggtgccctcttcagggccccacaatccccaccacccccaaaagtttcagtgacctgacattttgtttgcatcatctccctggcccctacaaggagcagaatttgaaacccccaggccaagaggctgtatctgattcatgcagacagactctgtcctttctcttagcccttgattttctcagtacattattgcatgtttatttgaactgcagggttaaaacttcccagcctccagtgccccaaggggaggcagaagaagacagtcaaggaaaagagggcccaagtggatcaggggactctcagctgagtgcttcctctagatcagaaagtggacggatgaaaaaaagtgataataaaatgggcataaccccgcttagaaattatcaccccattgtaggtaagctgcagcttcttgtctgtgtttagttacatttgatttgttgtttgtatgacaatgtttgaggcacttggtcctctccatttgagctccgagccgcagtcagaagaatcgcgtctgagctgtgggctggatcctgttactctggccgcataacttcttccagcatctgtttgtctatctgcaaaaatgggaacaattctgcctgccataccctacaaggctttggagagactcagatgaaatcctgctagatcccaatatgaggaaagattaatttcttctgctgaatgtccttgagctggaacattctacaaactacagaaaatttcttcctgtcccaactcgacaaatcccctggcagcacagtcattgatgagtctgagtgctcctataatttcctcagagttgg

SEQ ID NO: 82815 - DNA, 1068 bp, Homo sapiens
tttccagggtggggaaaccccgtttgatccttccttgtttctattgggtaccgtgaggcatgtctgtgttgcctgggttgaggaaggccttccatgttgagattgggagtgttatctgcttattttgtgatgcccaggattcagaagatgatcatggatcaggagaagcaggaaggcgtgtccaccaagtgctgcaagaagtccattgtccgcttggtgcggaacctgtctgaggaaggtctcttgcgattgtatcggaccactgtcattcaagatggcatcaagaagaaggtaaccagggcctcccccgatgcccagagccagcctcgtgctgttggaagtttttgtctagcttctcttgtcattgctgtatcctggtagttgctttattaccagtgacttggaatttcccattatgcctcctgatttggggaatatgggttagctggaaacagaaaagagcaaaaacttgctaggattgtaaagcatgtcaactccaagcagcagctgtgcaggcatccagccctgtggtcagccttgaagaagcagaaggcaggcagagacatattgaagttcagtcattgagggacaaatgaaataacatttaggtgggaaatttagactaagcagcaagaatgctttcctcggagagctgaggcaacatcccagaggaagcaatggcattgagtcagtgaggatgcgctgccgggttatccgatgggagcagtacatctcttctgcctcgacatatctatttctgtaaaatttaaagtttgcggggggatgcattcccatagcagctgcagctcagcagcttcacggacattctaaggcacacgtttttcacggtcagggtaatttgtgatggtacagccaggcaccagggccaaagggaatggttgtgtggggacagtcactcgtaatttcctgaccttttcttctgactgcattttaaatctctgccttaagaaagctctgcattgatattttgttttcttaataagctagcaaggtcatttttgctcttctgcttttattttttgagaaatttgaaaactgcagagcagt

SEQ ID NO: 82816 - DNA, 2085 bp, Homo sapiens
taggcttatttcaaatgcatatttcactgcacagaaggcttcagtgatctgttttgcaaaaagcaaaaaaactttggtaatgtaaacagcccccctgaactgatctgttttgcaaatttggattattttcttcaagtgtttaccagtcatcctgtgtttattaaattgtgctgagaagagaaagggagagaagtagaagttaactcagcagtctgtcggaaaatgatcacagttggaaacaactcacagaaattgtgctccctggggctaatgactgaggtggtcaactggctaggtttttcaggttgtcacaagttcagcattgaaagggctgtggggtgaagtagctgtgaatgagatcgactctcctcagagctgttgcccctgtgactctaaaaaaaaaagttcagtaagatttcaggacagaagatcggtatacagaagtccattgtgtttctgtagacccaccgtgcacaatctgaaaatgaaattaagaaaacaattttgttcacaataacttagaaatatatttaacaaaagaagtacaaaacatatacgctgtgaaaactacaaaatgttgctgaaagttaagatttatgtaaatggaaaacatcccaggttcctggatccaaagacttcacagtattaagaaggtgatactccccagacgaatctactgattccacacagtccgtgtgagaatcctgactgactcctccacagaaattaacaggctgatgctaaaattcacagggaatgcaaagggacccagagagctaaaacaatcccgaaaaagaagaacaaagtaggagaactcacacttcctgctttttaaacttactgcaaagcagtagtaatggagacagtgtgatactggcacaagggtagacagataaccgaatagaactgagagtccagaaataaatcacacatctatggtcaaatgattctcggcaaaggtgccaagaccatttgatggggaaggcgtggtcagtcatgaaaggccatgactgtatggttccatttataggaaagtccataatgggggaatctggaagtagattagtgagtgcttaggggaggggtgcagggagacaggagtgagaaagggtttgaggtgatgagaatgttctagaattgattggtgatggatgcagaggcctgtgaatgtagtaagaaaccattgacttgtacagataaattgatgaatcatgtgatatgcaaattatatctcaataaagctattaaaattttaaaaagtaaataatatccaagaaacctagcaaggtatagcaaattaaattatgatagttaaaatggccaacaggaacagttgaaaagttaaagtaggattgatgtatacaagctaagagaaaagaaatgaaccatatgaagaatgattaaaatgcaacaaataaatacaaaggtttaaaggagctttgaaaccaaaaaactggaattaaaaagaatcaagattagaaaaacaaaaaggataaaaggtgaacatgaacagaaaaaaagcagaaaaagattttcagaaattttaaaagcctagaaaattgattatgctggagggaaaatggttaaaatagttaaaaagtgattaaagaatactagcttaaaaaatgaataagagaaataaaagaaagacatgttaatatggcagaagctctgttgaaagccagaacttaaaacaggggtaagagccccaaaggtgtgaatttgtgggctgagtaacttctgctgagtcctaggcagctctctcgaggggacccagacacctggggagcgccctttgccaggaactggcctcttccccgctgatctcccccaggaaggaccagccactcagtcctgcagacagcaggagcctttggcctccctcagcggggaaatgtgttgtgtttctcagaagagcacactggggacaggtaggaggagcgtgaggactggggaagagaagcaggctggaacagggtgggtgactggccacacgctgagggagaggccctaagattttctcgcaagacctctctaaggtgtagctagctgatgcctttacaggctgagaagggaatgctccct

SEQ ID NO: 82817 - DNA, 1050 bp, Homo sapiens
ttgacacagagtttctctctattgcccaggctggagtgcagttgcatgatcttggctcactgcagcctctgcctcccgggttcaagtgattctcctgcctcagcctcccaagtagagattacaggcgtgcgccaccacacccagctaatttttgtatttttagtagagatggggttttaccatgttggccaggctggtcttgaacccctgacctcaggtgatctgcccgcctcagcctcccaaagtgctgggattacaggcgtgagccactgcactcagccctcagtatttgattttgaagtctaatggcctgaatacctaaatactcatggcctgtggagctgttaatcatttttattttctgtcctgttggaagaaaggtgttaaggaaaagacagaagtaatttatatttaaagtaaagagaaactaaggaggaaccttagttccttaaagaaccttttttgctagacaggcaactgtagagaaaggcttctccctagcctaaggtccctggaaatttaaactaaccaaactaacttgaaactaacacctcacacctgaatggacttgggagtaagacagccctgggttagaattcttgttccatcactgtctggtaaggtgaccttcagcaagtgatttgacctctgtatacctcagtttcctcatctgaattatctagggggtaatagtacccactttccagggtattgtgagacttacaggtgacagtagacatagagcagggccacaggctgataacacacaggcccaatctagccgtgtgttttatttggctcacagtgtttgtttgtattgaatttgttgccggcatttaaaaatcagaaagtttcacctaaaaagtcttgactgtcaccttccctataaaaatacaattaggaaacattgaactttattcctttattagcagttggctaggcagagggagctgccccatttcggaggggctcaccttcccctttcaccacagacacccgcttcccactgtatagcctgcggcctgcttcatgctggtatgtcatttgcct

SEQ ID NO: 82818 - DNA, 1064 bp, Homo sapiens
gtttgagaaacattttggaggtgaaactaacaggacgtggtgagtgcctgcactgggatgtagaggtgactgaagaaggaggatctcgagatgaagccagtgagtttcgctggagtggctgctgctcactgaggcagcgcaaaggcaggcttctgacgcagggatcatgtctgcttgctcactgcgggcccccacgatgaagacagtgcctggccccctgtagaggctcagtaaatatttgctgaatgggagttgaataaataggtcagaaagaggagcagatttgggtgaggaggaggcacaggacaaatctcagtttcagacatattgggtatgaagatcttccatgactatcccctggtgatgtctagtcaacagctggaaattggggtcacagagagctgagcaggattcagtgaataaattagcctatagatgaagctgaggccatgaatatggatgctgccttttggggggatttggtacgaagactcactgcctctttctctttctgctggccagattgtgcacgtcgttgatggcagcccctcagaaggcaagactacatcatccttcccctcttaggatggtccagggcttagtgccatatgtcaagggctgggatctgatggatgagtttccatggggtctttttatgatgctgggggcacggctagattaacgataaatgccatgtacaagccagtggctttgaatgagccatatgtgagtcatctgtattgttttgatagccatatgttctgccacccaagggctggagtgctggttagcctgggaggtaaccacacatatgtggcggcggcagcccacagacatttgctccctgtctctccccccagaatgtaagaggaaagctgtaagattcagtgaacagctctcagtcacgagtgcctcctgccattcgctcccttgctgggagccatggtaacctgccaggggctgcaaaatcacatggcagcagtgcccaggagggtgatacccacaagcaaaatgggccatgtataaaataaatttttgatacaggataggtttaagaaattaac

SEQ ID NO: 82819 - DNA, 1053 bp, Homo sapiens
tccccattttcctgaagagaaaatcgaggccctgaggggtcaagtggcatgctaaaagtcaactagcaagggaagaacccagactttgaggaaggtctgagttcagattccagccaaattggactggaatcaagtcttttaacctacttaaagagtttatcagcctgtaatcccagcactttgagaggcagaggtgggcggataacttgaggtcaggagttcaagaccagtccagccaacatggtgaaaccccatgtctactaaaaatacaaaaattagctgggcgtggtggtagacgcctgaaatcccagctaggtggaggctgcagtgagccgagattgtgccactgcactccagcctgggtgacagagggagaatccatctcaaaaaaaaagcttatcctttatcaaaaggacagtgagaagtcactgaagagagggtcagactaggggcaaagagtgaagttgagagatttttagtaatctagtcatggtctggcttaccatggtgggcgtggggatgaagagcacaggcagtcaagacatagtaggctgctgtttgggcacctgagcgaaccctgattctcatctctgaggctgggaacacggaagaacagcgtgggggttgagtctgggggaggtggggactttgctgaagagacatgtgacacatttagcttcaggttcttttgagttgtccaagtgaagagtcttaattagtaaacatctggcttcgtgggagtgaaagcaggccagagggagggactgagctagacatctgtgagtcattcctagcagctggtaattaaagcagctggctaagatcagccctaagagagagtgtagtgtggttggaggtcttgagatatagctctgcagtgcacctacatttcaaggctggatggagggtgagggactttcaaaagaagactgaggcggtgtggctggagaggtagaggacagtcaggtcagagtggtgttctggaagtttgggaggagacaggatcatttaagaacggagggttgggctgggtgtggtgaatcatgcctgtaa

SEQ ID NO: 82820 - DNA, 1042 bp, Homo sapiens
cctagagcaaatattcaacatttcccttgtttatactgttcatttgcttagcaaactttctcaaataattaataatgccaagatgatatttagcctcacttgtccaaataatcccagactgcaaacaggtgatggttgaattaggaaggttttgctgagagtacaccatcggtttagctggtctctcctgtccttgtgtggtatttacctggcttcttggtgatttgtctgtttctcttactacttaaacccagcaaaaaaaataataaaataacaatcaaatgcaataaaacaaagcaagcattcagcaggtgaaataaacatacatcccatagactctttgtgtctgttctgttttcttcttgttccaatccttctatctgattagtttcttttctctcagattttttcagagttcgttcctcctgtcactttaacttataggaagtcggcccataatgttttgcttatttttccttatgagattcattccatgattcaacatttcagtgccttccgtgcattggaattcagagatgccaaaatgagtaagattgaatccaggtgaaggcgatatgggaattcattgtactattcttgacatttttctgtgaagttgatttttttttttttttttgaggtggagtctcactttgtagcccaggctggagtacagtggcgcgatcttggcttactgcatcctccgcctcccgagttccagtgattctgctgcctcagcctcctgggtagctgggattacaggcacatgccaccacgcccaactaatttttgcatttttagtacagacggggtttcaccatgttgcccaggctggtctcgaactcctgaccttaggtgatccaaccctaccccttggcctcctaaagtgctacggttacaggtgtggatttttttttttttttttttgagacagagtcttgctctgttgcccaggctggagtgcaatggtgagataactcactggtgcgtccatctcctggctcaagcgatcgtcccatgtcagctgtccaagtagctggga

SEQ ID NO: 82821 - DNA, 1359 bp, Homo sapiens
ttgtcacataagccgctgattagattacagaagtgtagcatttacttatctttactatttcaaatggaaaaaaaatcaatattttccaattatcttcaatggggtattaaactgactttgtcatatttcgtttcaccatcccagaaagagcagggggaagggatcaggaaagcacattgcaagagcagatgacatctctactgcagaacacggtcatgccttctgtccctttcagcattgtctattcagaaattcggtcatttactcgttcatccatttcagaaatttctactgatgcacactccattctaggcactattccaggtgtggagaattcactgataagccagatagcagcctctggtttcatggggcttatttttagttggggagacagactacaaacatattaataagaaaatgtcagtaagtgccatgcagaaggttaagacggaggactgagggctgggtccctctggagaggtgggtggttttaagctgaaatctcattgctaagaaggatccctcataagaccaagggcatgagtgctcttggcccagaggagagagctaaggccctgaggcaggaaggagtcttgggtctacggagcagaagagggatgtgggactaggtgcagtggtgcacgcctgtggtcccatctgtgcaggagtccacttgggtgtatcgcttgagcctgggaggtcgaggctgcagtgagctgtgatcacaccactgcagtccagcctgggcaatagagcaaggttccttctctaaatacaaagaagaaagactgcagggaagagggctgcagggaagagggaggagaggtccaaaatatcccgtgggccaggccatgcagagcctggtcagaatgaggcttggattcttttctgcatgcacagggaaacattagaagttcaggcaggcaagtggtagggtctggtttttatatggctgccataggaaaatccaggcaagagtggaggcagggatacctactaggtggctgttgaaaaagttggtcacatgcagtggctcatgcctctaatcccagcacgttgggaagctgagatgggtagaattgcttgaacccaggagttcgagaccagctaggcaacatagtgagacctcatctctagtaaattaaaaaaaaaaaaaaaaaaaaaaaaaagctggccatgatggcacatacctgtgtcctagctacttaggaggctgaggcaggaggatcacttgagcccagtaggtcgagactgcagtgagccatgatcatgcccactgcactccagcctgggcaacagagcaagaccctgtctggaaaaaagaaaaaagaaaaagcccagggggagttgacgggg

SEQ ID NO: 82822 - DNA, 1038 bp, Homo sapiens
ctcgatgggagtgagggtctaatgtcagtgctgggctcttacctccacccccaccactcccctcccacctgaagaggataaatagagggagtgattacaatatgaatagtttaattaggaatatcatgaaattatattctgcatatatatttttatcatgtactatatacatttccatatgcatcaaatatgcatgcatattagtctacagcagtggatttaaaaagctatgtcctgtagactgtactttacgggttgtttaagactctttatcaagggtaattttggcactgattttccctttgcctgatgacttcagaaactaacatccaagaagatgcgactcccctctaaatggtagcgatgaagattatcttcatctagagcaaagtgtcagaatgtgctaaccattgaaaacgaatcctatgtgcagataaaaccttgctgaaatcataagtgggagaatagtattgtagttacaaaattcaatgcagtcacttctttttttttcttttccccagacagacatctgttctataaagtgaagtatattggccttatttattgcttcatagctgaagcaggcaggtcaccctgcaaaattcagaggaacacccccttaattttgcaagtggcatatattgatattaatgtcacctttttccacttccttctttgagttgttgtgagaataaatgagatataggtaggaaaatgctcagagaagctaagtgcggtagacaggcacagtgtaatctggttacagcacttccatccttgacaggcaggagctgtcttcgcatcgagctaatctggaggagagagaaaggctcagtggtgtgaggactgggccaaccagtcttctagggagtttagataataaatgctcttaattgagtgaattatcttcgttggaaaataagcaaattattttccgatttaatgaattaaaaagcttctaattaactccagtagaaagatttgcttttatgttttattttattttattctttttgttttgtttgtttttatagagac

SEQ ID NO: 82823 - DNA, 1042 bp, Homo sapiens
aaaagggggaaaggcaaaaaacagcagctgtccccttcatggccactgtgtggtgggaatagtaactgacagcacaattgttaaaaattatattcaaagccgtgcatgggggctcacgcctgtaatcccagcactttggaggctgaggtaggtggatcacctaaggtcaggaatttgaccagcctggctaacatggcaaaaccctgtctctactaaaaatacaaaaactagctgtgtgtgttggtgggtgcctgtaatcccagctactcaggaggctgaggcaggagaatcgcatgaacccatgaggcggaggttgcagtgagccaagattgtgccaccacactccagcttgggcgacaagagcgaaattccatctcaaaaaaaaaaaaatcatgttgacatctgttgtcttgttgactcttcacaatgccctataaggcaaggaatattatccttatcttacatgagaggaagtctaggctcagagcggtgagacagcctgccctgggtaacacagcaagtacagggctcagctgatagcctgtgttatgtgcaccctggcaaagtggcaagaacatgccactccccctcctccctgtaggcccttgctactggtttacagccagacaggaggaccccaaactcctgtgaccacagggctgggcagaggcaatgactgccaggtaaatgtgagactcagtttcctcatctggcaaggggagctggtctgatacttacctccccaaactcaatgcaattaactacagccagattccagttagaagccactagacacaaatcaaaactacaatgagatatcatctcatcccagttaaaatggcttttattcaaaagacaggcaaaaacaaatactggcgaggatacagagaaaagggaatccttgtacatgtttgttgggaatgtaaattagtatgatcactatggagaacagtttggagattcctcaaaaaatagctaccatacgatccagcaattccgctcctaaatgtatacacagaagaaaggaagtgggtatatcgaa

SEQ ID NO: 82824 - DNA, 1024 bp, Homo sapiens
cagatgtccactccaagtgggcctccagtctgggtcatagatttctgtaatgactgcattgtttataattaacatacatttctcttgaaatggcagggggaaaataagattcccctcccctttttgttctttgagacactctgttgcccaggctggagtgcagtggcgcagtcatggctcactgcagcttcaacttccaagactcaggcagtcctcccccttcagcccccgccaagtagctgggaccacaggcatgcaccacccaggcctggctaatttttaaattatttgtagagataaggtctccctaggttacccaggttagtctgaaactcctgggctcaagcaatcctctcgcctcagcctcccaaagtgctagttttacaggcatgagccactgtgcccgaccaagatccccttttaaacaactgatttgggttgcctctggttatgacaattgagataactaaatagtgagtgttgagaaaacagtagagcccaaatcatgtcagaacccttgatcttagagggcatgggaggaacgaacagtagcgagaggcgggaattgaccttctccttttcatagatgattaaaggtgtgtatgcctaagacccatggggccatcagacagtctctggggctccaggtcgctggagcaatgcgcctggggtgttgggccttcgtcaaggtcagcctccgcctctcagcctgctgcgccggtgtgtgctgcacctgcactctcagtcagtgcttccctgcattccgatatcacactgctctgtttcttcatttcagggttacgctaaggacatggtgacagactttgatgagaaacatgatgagtatttaatattgcttcagcagaggaaccggtaagagaagccactcgacggcagcccttgatattagcgaagtaaaaatctatttagatttattaacagcaggcaggccctgcctcacataggaatgggatgcagagtccccctccactcagaggcttagaatattatctgcaaccccagc

SEQ ID NO: 82825 - DNA, 1035 bp, Homo sapiens
tggccacattatgatttaaaatggcctaaaattaaagatggtttaatttctgggttttgaaagttactgaggttttttgtttgtggcctaccagatgatttttatgaatgttctatgatatttcaaaagaataatcattctctttttggtacaaagttctcaatatatctgttaaatcacacacgattagttgtaatacttaactgggtgattcttaaagtgtggtctcagactacctatattagcatcacctgggctgcttattaaagctgtgaattctcacaccacacccataggtatagaactggatttggaggaggcatggagtgctcagagcctgcatttttaataagcttccctggaaactctcatactcattagcaaaccaccgctgtagggcttgacttactttttgtctctttgatctggttgatatctgtgaacttgtcagttttcccctgcatttgtttttgccttatatatttcaaatatctgtcattctttgcatatagagtcaaaatgttttttgagagagtgtacctttcatccatatgaatatatctgtctcaaaatctttgtcccattgaaaacactaagtgggccttttcagcaaaaatttcagggccgtaaaaacttccatagaaggagcagtgtgtgcatgtgcatgtgtaggtgagttcagcatcaagatgtgtgacagggagccctgaggctagagtggggggccgcttttagggctgcagcctgtccccggctatattaagtaaggggcagcagagaggctcacccgtaggctgaagccaggggcatctgcacgcttgtgtctttctttagcactggaaatttttcatttattattactactgttattatcattctctttcattgtttctgctctgttctccggaggttgtttttttttttttttcttgagacagggtctcactctgtcacccaggttggtatgcagcagcgcacctcctgggttcaagcaattctcctgcctcagcctcctgagtagctgggattataggc

SEQ ID NO: 82826 - DNA, 1031 bp, Homo sapiens
ctttataaaatcatcagatcttgtgagactattcactaccacaagaacagtatggggaaactgcccctatgattcagttatctccacctggccctgcccttgacacatggggattattacagttcaagctgagatttgggtggggacacagtcaaatcatatcaaaattcccatttaaaagaagggtaaataaaagggaaaaaagaggaatcaccaaacccaagcaattttaaagcccagctgggcaaactgttagttttcaaggcctgggaataattatctgtggttcggggctctgttctcttggcccacagctccatccttggagtcattcttcctttttcaggaagagcagcctgtgtttgtagatgagccatttcatcagccaatttcctgcctgtagaattttggggagtctgacaacctttcgttttgttctttctttctcccattcagtccaagctggcagtatttctcctggtatgacattctcaaaagtcatgtgggactcccatgtatgtctctaggatttgctccattagacaagggactcctctgcaaatctttcctggaaaatcccctctctgtcctggcttctgctgaaatgtctaaggggatccatgagccacatgtctaatctcctgaaagagccctccatacaaatgaatactttgcattttgcatctttctgaggtacaagaaaaaaggttgtccagccacacctttagttttctctccatagcatacttttctgacagtgaatctcctaattttagaatcttctgcaatctggataggctgaaaatcatccaaattgccaagtcctggttcccttttccttaacaattcttccctcagtctgtctctttcctctcacattttactttaagcagcaggagaaaaacagaccaaatcttcagcactttgcttggaaatctcctgagttaaatatccaagttcatgtcttacatattctgctttccacagcactgtaggacacaattcagctaagattctactgctacataaca

SEQ ID NO: 82827 - DNA, 1029 bp, Homo sapiens
ccatgtcctcagaaacaagaggagcagagcagatctccagcccaggagtcagcaaattgttgctataaagggccagatagtaaatatgctttgcggttggttttgttgttgttattgttgttgttatagtttgtttctttgtacaaccttttaaaaacataaaccattcttagctcacaggctatacaaaaacaggtcacgggctggatttgacccgtaggccttagttcagctgacctctgctcttgactctcaagttctaagcttagggaggtcagctggccaccttgccccaagcagtgtttccccagctgggctctgattccatcactaattgtgtagccatttataaagggagaaaaacagcaagcctgcccttgcctttgaactggatacagagtgcatacttccccttcaaatcatttcctatccccgagtgcagcacttttgattggaatgttctcttttgtgtatcatttactacttcctgtttgctaaaaccaaatcccatttcagacaacagcagaagcttctgaaagtcctccaggccgtcgaaagtgactctgcccatctcggcagggtggtttcaccaaccaaggagcaagtatcagacacagaggtgagagccttgacttgattttcagttgtacattcaggaagttccctcagaacaggcatttcgcatcagtgaggattgctctgacagtggttaaatgagcatctctctgcctgtgtttccaccgccccccccctccctggcacacagaggtatatatgatgaagagcaggggtagagaaaggaagatgtaggccagaagtttcagcagagagaagcctgtctgcacaagaggaaatataaatagcgtggaagcccataggaaaatgtccaacatcgctggcaatcaagaaatgcaaattacagcaacctaaatgtcccatttgagctctgaattgacaaattatttctgatgataacctctagtgctagcaaggttacaataaagctgcggcagtcccacatacgtggca

SEQ ID NO: 82828 - DNA, 1038 bp, Homo sapiens
tagatagaagtctgatggggaatgcgttgttggccagaaagcatgggaagccaccaaggatgttcagtgtcgggtgggacagcacaatctggtaggcggaggaaggactcagggctatgtgcaggtttaaccctcgcccatgcagcttaccgttgtttcctgagcactgacagtggcctgggcccaaggccacctagaggaaagccacagagcccacctgcaaggcactttgggtctgggttgaagttgctagaatatagaggccgaatagcattcctcttcctgtcttcattttagatgcctcctctggagcctctggtgctaatgggccacttctcttcctgttgcaggccttcagctgaatttcactgcctcctggggagacttgcactacctggggctcactggcctggaagtggtgggcaaggagggccaggcgctgcccatccacctgcaccagatctctgcttcccccagagacttaaatgagctccccgagtactctgacgactcccgggccctggacaagtaagtgtctatcagaagctttactttcatgcccactgggttttggggacattgttctgcctctgagacttcagattcagacatcaaatagaatcgcatatgtccctcccctggccaccctgtgaggtaatgtggtcaagggaaaccgaggctcaggaaaccaaggctcaggaaagagaggtgggaggtgattctccagggccacacagctggaagtgtcaggcgggatttgaaggcgggttcccatgcttccagacacagccatggtctgcattttcttctctgtgcttagcagagcgtctcgcacacagtagctgtctgtaaacctttgcagtggatggttcagagtttacacatgaatgacccaggcctcccgggggctgaaagctccctctcccctccttgaggttagaggtgatggctcaggaagcctccacaggcggtggtggctgcactttcccctgcacttgtcagatttcataagccaaggttgcgtcaagtcagtaggtg

SEQ ID NO: 82829 - DNA, 1038 bp, Homo sapiens
ctggggccagcttcttcatggtgcagcgctttggtctttctgtccttagactagtggttctggtagggcttggtggcagccttgtggtgaggactcagtgagttgatgtctgtatgttgattgcagcagtgtctggcacccgagaggccctagggacgtattcctcttgttctttttctcccacagcgcctggcacagagtctctgtgacacgcagtgcaacagtgaatagaagttttgagttttagaaagtgctcccctatcttcagtgcacactctgggatggaagtagctgttggggtctggtgggtgggtgacctggtgtgttgttggctgcagctatgcccctgccttccaggacctgccctcattcacccagaatgtgcacaggctggtcaacgacctgcgctactacagactctgcaacgacagcctgccccctggcactgtgaagctctaggcctgctactgcctggggacacggacttctgctgctgccacctgcgccagccctaccttccaccacagatgtctcccagatgggccttggtcacactccttggcttctcccaccgcaagcaacgctgcctgcctctgccgctcctccacatcttgccgctgcccagcagagctggcttctgggtccacctgagcactggacggtgctcccagggcgttggagcaggcggaggggtgtgtggccaggtactaggaggcaccaggaaatcccgcggggtggcccatgcagaccaggcgcacgtggctcatggggcagaattgccaaggacagctcacgacagtgccaccttctcaccattccagccaaggagagatgtgacgttggaactgctctggcacttctgtcaagcctcccccgccccaattgccttgagatctctgctctttgtcagagatttgcaaagactcacgtttttgttgttttctcatcattccattgtgatactaagaaactaagaagcttaatgaaaagaaataaaatgcctatgttgttgttctagaaaccctggctggggagctg

SEQ ID NO: 82830 - DNA, 2042 bp, Homo sapiens
tgcttgggagctgcacttctgggtccccagggttagaggtgggacccaggttccccggctgtcttgggctctttccagaccagccccagctcagcttgggctgagttgctgccaggtcctgggaggagccctcctagtactcaccctcttgtcccactgctgccacctgtgcagggactgtcaggtgggctgtccccacccgtgcagcacctcggtgggagctgggtgctgctggctcttggtgtccatgaggccatcttgttggagcctgacagtgcctgggacctccttccccatggggctcacctgttctcttcttcctgtgtcaggtgaccaggcctctctcttgcctgataggaacttctgggaacttttccttgtaccgttttatacttgatgaaattaggaaaagaaatcgctttctccctggtcctcttggggttcttgacctgagtcctctgtgaagcagcttgtccacggctccaccgtagtgctcagatgcacacactgctctcactggtgcaaacctggccgcctgctttcctcatttgccacgtgtggcagggaagcttttgcttagactcatcctgttctcctttgtcttggggtcttccttttcttgggacttgttctctcctaagcctcttccagttcacttcagcccctggatatgttttttcctttttctagaggccagatcctaatacttaatgatcagcttctaacgacatcaatatcagtcaactttttgatttaaagctgtggtttcaaaatctagttataggccaggcgcggtgtctcacacctgtaatctcagcactttgggaggccaaggcgggcggatcacttgaggttagggggtttgagaccagcctggccaacatggcgaaaccctgtctctactaaaaataaaaaaaattagtcaggtgtggtggcacacgcctgtaatcccagctgcttgggaggctgaggcacaagaatctcttgaacccgggaggcagaggttgcagtgagcggaggttgtgccactgcactccagcctgggcggcagagtgggactttgtctcaaaaaaaaaaatctagttatatcagaagcacctggggtacttattaaaaatggagaaacagacttctgtgttctacccaggaaattctggtttggcatttgggagccactgatttaaaagacatcccttagttggttttttgagggtaaaataaaagaatcaccaccttccattcagtcacgcactgtgtgtttgaagccagctgcttctcaagccccgggccaggaactggggcaccagtcccagccttcaccaagtctttcatggtagacaggccaatacagcaccctctgtggaccacatagtgccaagcatgtgacatgtcttggctcgagtaagccttctaacaagcctctgaagtgtgggtcctgttactcccccatttcacagatggtgggggctcagaaggtgagcagttcacagaacttggaagtggtagagctgcgaagcaggaggcagacctgggtgttctggccccagagcctgcacacactccccagaagcagattgctcaggacagaggcgctgagctggctgctggggccaggaaataggaggcatctgtgcagactttgggaagaggcaggctttgaatggagttctggaagaggaatagtggttgggcaggaaaatgaacttggtcctgctcatggctctgctggggcttgctgggcctgtttgagtcctcaccgggacctacactgaaaaaaaaagcagggtctcaccgtgtgcatgatggcggaggtcagggcctcacttctggcccagggccttccatggcccacgctgcgcccagtgggacaggccttgggactgtgtttgctgctgctcgggtggctctcgaggggcaggggcggcctggagccccgtgggtaaaggttctgcagacattgctcggtgtgcgcgtcacctcaaggggccatggtgaagaagagggctgtcaccacagccatgtctgcgtttgaggggccggac

SEQ ID NO: 82831 - DNA, 1048 bp, Homo sapiens
caccggcctccccgactgcccccatggtcactttctattctttctgttggagcagggcactttgtgttggtgtgcggggtgtttctttttgcccctgaactagtaatttttttcttttttctttttttgagataagtcttgctctgttgcctaggctggagtgcagtgagtggtaggatctcagcttactgcaatctctgcctcctggattgaagtgattctcctgcctcagcctcccgagtagctgtgattacaggcgtccgccaccacgcctggctaatttttgtatttttagtagagatggggttttaccgtgttggccaggctggtcttgaactcccacccttcagtgatccgcccacctcggcttcccaaagtgctgggattacaggactgagcttctgtgcctggactgaactagtaacttttacacccaggaattccaaagcagtttaaaaatactttgcttagcccccaggcagaggcttaacctccaggtggaggctccatgaaggagcctgtagggcttgtggcttttgagacgggggatgcaagaaggagggcaagggaggggattgcttggcttgagcaggagcaggcaggcaggctttggtgtctgtctgccaggattgctgagggatttgactagaggtgtgagcttcttgcttcaaagccaggtcctgtgatgggtttctagaggtttgttaaaaaaggtatatatgagaccataataagaagcaaggcccggtggggaaaacatgaactctgagacttaggaggagcgtcgtagaggtctgagctggtgggccagaagcatcaagacaatgggtaccctggccctggcacttgttcttctgacatggggtagatgctccagaagtgcttggtcttgcagtttataaaatggtggtctcatttcctaggctttcggacagtcctttctccagcccgacatccacctttttaaacaaaatctcttctacttggagactctcaacaccaagcagaagctgtaccacaaggtaagtgccccagctcttggaaatat

SEQ ID NO: 82832 - DNA, 1114 bp, Homo sapiens
tatagtagtcttgtcagttttacaagagaaatatcaggcacttctcagtcagcaaatattcattgcctcttgcaagcagattgcgtgcagttagggctgaaacacactacacaagatgattgttgagatctggaagtgaaactgccctatatgtaaccagtattttctgcaattaatccatttaatggaccagggccatgcaacctaaatacaccttcattatccactttcaaccacttaacccctgacccagctgcagggattattagtcatagggggaaatggcttaagcactcaggtgttgacccagttggcattcatcagtgtgggcacaaagtgatccctctccagtgaaactctgaccatcactggatgtcgggcaatgagggagggttcgagatgaccttcatttcctgtagtgagccaccaggtggaggttccctataccagaactattttctcagcatgtccctaatcgttttccactttccatcattggccctgatggtgttggggaaatgtttccagcaggaagctgtagagaaagctgatagtgcagatttcaggagtaggttgatgaagcccagggttctggttctcactgtgtgcaagcctctgacgatatctctgcccctttcctcagatgtgactgatgagatgctgagcttcttcctcactctgtttcgaggccttagagtacagatgggtgtgcctttcactgagcaaatcatacagactttcctcaacatgtttaccaggtaagcacagacccaccatctatagttttcagattcaagggagaagtggtgggtctggcgacaaagtgtggctttttgctcctgttctgcacttgccacagcatgggttttcatgctggcccccagagaaacatgtggttgctcactgtgtggctttctcctctgtagagagcagttagccgagagcatcctccacgagggcagcacaggctgccgggtggtggagaagtttctgaagatcctgcaggtggtggtccaggagccaggccaggtgttcaagcccttcctccccagcatcatcgccctgtgcatggagcaagtgtatcccatcattgccgaggtaggggctcagacgg

SEQ ID NO: 82833 - DNA, 1210 bp, Homo sapiens
tattttttttaaatacatcttttgtcctcgtttgaatttccttaaatgccagaggtcagattttggtctcttgactgttggttttttgctctaaactgcttcccctgttgcctgtgcgttcttgaggaagtggctgccctgagtgcagtttcctagctgagtagaagtccatgtgcttgtagttgtggacggctccctgctcagcagtgtgggtgagcctttcctttactctccagtgtcactgtgactgggggaccaggaccaggcctgtggcgagaagcgtcttccttcatcctcagccctgtgagtggggcgatgctctctatccacgtgttcagatgaggggcagcagggccaggcctgcctccatctgcctcctgagcatgtcttctttctgccgtaccccttcctcaaagctgcggcagtcccacagaggctgctgagcactggggttcgggggacccagagactgctgccaagtgggaggcagctctcagcccagctctggctcagcctctggtggtcgccagggttgagtctgctaggctcaggctgagccatgggcgtcactttggggaggctggtgggaaactctgcatcttaagagggtgactccactcgcgctgggaacaatggcagcatctccgtcctggaccttcttagatggctggcacactgctagcatcgttcgggaccttgtctctaatccccactgcagcactgccagagtggggttgtcggctctcccagatggatgagggtcctgcccatggcacatagccttcagatggtcacctgtggttcatagccagggctctctgacctctgcctgtttgcggcccactacatctgttttccctgtgtgccatatggagtcaaaagtcatctcagggttagcattatgtattgtcaataacataataacagtaattatatgccttatcaagctacggggctaataggccaaagatggatcaggcaggttgttcttgcagccagcaccattacatgtgcatggcaggtgtttgtgggattactgggctggagtagcatcccactgagtgacaaggtttgagctgcatgtgtccgtcctggcctgtgaccttatgacactcattttctcaccagtctattcaccatcttttagatttgattaaatccaaggcacccaacctgggggtacatttatttatcttttttcttctgtgga

SEQ ID NO: 82834 - DNA, 1053 bp, Homo sapiens
agccagcgggtgctgaaggctgtgttgggcatgccgcaccacggtctttggctctgacctctgatggatgcctttggggtctcttgtaggcccaggtgttggtgtgccgagccctctctaacatcttgctgcttccgtggccaaaccttccagagaatgagcagcagtggcccgtgcgctccatcaaccacgccagcctcatctctgcactctcccgggactatcgcaacctgaagcccagtgctgttgccccacagagaaagatgccactggatgacagtaagtgacccctaggctaggacagctggggaaggaggtaggcaggcattgttctttgtggcagatgagatttgccccggaggctcctgaggtaaattttttttgttcatagtcccacagaggctgagcaggaagtcatacttgggggtgggatcctgctacctttggaattcagttaagacagcagccagacctatttccagaatcaaactgtcccttctcttatttaaaatgtaaaaaatgctggagccctaagaaaaaatggaagacactggtgatggtgccttctgtctataaaatacatcttaaggtggttattgatctatttcagatgcttgtgtaggcaaacaaagcagttcacctctacacgctgggaaaatgcgctcaagaactatttttccagattggtttcaacctttttccaaatacagatcttccagaggttttgaaagagcttagtttcttaaaaaatggcacttgaagtttgcttgtttatattaaagaaagagggaaaaaaatgaataaggaaatatctctttgaaataacaaatagtaccgaaatattttaaaaatacgagctcctttcacaaaaagaaaataatagaacattattagatggtgccatttatggaatgtcagcaaaaatgctttgtgaaatgtcagaaatagtaataaatactatactctttaaaaaacactacttttataactaggaagattaacatatgtgcattgtacaaatacattaaaatagaataatacaaagaaggaaaa

SEQ ID NO: 82835 - DNA, 1438 bp, Homo sapiens
agtgcctcacacctgcaatcccagccctttgggaggccaaggcagaaggatcgcttgaagtcaggagtttgagaccagcctggccaacatagaccccatttctacaaaaaatacgacaattagcctggcatggtggcatggacctgtaatcccagctacttgggaggctgaagcaggagaatcacttgagcccagaaggttgaggctgcagtgagccatgatcgtgcccctgcatgccagcctgagcaacagaatatgaccctgtctcaagtaaacaaacagataaacaaaaacccaaagtgattaacaaaataaggatgagaggagggaaagcctctttttagagaagactgccaactaatgaggagaaaaggaaagatagaaaaattaccaattcacaaccaccaatgtaatactgatttaggcaggagtcgttaataaatgcccaaaccatgaggaacactgtctttgtgtcacctcatagtagtaccaccttacaacttactaattattaccgaaaggtaattacatttaggtatgttggaaggcttggtgttttgaagctccgagacaactgtctctccttgtttaagattgattgtttattatatttgatgaattgcatacttttttgatgtatattttgttgcatgtacgatgcagtcagtacagcctttgctgaaaccaaacatagtctttgccgcctcagttattccctagccaggtggaatgtgtggtgcagtggaagcttaaactccaaaatctgacatcaaagctctgtttataaagctgtcacacctggtagttgtctacgctttagtctgcagctaggaatgttaaatttgtactagttctgaagtcaacacatgatcacttaagttctttgattttgcttttataatttacctttctcttaggtgagcatgtgtcacagaaagattgaataagattcagtagacattgactaactgccttctgtgctctagtcagcggtggcaatgtttagatgatgaatatcttagtttttaggttctacgtgaaccggtaaatgatttctatgctgttgcccatgtcttagaacagcaaatgcagtggatgcaattcttacctcctatgaaaatgagttgaacgctaatatattttcaccttaacctttaaaatcacatcttcttttctttctgcaggcatgctcagtccctggctgcgctgcaggcttactctcactggttagcacagtattgcagtgaagttcaccggcagaacacgcagcagttcgtgacactcatctctactaccatggatgcaatcacacctctaatcagcaccaaggtctcgaaacagcaaagcctacaccttttatctaactctctgtctctccttctgttcctatacccatttactagaaaatctaaatatgacacagagttagacccataaa

SEQ ID NO: 82836 - DNA, 1476 bp, Homo sapiens
atcattatcaaattttatagaaaagcccacgtcatcctatttcgataaactgccaaaagagcagttttttttttaaaacaaaacaaaacaaaacaaacaaacaggattttggtcttgttctgttacccaggctggagtgcaatggcatgatcctggcttagtccatcctcaacctcctgggctcaagcagtcctccctacttagcctctcccaagtagctgagactacaggcatgtgccaccacatctggataaaattttaaaagacagggtcctactttgttgtccaggctggtcttgaactcctggactcaagtgatcctcccaccttggcctcccaaagtgctgggattacaggcatgagcaaccacattctgcctgctttttaagaactattttttattctcctcatttataaaacattatatattaattgtagataatttggaaatgcagaaaaatagagggaaaaaaatcatccataatctacccactctatcctccccctaaaacaagtggtaccaataagcatattttggtgacacttcttcccgcctgtcttctgttaatagatgaacattcacgatgtattctgtatgtatatttagtacaaccatgtcatgtttaaaacatcctgaatatttatcattaaatatgcctctaagcatggtttttattgtatatattgcattgtattacctcctctgggttggatatttatattgttttcaaagtttttgacaccttcaataaggctttagttaatatgcttgtatataaatctttatgcatatctcagattatttccttggcataaaattgaaagtctggtcttgattcttttttgtatatgaaaaagtctgcccttacgctctttgctggtaccagccttgtctgttttgtctgtcttagttcataagctgaatgttcttgtttacctgcctctttgccaacaggttggtcaaagtcactctgtacggatctcagataaaattgtacaacattgaaactgctgtgccatcagtattgaaacctgacctcattgatgtgtaagtctagagtttgatgtttgtgcatttttaggaaagaccttgcccccaatctccaaataatttgattgagaaaaaggaacagtagtggctgccatgaatcagggaaaaactcttaaactgcaaacctagaaagagagagagatttttttgactatatgtctggggcagaggcggttggagaaagtggaattaggtaagtgagagctgggatggagattctatggagtaggcatttcaggaggaaagaacagtacaggctgagacagtcacacaggcaggaggtggctactccatgtagtgcaagaagagactggataggtgtgttgggactaatgggaaacacctcagatgccatcagtctttcctgtagatcattgactaaaactgtaggatactgtaggatgcagaagaatgcttggggaaca

SEQ ID NO: 82837 - DNA, 1456 bp, Homo sapiens
catggaaatttcattctgagatagggccctatcctaaaggaaccagatttggagtcacatagactcagcgtagaacaccagccttgccccggaaatgtgacacgtgcttggcaagtgcctgggcctccctgggtgtgcctccttgtatgtaacagtgatggtgtcaggaccttacagggtcaaaaggaatcagatcaggggctccctccacgttagcacactccaggctgtctgccccttcccacaactctgtctctgtccctggactctggagcacaaacgtgtagtgttaggtggataccgggcccagtttccctgctcagtactgggaagcagcccgtgggttgctttgtttcgcgaattggttttgctgctggttttgctgtgtgtggcttgctggaccagctgttatctgtagtatctaaagcgtggtcttcctgtgaaaaactgtctggcgtgttgtgttccaggacacaggttgaacatcacggcggagaacgactgccggcggctgcactgctccctgagagacttgagctccctgctgcaggccgtgggccgcctggccgagtactttatcggggatgtgtttgctgcacggttcaatgatgccctcacagtcgtggaaaggtaggctggcagttaccttatggagctgttccttcttcagagttcagctttaccttcttgtgtgaggggcagcatattgccaaatagcttctgctctggccccgggtaaatctaggctctgccacatacaagctgatagggaacaaattacttaacctctctgaacttcaggtccctcatttacaatatgaagtagatgttgtttcctgtaggtttagtgtgagaattaaatgagataaagcacttagcactgtgcctagcacataacaaaacgcctgataagttatttaaggtattgtttctttgaagatcttgtgtataaatgtaaacacagttgtagacccaggagaaaccaggagaggtcagtcttcatgtctttcctcataggataaagagatattaagaaagccctactgataaggagtcaactccattgtccaagtaggcagctagatgcacagggtgctttttgtgttttttccagtcccattagggcctcgggagtgaaagctgggtagcctccacgcctggcccgaaaggtggttcccagcctttcaccactgggctccttttcttctccttcctcttgggtctcacaccaggtttacagatgcacttgttgaggaacacttgattctactcagtcagcagtccctcctccctttctcccctcgaaaaacccaagatgtaagtgacaggacatttagatcatttcaaggcagctgttgaattggttagatcaaaactgagtagatgtggatccagcccaaagccaagacacctgatgcttcgactggcccagcagccgcatcactggtgacgtgca

SEQ ID NO: 82838 - DNA, 1054 bp, Homo sapiens
cctcccagagtgctgggatttacaggcgtgagccaccgcccctggccatagggtcatcttttgcattgaatgacccagctatacttgtgttctctcctggaaagcttcgtactttgccatctgcctttcttaggggccagtcacgttttaatcttactggtgagtgtagcagcttgagaaagaaagatgcagctccggttatgacgttctgaccgctacttgagccagggaactgacttccaaataatttggccaatcttatcactttaccatgtgcttaataaggcatagctgacatttctctcaaggtagaggttcccttggatttgaagggagatatggtcccttctcagagttctagaaggtgtaggtcatttcagggtttgatctcctctattaggaacgtaagagtcataccacagtgtcctttgctttttttttttttttaaaaaaagggttgaactaatacgttttctttcttattctgtgtattaattggcggtttcaattatagaaactagttggggggcactgaaggggggtcatagctttttagctgcatttaaaggttcccagagaaaaggttttgatcctgttcctcacaccatagttacgtgttaatgttgtaatgttaaaatgctattaaaacttgcatttatggcttaaaatttttgttgtttttgtttctttgttttcagttccctgttcttcaggacaatttagaagtttatttgggattacaacagtttatagtcacttcagggtcaggtaaactggtttttattttctaatttaaccaaacattcaaaaaaccatcggactgatatttcattactgctgccgttgctgtcggaacatgatttcttcactgcagcctccccactggcatctctccccacttcgaaacagggaacgtttttaaaggcttatgatgaaaagctgtgggggaggtaaaagatgaggtcatgacagtgtattccaaggaggtgtttggaaaagaaactgatttggagtaaagagacaggacttactaaaaagcctctaattagtttcc

SEQ ID NO: 82839 - DNA, 1460 bp, Homo sapiens
ttttttaaagccacgacccaatgacgtgttgtctacaagagactcactttggattcagatacaaatagattgcaagtaaaaagatggaaagagatattccgtgcaaaaagtagccaaaagaaagctcgggtcactatactaataggagacaaaatatattttaagacagaaattattgccagagacaaaaaaggctgttatataaacagtctgtcaggaagatacatggtgcctggtacgtcattaaataaatacctctgcttctcttccatgggcgcacacacgtaccaacccataaactcagcctcaggaatttcgatgctctttttccatggtgatcaacatagacaccatttcttttatagtgcaggaggcattttccaaattctaagctgaaagcctcctttcaatgttgaatttctccctgccacataggtacgaagatgccctggtgctcctgctcacagaggtgttgaatcgaatccagttcagatacaaccaagcccagctggaggagttggatgatgagactctggatgacgatgtaagcggcatgccctgattgattttttgtcgctgtcatgttgtgacatcaatcagaatggggacctggaacccagagccctctgctccgaagactgttctgaaaccagagtagtcttctggtttgagtcgtacatttgaaatttttaatctcctgctggtcccttttggcttattaaccataaaaaatgttttacaggcttttttatctatgtggactagagatgtaagtagagaaaccatatgcacaatgaaaaacggtttagtgagaactctgtatcctctctgtctcccctgccttgcaccctcacctctgctccccaacctgggcagcagtaacagctagctggatgcttgtggagaccgttagcaagatactgaaccgataaggctagaatgaaaggaagtctgtttggagtacattatgcaaacttctgcttcttaaaatcagccttgaatttattgatgctgatgtgcccaacattaataaggaaaatgtctttaaggaaacaattccagtgtttttttttaaaccattaggcactttaaaatttttcaaataactgctgctcttctcaaagtaagagtgactgcggcatggtcaagagcttatgggtggtcatatttgggttacagagagccctttgcttagagccagatggcctgggtttgaagctctgcaaccttgggcatggaggagattggagggctgggtgtggcatttctgtgagccttaatgtcctcatctcccaaaaggggagtgacgtgtcttgcttcttaaatgtcaccatggataagaatcactggaacagcttgttaaagcagattctgattctggaggcttggggtgaggaccatagaatttgcatctctgacagcccaccaggggatgcgtttgctggctggctgtggacccc

SEQ ID NO: 82840 - DNA, 1861 bp, Homo sapiens
tggatgctggatgatgctacagacatcatacccatgattcaggcagtaggaacgagaagtgggataggttgggcaaaagaagctttcttagaagtcccacccagtagctgcttttaggctctcgttgaccgcccccatcttcaggggagatgttgtccttgagttggcctcaatacccagtgctctcttgctgaggaaggagaatgggtattgggcaggcaaccagagtgtctgccacagccatatactttctccacctcccacatgacactttgggagatcagtgatctatgtgcatgtttgcctggttcctacttggacttaattttctaagcgatacgggttttttttgcagccagagttgccaattgccagttaagattttaggtctaatttagggttacatttgcatagaaagtctctaaatttccttttagcacagcaagacaatttatagatgacaaaattcatctgtcctctggtctgaagtagattttctttcctaggagaattgtggaaatattttgatctgtcacagcaatttatagtgtggaacttctgtaactttagaaatttatgtcttgaacaaaggcaaaaacataaactctaggcctaaatgtttgatcttacctttctatggagtttactaagtgggattttgactttattgggtgaattttcccacagacgttgcagattttattagtgcctttttccctgccggcattctttcctgggccctgttcagttgctagtctactttagggctggcgtgtgttaggttgttaagtcgtttgcatacagttggggagtcattgctggatatgggcaagtagggagtgtctctgtctctagttaagaaacgagctgtcgggagctaaatagtgggtgctcgtggacataggatggcaacaacagacactggagactgatagagagggagtggggaggagggcaggggctgaaaagctattgggtactatgctcagtgcctgggtgaggagatcagttatacctcaaacctcagcatcacgcagtatactccggtaaccagtctgtacatgtatcccctgaatctaacataaaagttgaaattatgttaaaaaataagtaaataaatacaaatgtcaattttggcataggttaaatttttaagttaaaaaaaaaaaagatactctggtcaccaaaatctgaaatgggacaatccaggaggatttgtaagtggtctgtagactgattctcatcacatgggctgtacctcctggactaaatggactgtatttggtcttggtattggatatcttttaactttggttatcatgttgtcccagtactcaactgtattagattgggtggtgtattagagtcctgtcaggaaatcagaaaccatacttaattatttgaacagaaaattcattttaggaaattgattaaataggtttcagaggaaacactgagataacacagttgataagtacaggaagtggcttcacccctaaggctagaagtacaaaggcaagaagctggggctgtcaaaatctggaagatcactgcttggtccctgagcaactagggttcagatctctgaagagagggccccatctagctgccacaggagttcagaggagggatcttttcgaactgggaccattcctttgaggagagggtgttgcctccacctctgagggtgcacgatactagttctgggaatgtggaatgaagctggaaaccggaaccagttgcttctgccaggtgtctgttgctggggcagcactgccaggacagcaagcccacaggaaggatgcagtccttttgtcccttctgccttccagtctccctccagtgtccctgctggcagaac

SEQ ID NO: 82841 - DNA, 1050 bp, Homo sapiens
taaatagtaaccaccgtctggggaactgcatgtcctgtcagataccccttagtggtctaagacagtagactacaaagaacatgtgttagtccagtgggctgcacaaagaaaatatttcaacttcagcttataattttttctgtaacccttaacattcaccactccagactatgagagactcttaatatatcagagatatgctgttttgcaggagcagctgctgaagaacactggcttctggtgatgaccacatttatgttaactaagagcatgcacatgtgatcaaatgtttgtcaactgataaaatataccagagagaagttgggatgttctggaatcatatttcagaagcaactaatcttgcaggaagtagtcaaaaatgttttcttgctgtcttaaatgggaaatgtaggtgtggttaagtcacaaaggcagcactcatttcctgtcccctgtggtttaaaggttttgcatcattcatcacaacaaagtggtaagcattgtaggctacaaatttagaagcacaaatatacatagatttatttttggtcctaggagcttggaaattggagctctgcatgctcacttgcctggtcaggagcgcagtggcgcgatcttggctcgctgcaagctccgcctcctgggtttacaccattctcctgcctcagccttccgagtagctgggactacaggtgcccgccaccacgcccggctaattttttgtatttttattagagacggggtttcaccgtgttagccagggtggtctcgatctcctgacctcatgatccacccgcctcggcctcccaaagtgctgggattacaggtgtgagaggaatttcttgatgagagactgtggggacttgagagagcctgagccccagtgttaatggggtaaatgttctgtagccattcctgcagagtggaatggccgatggggtagatcatcctgatctgtattttgaggtggtggcatggaaaggcccggattttcctttccctttccttgtttgtgcttttggatggttgtgccttcctcacagattgttg

SEQ ID NO: 82842 - DNA, 1058 bp, Homo sapiens
acctgtagtctcagccacatgggaggctgaggcagaagaatcgctggagctcaggagttcagaactgttgtgtgcagtgatcacgctgtggctggccactgctctccaggctgggaacatagtgagactccttgtgtctcttggtaccagtcactggtaccatttgctgaactctgtctctattgaaaattaaaataaataaatatgcaaatattctgttgagaattttattttccaagtttaaacatttgttcttttgttcccaaagatggtttttgtaattgtggaataagttccaggttgctatggtgtcaggtcacatgtgtgattataggtagtacgttcatatatcagaaatcgtattacacacaggagatcctgtttttggtgaagttgccaactttaagtaattatgtttttgaaatgagattcttgaaggaaaagttacttttgccaaaataatctttcttgcatgctaaataggcatatctttttggttctgggactatgcctcatttttctatatttagtggtagatattccttcatatctctcaagcttgttgtgagaataaactgaggaaatgattaatatgaaaatgctttttaaaaaacagtacaaggccgagtgcggtggctcctgcctgtaatcccagcgctttaggaggccaaggcagggggaccacgaggtcaggagttcaagaccagcctggctgagaaggtgaaaccctgtctctactaaaaacacaaaaattagctgggcgtggtggcaggcatctgtaatcccagctacttgggaggctgaggcaggagaatctcctgaacccgggtggcagaggttgcagtgagccaagatcataccactggactccagcctaggcgacagaatgagactgtttaaaaaaacaaaaacaaagtacaaatgagagatgtgaagaatatggtcctgttgagaaaatatatactagcagattattagtattaaacacacacttttgcagatcattatactaatagagcagtggtatagagaatttaaattctttttttgctttaggc

SEQ ID NO: 82843 - DNA, 1052 bp, Homo sapiens
cttacattcaaatgtgtgaacctgtcacctttggagccactgaaactgatttttgctttcgtaatggtttgtaatggaaagagcattggctgggggtaaagggacttgtttttacctctggccttgaacaacttatatctctgaatctcgatttctctctggaaaatagatttaaactagatgatctgtaagagccctctctaccagtctcagattttaagataggtttttgcttgacttattttataactcagtttatgctgcacagtatctccctcatgatgtgttccatggtacccttgtcttgtaaggttcaggagggcccaatggtatagaccgactaaaagccaccagttttggttaccaggaaactggggaatctaggcttatgatttcatcattctgctggaattaaacactggcatgtgtgtgtttctaaggaatagtagcattaaataatttcattgtctggattttttttgtaccatagcctactcatgaaggttacttctcttgtttggatatctggacgctgtttttggactatctgacaagtaaaattaaaagtcgtcttggagacaaggaagcagttctcaacaggtaaactcctcaaacactgaaaactagatatggtcattttgccagttattctagtggcctaagagacagccatgcatttggaccttttcagtgaagctgagtcatgtaagctgtttaggcaataatgccattgagcatttccttttttttctcctttaagtattttgttaagactttttaaaattttaaaagtaatatgtattactaattttttatattttagtgcatttgtgttaatgttcttaattttttaatagcccttattttagagatacaaactgaagtatttattggataaaatgatatgacatctgggatttgcttaaataacccagtgggggtagaagggaagtgggttcctgtagagaagaaacaggctgcccatgtgttggtgattgatgttggagttagttcctaggaacttggggttcattatgttcttaccccatttg

SEQ ID NO: 82844 - DNA, 1635 bp, Homo sapiens
agtgtgttactgtgtagagtactactctactattctactgtgtagaatactgtaggcagctgtaacacaagggtagggatttgtatctaaacatagaaaaggtagaataaaaatacaggggttatcttgaattgggccactgtcacacatgcagtctattgttgatggaaatgttgttatatggtacatgactgtactgatgaacataatttcgaagaacagtcataagacagaagatggtgctagtatcttctttaaccgtttctccttttctgtttcttttcctgcatttttctgtaaatgccctgccgccagcgcctccaggtagcagtgctcagcaggtgtctgctgcctcctgccttgctttgcttgctgagcctcctggctgtctataaacctatgtctctgtcttaatgctcctaagcttagtgcgtcctcaccacttccttcttgttcttgtgtttttcattttgccccttcttcctgaaactgtgcctgagatggtataccctgggggggagggctgtggaccacagagccttaagatccaccttccttttgtttttttttttttttattttctttttttttggagacagagtttcactcttgtcgcccacgctggagtgcgatggtgcgatcttgacttactgcaacctctgcctcctgggttcaagcagttctacctctcagcctcctgagtagctgggattacaggcaagcaccatcccacccggctaattttttgtatttttagtagagatagggtttcaccgtgttgaccaggctggtctcgaattcctgaccttaggtgatccacttgactcagcctcccaaagtgctgggattacaggtgtgaaccaccgtgcctggccaagatccactttctagttctgattttgttccttaattgtcttgttaccttgggcaagatacgactggacttgacttttgagccttggtttctttatctgtaaaaggggaagatgcaaaatatttgttcactttccaagacttatgaagatcacatagaccaatgcaaatgaaaactaaacactgtaaaccacttggaagatagaatggtatcattagtttcttaaagaaacctggatttgtagccctggaatctgaaaagtaaattggggtctaggtccattttaaaaatgggtctgtgaaggttttgaaaagttaggcgacttcaaaaatggagccagcccatcatcttgatgaccggaatgaaccatgtccacagcaactatcagaggccaggtcatgggcggcctgtgggcagtgcacaagccctcgcagtggggcctgcaggaatggatgtgaaaggtggtgcttcaggttatacagggtgtgtctgctcacctttcccccagccttgagcatatagcaagtcctcaattcacatgcatgaagtttatatgtataattataaagtactttgacggagccataatacttggatttatgtggtaacctttcccaaaggcacttccatatgcatctgatgagctgtgctcttttgagggggctagtggatagttttgaaccaaggagggataaccttggtgattgacttgagggaagctcagcaagttgaacctaggacaagagtgtgtctcttggatg

SEQ ID NO: 82845 - DNA, 1308 bp, Homo sapiens
aattgcttttagccattatttcattttcagctaaggcctagtatgtctttacctttttgtgttggtctctgaaatgtgatttatgaaggtatggccatctcattttctaatcaccttttggtatttaggggcttaaaatgacagtttctgaaatgtgagagtgatgatgtgctgtgtatttaataacagagatctcttatccttgcagctgtgacccatactcttctgtgaaatgattttgtgaatacaaatgagttggggattcactgtgaagtgaaaagaaagagcactggattgggagtggatgatagtcctgttctgccatgagttggctgagtgactttgggctggtcactttacctctctgggcttcatctgcaaaacggaagcatcagactaaagtccctgaggcttgcccagttctaatagccttcctcccttatatttgaaatcacttttagagtattgggttgtgctgtgtttaattagcaccaggaaccaaagggggaaaaatggccattaagttgcaagcctgagtacatcttacctggatgccatgcccttcgtagcctggttttgtttttgtgtctttagcaccattcactttagtattttggcctcccggaaagaaaaccagccttctagacttgccagattgaaatgacacagtgatctgcccatcaactttttatcatttcccttcactttaattgggtcacaacacaaatgacttagaaaatgtgagcgcactagattataagaagccttagcagacagtgtctgaggattaaagttgcttttctgctatgtttcaggtggttaatggaatgaagggttgcctgtcctgtaggtaattgttgcaggcctttatatttttaaaagaaaatatattacaaatttgtatagttctgtactgaaagaactttggattgaatttaagttctaaggaggtggctgggtttcttattgtcaccttttgtcttgtctcatttagctatatcgagaagtttactgactttcttcggctctttgtgagtgttcacctaagaagaatcgagtcttactcccagttccctgtggtggagtttttgacacttttgttcaagtacacatttcatcaggtaaagcaccaaagtcatccttcccttccagagaaaaggtttattaccttgttactttgagaagaaagaactttttctttcaactttattttccaaacattaatataatgcttattatgtgaagagtcacaggtttaatcttcctaacatccctgtgaagtaggttctattaccattgtcatctctg

SEQ ID NO: 82846 - DNA, 2913 bp, Homo sapiens
aaaatttcctaattagtgtttaactttgagcatatagattttatttttttatttcataggtaactaaactgatacatatatgtatacatatatatatatatttttttgaaggagaattacttaaagtcatttgtaagagatttgatgctggatagcttaaaagcctttcttattttcaggtgacttactgagtaacctgttgcagagtcccagttcagccaaactgttgaatcagccaattcccatccttgatgtggagagtgagtatatctgttccctggctttggagtgcctggcccatctcttcagttggattcctctgtctgccagcatcaccccatccctccttaccaccatcttccactttgcacgatttggctgtgacatccgggccagaaagatggcgtcagttaacggcagcagccagaactgtgtctcgggtcaggagcgcggccggctgggggtcctggccatgtcctgcatcaatgaactcatgtccaagaactgtgtgcctatggaatttgaggagtatttactgcgtatgttccagcagactttctacctcctgcagaaaatcaccaaggataacaatgcccacacagtgaagagcaggctagaagagctcgatgagaggtaatgaaaccaagtgtggagctggtgtgccccaagaaagggccctgactgtttaccatgctgtgctgcatggcatctgtaatcctctttgatttcagaatatggggctcctggtgaggaacagaaaggtaggtgtgtgccagtaagtctgagattagctggaagggcttgggtggttaagggaagtgactgagtttgaaaaatgcttgtgccttgtgtaggtttgttgtcttttctccccatccatctcctgtcctcccttctactcctcttgcccccttttccttactatttgcttgcaggtctgaggtggtgcagggactgagactgctgctcctgcgtagccaagaacaggagaagaggtccgtggaggtacaggagttataatcgccttttgtcacttggtgtcagtttttactatttgacttttcccaagtgaacatcctgcagtattcaggaatgttgttgttattgtgagttttacaccaatggcaagttttcatcaaactataggagggatgttaatgtgtgcacaggttaatgtagcacacagctgtgtttctttgttattgtcctctcaagtggagcctacaatgacctacttttttttttttttaaaagcactctaaaagacgactccatcacagtactctgaggcagggtttcatgatttatgtctcttgcagatgaggtcatttatgtatcttacaactgctgctgtatgaaaacaggagggaatttggaaacttatattatgaacaatcagattgacggtttagggactttcaagcaataaatcgtatcgaattagtaaatatttacagatgacatggcagcaaaagttgctaatattctcagttttccttagattgtcctttgttattaagctatatagaattaagctattttcttttccttagagtaaatagcagaatataaaatcaagtgcataaagttgaaagttgtagtgctttttaaattgggcagttttgtaaaatatttctaaaattaaaaaattggtacataagattattttggtttggtttattgtaaaaccgtgatgtttgctctgtataagaacacaatctgatatggtaatatgttcttaaaaattatttggtgatagctttccatatgaattcaaaggcatcattattcacactttcatattctttctgtctgtggttaagaaaggctgtattaccttttttttaatgatctgtgtgtctcatgtctatctcttcatatgttaatttaaaaatctagctgcttgtatcaactatcaaatatcagttgttttgactttaatcataatgtagtcacagacaactttgttgtggcttccatttggatggtatagaaatgtcattatggattgtctatgtactgatgttgttacgtgtaacttttgtgctcttggttttacattttaatcctgtgcttcctattgccctgtgaaagctgagaggtgcctgggagcagaaaggtgacataaataatgctgtgtgcttgcttcctggctctgggtcccctaccactaattctaaacagctcagtccattctcagttgtttaggagctgctaaccagatccttggcttctctttccctctactgccttttcccctaactttctactgttcattagcacctgtaccagaaggtgggcaagggaaagaaaatgaggtgaaataaaatctgtagttttagctactgaacagccttgtttgtatttttaaaaaattgggttagatactaaagtaaaattgagattgttctgtatttagcccatggcttttttttttttttttttttttttaaatgggtagtagggaattgagtgcaccttcctaaagaacagtcagctgggtggtgactttgaatatccatgtaaaactatcatgcggtacataagtgagtgaggaaggagttcctactcttgagtattagtgattgatgacaccagagagaagtgtctttgtatgttcctgtctctaaaaacagttgattttagtgccttactgtttttcgagtacttggccccatgatccacagagacagccattctctttatcaaaacaaattaatatgtattttttaaaaagctgcaaataagctcggccgcatagaggtcaggcaggcaggctggccaccctcagggagataggtcccaggagcaacatgggacattttatttccgggccagttttgcttttctgagtagtagttttctctgcttttattatttcacatatctctgttttgaaaaatagcttttgca

SEQ ID NO: 82847 - DNA, 1294 bp, Homo sapiens
gctttaataaaaaataactatatttttcaaagcaaacagaaaaattcactgagaagagtggtgttgttttacagttttgcaaatctctaacatgtggcttagtgaaaggcagcttctgcatttcatctgttgcaatatcccatgtgatgtagcctctggaaagctccattgtacacttggagataatgaaagtgaaaaaggaaaagaacatcttagtattcctttaaaaatagttttgaatttgtggactcccttccccgtaatcaacagccattttaatgtagataacctctgtcttctgtttggtaacatgttcttgtaagaacttactgttttgtgtccatgtattttaatatgtaagtggtatagtaaaactgtcattctgtttcttacttttaatttaactgtatctttttaaggtctctccaagctgttgcccgtctgtgccttagtcctctacttctgctcactgtgtgatatgatacctgactctgcattccctatcctctcccgccaaggaggaggccagactgcctccagctctccccctcacgcctgtcccttcatggacccgtgtgagggttgctttgggagcataccaggagaatggtcaggtgaaaggatatgtgaatgtttaataggactccagagtgccaggtcctcctcagaatggcccttcttcctgcaccgccttgtgaaggttcctgcatccattccttgtacttgacgtctggcatttgccaacattttttcagactccttttaatttgctttttctgattactaatgaatttgaaatctcttcatatgctttggagtttctttctctgaaaattgtctctccatatcaactgcctgtttttgtactggggttgttgtgtttactgatgtgtagcattttaaaaatagattttagtttttagtccttttcgatgttagaaattgtgaatatcttctcacagtctgttgtctgcctggtaactttcccttaatgtttttcattgattaggaactctttttttatttttattttttattttttgagatggagtttcgctcttgatgcccaggctggagtgcaatggcgtgatcttagctcactgcaacctccacctcctgggttcaagcgattctcctgcctcagcctcccaagtagctgggattacaggcatgcaccaccatgcctggctaactttgtattttactagagacagggtttcaccatgttggtcaggctggtcttgaactactgacctcaggtaatccacccgcctcggcctcccaaagtgctgtg

SEQ ID NO: 82848 - DNA, 1039 bp, Homo sapiens
cagttatgttaatatctgcttcaaaattcagagtgtagttcttctaaagatgactactttcaaggatggatggaaagaggaaattgcatctgaacaggaacttttagtttctaaatgctgctgtttacactaaatgatcacaaatgcttttccagcagagtacatcctgtgaattgacacatatagcttcctctactgtaaaggttgatgtggctaatgagaaatatttccacatcttctcctttatttcaaggagataggctgtggaagtcagacgtctctaagcccaagctgttttatgtagcctgttgttagtatgtggaagctgaaattcttacagagttactctagaattgaaaaatctatctggaagttttggggagtactcatagtgcactaattattacaaattttcattatcttacttggattaaaaattattagagagccatttgtcatactgcttagattacaaacaattatagagttctagagtgcattataagctcataggaaatggaactttgtatttggtggcaaacctttattctttaggtagatatttgaggtggctcagcagatttatatgttgcggtatctggagattaaagaaacatttggaaatgattcagagatttgattttatgagtgaacgaatgtcttggagtatccacagttaagtttgttttttcgtttaaattctgtttgcaaatattaattctttttttcgagacaaggtctccttctgtcacccagactggagtgcagtggtgtgatcacaattcactgcagcctcgacttcctgggctccagcaatcctcccatttcagcctcccaggtagctgggaccatagatgtgcaccaacatgcctggctaatttttgtattttttgtagagacggggtttcgccatgttgcccaggctgatcttgaactcctgagcttaagctatccacccgcctcagcctttcagatttctgggattacaggtgtgagccaccatacccagccaagattagttcttttgagttagatttat

SEQ ID NO: 82849 - DNA, 1092 bp, Homo sapiens
accctcaggtaatttacacttgagtggggagacacaagtaaacagttaaagatgttttaagagctaaatagaggtatgttttatgtgcaggaattcctgaaggaggtgacagctgaatggaattttgagcgacagacaggtggcatttagtctggtggaaaggtgatgttgaaattgggaggaggagagcaggtcagaggttgagagggacacatgtagaaggaacagcagacagttgagcatagcaaggccgcgtctgtcgggtgagctgaagcctgggtcaggtgaggctagatgaggtcagcagaagccaggatttccagcctgtttcctgcatgaggaacgaaaaaggattggtggcaggtttgtggggaacgaaaagttgagtttgggatatgcacgtagcattgtccaggaagcaggtggacatgcaggtctgttactgccttgccttgtttctgaagcccccatcgtgtgaggcagagcttggtgtatatagtcaaggtgagtttgggccaagaacaggagacttgagaggcttcagaatatattgaagccatagcagtggatgagtcactctagcagtgagagtgaaatgagaggagaagcaggtcagtcagggaacctggggaaacgtgtgtttaaatgactcatgggcagaggatggaagtaatagtgaaagggatagaattgagttcaaagaaaccagagaaaagccaggaaagagtggtgctaccagctcagagaagggtttaggcaatggcctgtaatgccacagtgtggtcaaggaggatggggattaagtgaccagtgagtgcatgcagcaaccaggtgactctggcaaagagcagtgctggaggcaacagtggggagaggccacaccacaaggccacagtgaagcagtggagagccagaagatagctgtgaagtcgagaggcacagccgctagctggaggaggacatggtcaagaaagggatgttcaagtactcatgtttgatcagaggtatcaagaaactttctctaaatatgatttttatatgctggacattatttctcttataactctgtttctcctttcttggtaggtatct

SEQ ID NO: 82850 - DNA, 1205 bp, Homo sapiens
cctgtgacaaccccccttgggctgatcatgttgaagacaacttcagaagagctggcttgtccccgtgaggacctcagtgtggctcggaaggaggagttgcggaagctgctactggaccaggtgcagacagtgcttgggctactgacaggtgagcagtatggtagtgcccagagatagaggcctgcccgcaggcacccagagttcaggccttggcactcagcagctttgagcagttgtttgcgctgtttctgagatagcatgaaaatgggaagctgcgttcccaacacctatagcccagggtctagcacacagtaggactacaaaatagatttgtaccttattttcctcgtagtctttcacgaagtggtcttcactgtaactgtgatcagtgaggtagagtccaggtcataggagtatacctacagtgccgatcactgcatggtaagttaggtgggtggcaagcactctatttaaaataatttgaattgaagatcaggagaagttggagtaggaggatatgaaaatttcccgttctgggtaaggaagtgagacatggtgtggagccagccccttgtgcactaggttgtagttgtatgtagcattttgtcttttctgtttgatgagagcctcatgacaaggtgtaaagggtaagaataaacagaaagcaaaccacaacatgagacaggaaggtaggaggagaggggagtgccctgggtgactggggtggctgctgtgtgctgctgtgatacctgtttgctagggagacatgtatgcaatgcctggccgtgaggccctgagggtgccgggagcctgggcttgctacttgagggaatcttgtagtgaaaagaagtttttatctctaactcctttatccaggcttcttcttggatgtctaggaactttctttatatctccagtttagtgcttggcatgtggtgggcacttaaagttggctgaaagaaccattgatttaaagtaaacttgggttagtgcaatggctcacacctgtaatcccagtgctttgggaggctgaggtgggaggatcacttgagcccaggagtttgagaccagactaggcaacatattgagacccccatttctggaaaaaaaaaaaaacaaaacaaaaaagttagctgggtgtgatgatgcatgcctgtagtcccagctactcaggaggctaaagaaggagaattgcttgagctcag

SEQ ID NO: 82851 - DNA, 1113 bp, Homo sapiens
aggagatggagaccatcctggctaataaggtgaaaccccgtctctactaaaaatgcaaaaaaaaaaaaaaaaattagccgggcgtggtggcgggtgcctgtagtcccagctactctggaggctgtggtaggagaatggcatgaacccgggaggcggagcttgcagtgagctgagattgcaccactgcactccagcctgggcgacagagcgagactccgtctcaaaaaaaaaaaaaaaatctaattgtaatcatattgcccatgctattttgtattctacttttccccactttattttatatccccacatgtggttatgacattattcaccaaggcatgctcctgtttttgaacattgaagttgcttctgtcattatattttggtggccattagagacagtggtgtaaaaaagtttttgcacatacagctttttgtttctgttatttggcagttcttcctaggaatgggactgttgtgtcctaagatttgaatacttttattattcttattgccatattgccccaaacctttatttaaagagggattcttgtttattgaagtgataatagctacctgtgggatgaaaagcagttatttttgtgtataggttgttaacttaaaagatgtatatttgtttttcagaatctgatcaataaaatgtggcttggggtcccatctcaggataagatggaaatccgtagctgtctgcccaaactccttttggctcaccataaaaccttaccttactttatccggaacaagctctgcaaagttattgttgatattggacgtcaggattggcccatgttctaccacgacttttttactaacattttacaggtaaggatatgcctaaggaaactttatcttgtgaatagtttgtttgttgaagtgattatttccttgtcctgaagaggacttttaagattagcagtttggaactgcagtagtgaggttattgtaggactgattatcgcattcactttatatttataagacatattgtatctttgtgaggtggagaaagtgggggagaaaaacttaatctctttttaacctcttgtgcagtttgttcagccagtatttgaaagcctgttaggtgctgtactaggt

SEQ ID NO: 82852 - DNA, 1037 bp, Homo sapiens
cagcaggtcaaggtgactaagggacagcatgtccagaaacatgatggtagccccgtaatgcttgctgccttgtgggttctggctgatgccatcagcagcctcaggaggaggaaaaccgtttctaaccaacgtgatgtgtggacagggctactcgccgcaacactcgtcatcgttgctcttgccaccggtcgattcacttttttggtggcagtgttttaaaataaaaccaacccaaatgaagagttagccgttttgaattctcttgcatttttttcctttcctatctttgtagaattagtcttaatcttttctttttctgcctttctagccgtcattttgtgtgtgtgaacaatgtaggctccactgaagatttgtagaggaatggcgaggccctagaatgtagctcatattcagacgaagtaagttagctagcagttttaagaagatggaagggtactcttagaacattccagccacacattagcttaaataagaactttagcagtgaaagtttctctgcctagagaaatatccatagcgaggttattggcttttaggtggctgaaaacattgtcagtgtccatggtcacctcagacgcagaaaaatattgtatgatttattctttctatcttaaagaatccgctggttttgacatcatttacattatatgcagagagacatgtttaaataataataagatagcccagtcttgtctaatttcatgtattttcatagctttcttttgttgccatttaacttttccagaggagcttcttaataactttgcccagcaaataggagcctggagattctgcctgtactttctctccagcactaggaatgactatgtaatgatgtacagtttaacagtttttgaggtaagttgtcagtaattttatactcttctgaaaaggattttgtagttctattgccatatcattagcactagactagagctgtaatgtgctgggagagggtagctcagctctgggatgtcgtcccacatactgtctttatgtagttgtctggtgtttgg

SEQ ID NO: 82853 - DNA, 1055 bp, Homo sapiens
ctgattcagcctctgtaattggtactgagaagtgctggtttttcctcagagatgaaaatttgttcctcagtcttcacaaagtcaatcacccgacggaggccgctggtatactacagtttgacatgtgacacatttgagtgtgggcttgttgttttaaaatgcagtttttatagtcaggtctcagtccatggttgatggagaggatatggggaagggagataggtgggaagaaagaagttaagagataattaaataatcacaactgctgctggctcttgattatgtctggggtagaattataccagtgatgactcaaaaatggtttgggaatggttacctttttgcaggcaggttgtgtgaaggagtgttaactcaaggtcattcctgcgactcctacttgagtaagaataaaggaagtgggttttggggctccatatgaaccccaaagggaggggatgggtactgggggccttgagctgcctctcctctcatttccaacctgagcagttctgctgagagtctggctctcactgtgggcctgtggtttacaggagctaattttgaatccctagttagcttggctctcagctgcactttaatctctgttggctgctcacgtgagattgagaattgactgtatgactcctggaatgccttcaaaaacctccaagaatccatggccagttgcagtgaatgactcacacttgtagtcccattgctttgggtggctgggatgggaagatcgcttgagcccaggaattcaaggctgcagtgagctatgattgcaccactatactccagcctgggcaaacagagaccctgtctcttaaaaaaaaaaaaaccactctccctggttaccccccaaacccctgagaatccatgaagctgtttgatataagtgctgtgaatcaaaatatgacaaattattcagacacaggggaaatgtatcagggatgaatagtctatgaggagttctggccttcttgaatctctctgctctgcccattcaggaagggccaggggctaatttgctttcaatcattattccagagttg

SEQ ID NO: 82854 - DNA, 1052 bp, Homo sapiens
taagaaatttttccctacccctagctcgtgaagatactctgtatctacaatccaactggaatttttgtgtgtgaatgtgtctcacttagttttaaacttatcttacctttccttagtttgtcaagatctgtctgaggcttaaatcccaagcacaaggtaggaggcagtcagataaattttcttattcttcataaattaatgcagcgcaggagataaagtttttgaatagcctttgggaatggaagccttgtctccctaccacacgatggcacttggattttgttttatgttctttgtccctttcattacttgaaagtgtaatctgcttggagtattacctcttcctcacttgcagttaattccttaactcacccaatctactttctggcttcaccacttgcttgaaacagctggccaaggttccggtggctttgttgccaaacgggagccagggaattctccagtatccttgaaccagtatccttgaatgtgccttctatgtcttttctacctctgttctgattgtgtgatgttagcaaattcttggcctcctgatttttcccgcctatacattttacatagcttcattttgaaatctagtctgaaaagccccactagatatgattgggagaaagcccttaaacctgagggcatgagtctctagtttcaaagtaggcctgaccacttttgttgttttgctttggtctgttttcatttggtatctaagaccaaataaaaatgagatcagccataactacagattagataattccttatggtttatgtagcagttttacatggatcgcctgattggatctcatatcaccctgtgaggcaggtattgttgttacagatatagaaatgattaaaaatgcaaacagcacttatttgttcttgttgagaaacacctggtaatgccccggatttggttttggagcttcctttttcatgtagccatcatttaatgggaaaatgcatctgggttttttttttttttttttttttaaactagtgaagtgtagtagtgagaacgggggaaagagtagaacaag

SEQ ID NO: 82855 - DNA, 1217 bp, Homo sapiens
tatattgtacaagttttagtttattagtggaacccgggcacatgaaagtccctggttagagagttgctttgcagcgtcttctccctttgtggctagtaatgatctgcggggatgggaggagcattgagaacctattggccatgaagagtcacttcctcccgacacagatctctgcttgtgcagcgcccccacacttcctgcgtaatgcagtgccctcagagatcccccagcagctgccaccccggcaacattatctatatttgcagggatacttaaggaccctttggcaattggcagtgatattttgagagcctttgaggaacgtgactgaacatgaattttaaaaaagtataaaggtggcactaggtgtattcagagggacaagctggtggcaacttagggggactttgcctttataaaaggagacccacacatggagtttacgtaagaagaacttacagtgagggagagatgactgtatcagccaatacagatgaagaatgctccaggagcttgcggggtttgcccacagtgccacagactagactcagtagagccaggactggctctaatctggtactttctctgcctgccatgcttggccctgtacccctcagtggcagcactgtttcccattagagaaaacaaacctgttagttttctcattgcttatgtagagggtaaccttcctgtgtcccctcattcttgctttagcctacattcaggggggttttgactgcacaccaggtgggagcagtattggggcacattcttctggtcctgtctccaccctctcatttcttcctttccataggagtgatttatctgattggtacaccagggagagcctcactccattggtccacatctacccagtgtgaggtcactgcatcagaacactgcctggctttgtgcttgaactctctcccctgcttacccttaagagaagcctgtccttagctgtgtcctaccttccttttgtggctagcaccattctttgtccctaggtctggaggcgggtggcaaggccaactagaaatgggaagggcgaggcattgcagctttgccattgacaaagaggatggtagactttggtttgctcttggtttcttgagactttatagcaaccgagtggaacctggaggggatgattatgctaccccagttcccagtagtaatgtggtctagagatttttaccaaagtcaaataatattat

SEQ ID NO: 82856 - DNA, 1006 bp, Homo sapiens
ggggatcaaatttaggcatgagattaggtggagacaaaccacatccagactatggcaacacataacataaaacgtcaccattttaaagtatgcagttcggtgacattaagtgcattcaccatgttgtgtaagaatcaccactctagtttcacactttttcatcactccagaggaaacctgtacccattaagcagtcattcccctttctcccttgccccagcccctggtgaccacaaatctaattcctgtctcatgaatttgcttattctggatattttatataaattatcatacactatatggtccttccttatctccgaatgcataaaaagatgacatagattaagtaaaagttgaattgaatctgtattttgaaaatagaaatccatctgtggcagcagtcttaaattcagcatatttaattggccaggatgtcccatgccccagccactaggaagaaatagtttataccaatagttactgccagtggacagagggttatagaccttggggtaggatggaacctaaaatagagacaaagacaggaaaagtatggggcttagagagtgaaagccagtgaatggcaggcagcacattccatggtggaataaacagaaaacttctaggcatttaccttgatttggagtgcaaattggagaacttgcaggtaagtgcaagttcttccgtgatcaaaaaaataaccagcctaaagaatgaatgtttgtgacagtgtctagtacataagaccttagtaaatgtgcggagttttgcttaagagcaagagtggtatttgggatgacaaggacaagcagagaggatccccaggcatctctttctcagtgtttgacattttctctctttctttttctttttgagacgagtctctctctgtcacccaggatggagtgcagtggcgtgatctctgctcactgcaacctccgcctcctggattcaagcaattcttctgcctcaacctcccgagtagctggtactacaggctcacgcc

SEQ ID NO: 82857 - DNA, 1048 bp, Homo sapiens
cctcattttctagctagtcaaatgatgaacctgagtcatctttaacttcctcttctatagcgcccccctgcttccagacctgttgatgctgctgctaacgtatctgtgtcctgaccctgacctttccctccattccctctgctttgatcaagctgtcattgtctcttgctttggttgttgctgtcatgaccggtcctctcttccaggttctgcgtccctctgtccatcttccgtactgctgagctgcctcatagagctcagatgtgatcatgccacgtgaaccccagtcattcagagcagagggttcccactgttgtctgagaccaagttttcatcatggtagagtaacatgggccctgaattttaagtttcttacttactttgaggtccctcagtaaggatgaagatggttcattaaatacttaaagtgatttatttggagtatctatgaaagacttcccaaagtacaccttgttttccagccacagcaaaccatttgtcattcccagaacactcagtgcactttaatacttgtctgcctttgctgatgctgttccctctgctctagcgcccttttctttcttgcaaatgaaacttatgtgacatctcaaggttaccataaacattacctctctgaggctttccagctgctagtttatcataggtcatcttcgattatagtttggtattttttggcttttattattttgatatgtttgtttttgttaatataagaatgacaagactacattattattattattattattttttgagacggagtctcgctttgtcgcccaggctggagtgcagtggtgtgatctcgactcactacaagttccgcctcctgggttcaagcattctcctgcctcagcctcccgagtagctgggactacaggtgcatgctgccacgcctggctaattttttgtatttttagtagagatggggtttcaccgtgttagccaggatggtctcgatctcctgacctcgtgatccacccgcctcagcctccccaattgctgggattacaggcatgagccaccacgc

SEQ ID NO: 82858 - DNA, 1394 bp, Homo sapiens
cctcaccaccctgtttaaaatggtaatgccacttcagcacttccagtccctgacatcctgctttacttctctttttgtacaattttttaacattttatatactcaatattattaatgaggttggtcttttgttgtctcctgctaaaatgttagctccataaagctagggaatctctcttttgttcatgtatcccaagagtctagagcaattcttggcatagtgggcaattaaattgtggtagggatgttgttgaggtcttgggtgttcaaagggagctttagggaaggagtaaactaggctccctagcagtttcagaagtttggaagtttcagaagagaaggatgtgaagaagtagttggagagaaggctatcaaggtagtttgtggctagatgatggagggtctccagtactaccctagggagtttggctttctcttgttggatggtttttccttaaaggaaacttaatctgctgtgtataggttagatgtgggaaaccagatgttacaccatgcctgtgtggatgtgacaagggcctgcctgttcttgcatgtgtaattagtggttgagaggaagacctggtaagggagttgtcacttaaaactgattccagagttaagagatgaggaagaaggaaaagcacaagctgattttggaagcctgtaacctggcgattgagagtagtagaaagttttaatcagttggtgatttggatttggtaggaatggaagcgataacatgtaaactgataggaagagatgacaggagatgggccatgtgctgatgaaatatgggatgtggctatctctgtaggtaggtgagcagttgtggcgctgttgacatgaaggtagttggccctgggcacgagaaggatgttgaagatcttaagtagttgcattgtcaaatgtatctgtctaagccaaggaagatgtgatagcacaggctgtgttgaaagggtaggaattcctgaaagtgtggttgccactctacctctactttttcaacctcccacctctcctttccccctgtcattcattctacaacccattgctgactgactttttttttttttttttgagatggggtcttactccgtcgcccaggctggtgtgcagtggagcaatcatgtcttactgcagcctctatctcctggggctcacgcgatcctcccacctcagcctcctgagtagctggaactatacgtatgcatcaccatgcctgggtaattttgtattctttgtagatacgaggtttcaccatgttgcccctgctggccttgagctgctgggctcaagtgatcctccggcctcagcctcccaaagtgctaggattacaggcgtaagccaccacgcccagccagcagactttttgtctttaccacttttcaagatta

SEQ ID NO: 82859 - DNA, 1045 bp, Homo sapiens
gtggctcatgcctgtaattccagcactttgggaggccgaggcgggcggatcatgaggtcaggagatcgaaaccatcctggccaacatggtgtaaccccgtctccactaaaaatacaaaaattagccagacgtggtggcaggcacctgtagtcccagctacttgggaggctgaggcaggagaatcgtttgaacttgggaggcagaggttgcagtgagctgagactgcgccactgcactccagcctgggtaacagagtgagactctgtctcaaaaaaaaaaaaaaaccaaaaagacacactttggttgcttgcaagcaatagcgacaagcctggtttctttttttcttctggcacatggctagactacatttcttagcccctcctgcagctggatggggccatatgagtaagttttggtcaatggaatgtgggcagaagtgatatatgttgcttctaggcctttctcctaaaacacttccaggagaagatctgatgtaggtccaaagacctacaggaatgttgagccccaagatggaaagggcctgggtccctgaacaactgtggagcagagccccactgccaactcactgtgactgtgacatgaaccagaaataggcttttcctttgttaaactactgggattttattttttaatttgattgattgattgattgattgcttccgagacagggtcttgctctgtcacctagctggagtgtagttgtgcgatcatggctcattgaaacctccacctccagggctcaagtgatcctcccacctcagcctcctgagtacctgggattacaggtttgtgccaccacatgcagctgatttttaaatttttggtagagatgaggtcttgctatgttgcccaggctggcctcaaactcctgagctccagtgaccctcctgcctcagcctcccaaagtgctgagattacaagtgtgaaccactgtgcctagccaaactcctgggattttagattatctgttacagcagcacagcctaccctgacatcaactctggccaactcgagcaaaaatgga

SEQ ID NO: 82860 - DNA, 1048 bp, Homo sapiens
gtggtatataagttctacctcaattaagctattttttcaaaataggaattcaagctggacgtggtggcgcatgcctgtggtcctagctactcgggaggctgaggcaagaggatcatttgagcctgggggttcaagaccagcctaggcaaaatggggaaaccttttattttttaaaaaaataaaataataggaagcacccccccttctcaggggttttgtgaggactcaatgaatgaaatttttccaagttggccacaccatgtaggtctgtgtatacacgtgtgtctgtgtgtgtgcgcatgtgtgcatgtgtgtctgtgtggatgcttgtgcatccgtgtgtgtgttggtggggagagcaacaaggactccaaagtaggcctgagccagacgatgagttgggtgtcgtttcataagggtggtgccaacgcttgccgaccgccagcaggaagtggtgggcggctcagtcttgcttcttgcttgggaaaccctcccccaccacggtggccctcccagcttgtggcagagccgtgactactgccatgaagtcgagggggacccccacccaccctcagcaacacagatggcagatggaggcctccctcagggccggtgaggacacacccttgaggcgtgaggtgtgtgcgcccttcctccaccctcttgagtgtgggtggatgcggcgctgacagcccggcgtgaacagaggtcagagaggcctccgctgcctggtgctggcaagttcacagccatcacatccacagctgctcctgcaagtggaggcagggacgaccaatgacgaaatactttgagggtcgagttcccactgagactcggccctcttctgggcctcagtttccccacctggctggggaatctgggtgcgatgttcccaatatcctgccttgggaaagcacaagagtgaaaggtaccagctttggagccaataccaatgctagctgtgtgaccttgggcaagttgcctgtttcctcatctcaaaagcctgtgctgctgctcacacctgtaatcccagcactttgagaggcca

SEQ ID NO: 82861 - DNA, 1063 bp, Homo sapiens
agggggcgcagcggtagactaggcaggacgcggcccggcacctggtccgtccccggcgggctggtgagggggccaccaaagacccctagcgcggcctggtgagcgggggcttggcccagaggagccaagccgcacagacccgagaattcggaggccaccacacaacacacacacacacacacacacacacacacacacacacacacacacacacacacacgccaggagcaagggagctttcgggccacactcccagacgcctccctgagccctggaacccggactcgttgctcctggccttccataccccctggcagatcatcctgcggtcccaccccagatcccctcctcctcgccatcccattctgccccctccccaccctgggtacagaaagggactgaagtgttgggcagagagggggcttaaggcccctgggcacaggctgggatcagggcagtgagcgaagggcagctgtgtcctgccctcccttctggaggctggaggggagaggccaagcccttggaaaatgtagcaaatgtctggatgtcgcataagtgcgtgtatgtgcgggacaggccccgagaagctagtgactcctgcacacccccattgcacaaatgaaatcacagcccaggagggagggtagcttggcactggctgagaaatagagctctctccccgcccctccccctaaccacaagggattgtcctgacaacttgtggggatagaagggctcacagggcaggggtctcagctgcccccatccttagggcaggggagttagtgtggagccgagagcaggtcccagctccccctgccagccgcactgtcccaggcccagggacctctgccgggtcctcccagcccttgccacacagcctagacgtagtagcctgggcttccagcaggtggcgagctggttcgtgctggaaatttctcctgggtttcttggggtcaaacatgccaacctccaagaccccatcctcacgtctcccacttttctggcgctggagtgtgcagggcgtaggacctgcatgtgtgggtgtgagaatgggggcggt

SEQ ID NO: 82862 - DNA, 2677 bp, Homo sapiens
ctttctttctttctttttttttttttttgagacggagcctcactgttgcccagactggagtgcagtggcgcagtctcagctcactgcaacctccacctcctgggttcaagtgattctgctgcctcagcctctcgagtagctgagactacaggcccccgccaccatgtccagctaattttttgtatttttagtagagatggggtttcttcatgttggccaggctggtctcgaattcctgacctcaggtggcccgcccacctcggcttcccaaagtgctgggattacaggtgtgagccactgcgcccagaccaaccttgccttttgcaagtgttaatatggttaaaatggaggttcatccaggagggctgtgtgcctctccttacactcttaacacttagccctgctcctatggttccatttggacctgatccccgttcgcattgagcttgccgttcttgctgtggagtctgcgtgtttgtgtttcactgtctgccacccatttctagccgtagaacttttgcactttgtctaccctgaattccagttactatggcgtaccatgtcttaccttcctggcttgtcttaggattgtatttgggggcctgagttcataattaatatataaacttgtgattttagagataattttgaccggggctaagttttttaaggaaaagaagtgagctgcttggaagaataataagctggcaacagtgtaattgatgcatgggcatggcaccattcatgaaggtgatgtgagtgaggaagggttggtaaattccattccagttgagctggaagaggtggtttggttttgttttgttttgttttttgagacagagtctcgctctgtagcccaggctggagtgcagtggcaagatctcagctcactgcaaattctgcctcccgggttcaagcaattttcctgcctcagcctcccgagtagttgggattacaggcgtgtgccactatgcctggctaatttttgtatttttagtagagacgaggttttgccatgctggccaggctggtctccaactcctgacctcagatgatccgtctgccttggcctcccaaagtgctgggattattacaggtgtgagccaccacgcctggctggaagaggtgtttttaggtcaaggaagcttacgagaatctgatgaaagccatgggcctttttcctaggaagaatgtacatgaggacatgtgcacaatttgtcaacatttttgagggtttcggcagtcccctgaagtgcatctatggactgattgagttcaaacatttgtgcagatggagtggcttgggcgactacgtggctgtttggtggagaggcggggagagtctctagtatggtttgctcctccagcctctgttcctccttaaagagtgctaatggaacttgtcccaagttccctaggccctgcctcattcccaccctttcaggtccccctgagtccatgcgggaacatgtggtcgctgcctccaaggccatgaagatgggtgactggaagacctgtcacagttttatcatcaatgagaagatgaatgggaaagtgtgggaccttttccccgaggctgacaaagtccgcaccatgctggttaggtgagcagacagagaggccgtgatgggtcggggaagaagagactggttggtccccttccctgaggccctgttgtgtcttctgtcccctcttcccacaggaagatccaggaagagtcactgaggacctacctcttcacctacagcagtgtctatgactccatcaggtaggcggggccctggggacacagaagggccccagccttgtgggcaagtgtcctgactgcccctgccctctgccttctttcttcccagcatggagacgctgtcagacatgtttgagctggatctgcccactgtgcactccatcatcagcaaaatgatcattaatgaggagctgatggtaggggccggggtgggaagcgggcaggtggagccatggagggattggagcgtaggggccggggtgggaagcgggcaggtggagccatggagggattggagcagaggggcctgatctgtgtcgtgtcccctcctctgccttggcgcctgtcaggcctccctggaccagccaacacagacagtggtgatgcaccgcactgagcccactgcccagcagaacctggctctgcagctggccgagaagctgggcagcctggtggagaacaacgaacgggtgtttgaccacaagcagggcacctacgggggctacttccgaggtgagtacttcggctcctctccttgcccactcctggtgccctcaccgcctctcacctggcattccctgcccttccttcccatctctctcctacagaccagaaggacggctaccgcaaaaacgagggctacatgcgccgcggtggctaccgccagcagcagtctcagacggcctactgagctctccactctgtttcccgcctgggccatccaaccttgaagtcctaaaccacacctcagtcactaaaggtctgtttaaagttgttctggttgattgcttgttgccacaaaggtgtgttgagcccattcatttgctgattatatttctgagctgctaccacatgacagacacaaggctcagatgaagaggtgaattgaacacgttcctgacctcaaagagcctgctgctttttgacatt

SEQ ID NO: 82863 - DNA, 1464 bp, Homo sapiens
cagagttaaactagggccctgtggtaagaagtggctggaggggtggctgctgtagctaacagctggagaaagcacccttaagtagggaccacctgaggtgagatccaatgaggaggagttaggggaagaatcagctgaagacagcgcctgacaggaggagcagagagcgagcttgatgttccaggagtaaaaaggccagtgggactccagcacaggaagccagagggagaatcgtgggagaccaggcaagggccaggcctggcagacccttattggcagaggttggcagttgggatttttttcctaagctgtgggactggaaggttctgggtcctgggagtgggagatggcctttctggggcacactgactagacttttctgacgggtgcagaagagggacgggttgattggaatgagtggggacagatgggaaagcctggctgcccagctgagacaagggtgggtgctctccctgccagagtacgtggagcacttgaaggatgaggcccaggtgtgtgccatcatcgagcgtgtgcagcgctacctggaggagaagggcactaccgaggaggtctgccgcatctacctgctgcgcatcctgcacacctactacaagtttgattacaaggcccatcagcgacagctgaccccgcctgagggctcctcaaaggtgagcacgtggcagtcatggcagaggggaatgggtgtgtccacctgtcctccacttctgtcaggacttgacagcaaatctgttactctctagacttccgcaggtggagcagggagggaaactgaggtattagaatgagactggatagagtctcatctttagttgctagagcctgtgccttttaaagctggatctcctttgcaaataacctcccttcctccccagtctgagcaagaccaggcagaaaatgagggcgaggactcggctgtgttgatggagagactgtgcaagtacatctacgccaaggaccgcacagaccggatccgcacatgtgccatcctctgccacatctaccaccatgctctgcactcgcgctggtaccaggcccgcgacctcatgctcatgagccacttgcaggacaacattcagcatgcagacccgccagtgcaggtaggatggggaggccttggaggtgaaggagtgccaggcccctggcctcttggcaaactggcttaaccagaacagccacctgtctggccggtgcaaatttaagtagacacttggtctttcccagttgccagcatcctgcagtcctcctgcatgtaaacacataatttcgtgtcaaaaaaaaaaattatccaggcttggtagtgcttgagcccaagaggcagaggttccagtgagccgaggttgtgccactgcactccagcctgggtaatggagcaagactgttcaaaaaaaaaaaaaagctgtgtctggaagtgtagatcatgtaaaagtatatttgaggcaa

SEQ ID NO: 82864 - DNA, 2606 bp, Homo sapiens
ttggtttttttttgttttgttttgttttgtttttttggagactgagtcttgctctgtcaccccggcttaagtgcagtggcatgattgtggctcactgcagccttctctgcctcccaagttcaagtgattctcgtgcctcagcctcctaagtagctgggactacaggcgtgcaccaccatgcctggctaatttttgtacttttagtagagatggggttccaccatgttgcccaggctggtcttggattcctgacatcaagtgatctaccatgcttagctgacaggttgtttctattaatatgtctacagtggcctggttagtactctgtcttgttagagatggctatggttatggttcactgtgccctctaggtcattgttgtagagcataacttggacccaggagctgctggaggaaaagaggaagttgatgggaggaagaagccttagaggtggggaggggctgatctgtcatcttctcccatgtctgtcggcagggcacccaccacagatgaggacaagaaggcagccgagaagaaacgggaggacaaagctaagaagaagcacgacaggaaatccaagcgcctggatgaggaggaggaggaggacaatgaaggcggggagtgggaaagggtccggggcggagtgccgttggttaaggtgagggtttcagaggtaaaatgaattggggaacagtttgggaggacataaaggtccccttgtggggaaaaggcaaggacagtttcccgctggcatgtacatgacgggatatgtactgatacaggagaagccaaaaatgtttgccaagggaactgagatcacccatgctgttgttatcaagaaactgaatgagatcctacaggcacgaggcaagaagggaactgatcggtaagattcgtgggcctgggcagtgggattgcagggtggcagagggtggaggttgggggaagggattgttgggagggtctgtgtgtggctgtagtagagggaattgtatgcttggggcatccccgtccattatctgctgtttactcttcttgtgacttaaaaccaatcacttaacgttttggatctgttttcccatctatacaatgagataatgttctcctctttttttttttttttttttttttgtttgagatggagtctcgttgttgcccaggctggagtgcactggcgcgatctcggctcactgcaacctttttgccttctgggttcaaccgattctcctgcctcagcctcctgagtagctgggattacaggaacccgccaccatccctggctgattttgtacttttagtagagatggggtttcaccatgtctcgaactcctgacttcaagtgatccgcctgcctcagcctcccaaagtgctgggattacaggcatgagctaccacacctggctttttttttttttaagattaaaaaagtaaaagagtgtttaccttctttagttattaggtaacagaggatggtggtaggtgtgaagcatttcacagcattccaggatggttgggattattgttgcttctgtttggaatttataaaggagaagcagggatatgggtgatgaggagggcgcgttatccgaagcgggcatgctgggagagactttgtgatttgtctccaaagcctcacccagctctctggccctctagtgctgcccagattgagctgctgcaactgctggttcagattgcagcggaaaacaacctgggagagggcgtcattgtcaagatcaagttcaatatcatcgcctctctctatgactacaaccccaacctggcaacctacatgaaggtgagagcagtgaagaggctcatctcagggcatcgctggtgggttgggggaagaaggtacctagcatcttaagactcaggggctatggaggcagtcttggtggtggaaggccccatgattcctgctgaagggggaggcatccgcttactctaccttcacacctctgactctgatgtggcctgaaatcttggcagccagagatgtgggggaagtgcctggactgcatcaatgagctgatggatatcctgtttgcaaatcccaacatttttgttggagagaatattctggaagagagtgagaacctgcacaacgctgaccaggtaaagggaggagttggcaggataactggaggtgtgtattttatgctttgggaaggctcagtgggacccgagggttgaggtttgagactgagatctgggctaatttgttgactcctccttcgccttccttttcagccactgcgtgtccgtggctgcatcctaactctggtggaacgaatggatgaagaatttaccaaaataatgcaaaatactgaccctcactcccaaggtgagcctgagcaagcgtgggctttgctgagaggaaaattgtggggaatattactaggtttagagctttgtgaggattatactaagtcagagtgcttgaaaagccagcctttcaacttacctagcgttcacacggaagggcctgatgagatgctggctcccagtcccatcgtttctgattccataggtctgagtggggcttgagaacctgcacctctagcctgctcccaggttgctggtctcagggctatactttgag

SEQ ID NO: 82865 - DNA, 2157 bp, Homo sapiens
tggggaggctgggtgataggagtctctgggagcagtggtgagttttccctcggtgggcacgttcaatgtggtatcgggctcccaacccaggtttgaggagctgaccaaccttatccggaccatccgtaatgccatgaagattcgtgatgtcaccaagtgcctggaagagtttgagctcctgggaaaagcatatgggaaggccaaaagcattgtggacaaagaaggtgtcccccggttctatatccgcatcctggctgacctagaggactatcttaatgaggtgtgatgcctatatttattaccaccacttattcatggttttgtacttttagtggtgggatgtataggatcttttaaaaataagctaacagatgtagttaataagtagtaccagtggtgttccaatagcaagactcaaaagtggagaagaagcctggagtttaggaaatgttacttagtttcaaatcactgttctctgtttctttcctcttcttccctttagctttgggaagataaggaagggaagaagaagatgaacaagaacaatgccaaggctctgagcaccttgcgtcagaagatccgaaaatacaaccgtgatttcgagtcccatatcacaagctacaagcaggtggggaggctagaggcacacttactgaactgggaacagtgaccccgtgactgaggcccaaagatggaattgctagtgggaggtgtgactggagcaggaagatgacagaactgtctggggtggaggggtggggtgggctgatggctggacagcgtccatgattgttctctcacttccctctctgtccagaaccccgagcagtctgcggatgaagatgctgagaaaaatgaggaggattcagaaggtgagccaaagaacctttgttgcaaataggaagtccagagttagtgttgcccttcgcctggtttcttggctgccctccagtctggcttttcaacattcaggatctttttctccctccattaccactaggctcttcagatgaggatgaggatgaggacggagtcagtgctgcaactttcttgaagaagaaatcagaagctccttctggggagagtcgcaagttcctcaaaaagatggatgtaagagccagggttagatggatgatttcctgccagaggtagttcctgagtccctgggggaaaaagacaagactcaaacccctagggttgggaggggtggaatttagtggagttgagaacaagcttcctcttacatcagagcagtgggcaaacagggatctgggcccagctctgccaggggaagctgtgtgtgttcctgcggccaaattgcagcatcactctgggacttgatggtgagtcccagcccttggtatcttgattccatgagtagctgctcttgttctactcatgtaaataaatctcgaacatgcgttagtaaggaggagacaccagtcaatctccctgtcttcttgctgatcctcttttcttccctctaaggatgaagatgaggactcagaagattccgaagatgatgaagactgggacacaggttccacatcttccgattccgactcagaggaggaagaagggaaacaaaccgcgctggcctcaagatttcttaaaaagtaaggaaagtagtgggacctagggttacactggaactggtggaaagctcttaattgtctggaaggttattgattcttccatggagtccttttaggttggagcagccaactgttagcattttacagtaggatcagagagtcaagtacattagttggctaaagtcacgaagctaatgtgtcctaaagatgagaattgaaggctccagagtccaaatatttacccacagccttactcactgcgtgtggattgggtgcaaatctcactttggcacccgatacctgtgtgacattggacaaactacttagcctgtctaatcttcagttttctcatctgtaaaataaggcagggaaccctcccttccagaatagctgcaggaatacagggaggtgtgatgtaagaaagtagttcatctaggactgacgtgtggtgagccctcagtgtgcgttgctactgtgttacccttcctgataacttcttagtacacatacagcatacagactgccgcaagtgttcatgacctttactgggacagtcagaata

SEQ ID NO: 82866 - DNA, 1004 bp, Homo sapiens
ttacttgaggtcaggagtttgagaccagcatggccaataaggtgaaaccccgtctctactaaaaatacaaaaattagccggttgtggtggcacatgcctgtaaccccagcaacttaggaggctgaggcaggagaatctcttgaaccttggaggcggaggttgtagtgagccgagattgcgccattgcactgcagcctgggcgataaaagcaaaactccacctcaaaaaacaccgctaaaataatccaaaaaataataaaaagggaaaagaggcaggcaagatggtgcatgcctgtagtcccaactactctggaggctgaggtgggaggatcccttgaaactcaggagttggaggctgcctgggcaacatagtgagaccttatctcttaacaaacaaaaagagtagagatactgttgctgactgtgagcctgtggtctggtcttattatcgtagaaaaatactagcagtggaggtgttaataccattgagactttctccttgctgttggcctctcatactttgggaaatgttgctaagatctagtttaggtaccacctccctaaagccttttctgttcattatagctcaagtatcatttttctctacctctttttttattcattacttctgtggtgacttgtgtctctatgtcattagttacacagtaaattagcactttcatttgtttttgagaggatagtgaatgtcatctttgtgttgctacaacactgagcaaaaggccttacttagtgtacacttaaaagattgagttgtatatgaagtggccctgaggaggagtcaaaaagaggatgggtgtggtgtggatggcctggattacttagttctacctgtcctgagtagggaaatacggatctcttggaaagactgggaaaggaggttaatggcctctgttccttccaaacaggccattgttgctgagcgaggatgaagaagataccaagagagttgtccgcagtgccaaggacaagaggtaaagccatggc

SEQ ID NO: 82867 - DNA, 1158 bp, Homo sapiens
tcaagcgattctcctgcctcagcctcccgagtagcttggcttacaggcatgcaccaccacgcctggctaattttgtatttttagtagagatggggtttctccatattggtcaggctggtctcgaactcccgacctcgggtaatccgcctgcctcggtctcccaaagtgctaggattacaggcgtgagtgagccaccgcacccggcaggattatctacttctatactattaatgcctattaatgctgtaattacacgcgtgagccactgcgccccgccgatcttcgtgttttaaatcccgacaccaacgcgcggtaggattcgcgacgcctgcagccaaggtctcagcgcccggttccctcaggcttgtccccgcccccttatggcgcgaaggccactgggagttgtagtctcccagtgtagttagtcggcgcttcccggaagtgacgcgaggacccgccttctctctcggcgtttccgctgtcagggccctgcggtgtgactcgcgggctcagctggttggtattttttgggcctcgtgcttcgtggtgggagacccaggtcgaggtccgggtggggccggtgaggggttgggcgtcgggaggtgttggctcgggcctcttcgcgtggccggtgacgccttggctcccccgcaggtccggccgtagcacctccgcgccgtcgccatgtcgcggtttttcaccaccggttcggacagcgagtccgagtcgtccttgtccggggaggagctcgtcaccaaacctgtcggaggcaactatggcaaacagtgagttgcgggggctgtggctgtgaccattctgggagtgcggggttaggcaggctgtggaacgcagtgcacatgggaggggatggaggtgagggcggggagagtgggtttggacaatgaccagagtttgcaggatcggagcggtgttggagagagacagccttagagggctgtgatagccggtagccacccaccaggcacaagggatagaatcacagaggtttcccaagccagatctgttgcatcagcttcttaactggccttaagtctacagcctctacctgtctcctctcattttaccgccgagaagtccttagtgacttctcactgctcacagaaggaaatgcaaaatgcttgattggtatctgggagc

SEQ ID NO: 82868 - DNA, 1334 bp, Homo sapiens
catgtttagtagagaccaggccaggctggtctcgaaatcctgacctcaggtgatctgcccacctcagcctcccaaagtgctgggattacaggtgtgagccaccacaccgggctggtgttgagattttatctagacctggcagccctctccttcaccagtaactcctaaaaccagggacccctggaggggaggccacctctccttccctgccccgccctggtcccaggcttagcctctccccctgttcacagtgcctcaacctggtgttcctgctggcagacgtgtggttcggctttctgccaagcatctacctcgtcttcctgatcattctgtatgaggggctcctgggaggcgcagcctacgtgaacaccttccacaacatcgccctggaggtcagcattggccgggcaagggctgggggtggcctgtccagggacacccagggcagggatgtctgggactgaagcctcacccctgctctctgccctcccagaccagtgatgagcaccgggagtttgcaatggcggccacctgcatctctgacacactggggatctccctgtcggggctcctggctttgcctctgcatgacttcctctgccagctctcctgatactcgggatcctcaggacgcaggtcacattcacctgtgggcagagggacaggtcagacacccaggcccaccccagagaccctccatgaactgtgctcccagccttcccggcaggtctgggagtagggaagggctgaagccttgtttcccttgcaggggggccagccattgtctcccacttggggagtttcttcctggcatcatgccttctgaataaatgccgattttatccatggacttcttatatcgtttttgtctctaaaaagaaacttttattatgaaagtaatacatgcccactttcctatatatagacagcataaagaaggtatgtcagcagatttctcccttttttgtttgtttgtttgtttgtttgtttgttttgacagagtctcactctgtcacctaggctggagtgcaatggcgtgatcttggctcactgcaacctccacttcccggttcaagcaattctcctgcctcagcctcccgagtagctgggattacaggtggtcactaccatgtctggctaatttttatatttttagtacagacgacattttgccatgttggccaggctggtctcaaactcatgacctcaggtgatccgcccaccttggcctcccaaagtgctgagattacaggtgtgagccactgtacctggcctctgccatctttgaggccttacgtattcattcattcatgcattcattgtttgggacaatc

SEQ ID NO: 82869 - DNA, 1050 bp, Homo sapiens
gggcggatcacttgaagtcaggagttcgagaccagcctggccaacatggtgaaactccgactctactaaaaatacaaaaactacctgggtgtggtggcacacacctgtagtctgagctattcaggaggctgaggcaggagaattgcttgaagccaggaggtggaagttgcaatgagccaagatcacaccactgcactctagcttgggcaacagagtgagacaccatctcaaaaaaaagaaagctcttgaatgtgttatctaaacaaagtccatttacagggccatctgtggcctgtggtctagtagtgtgagactcatatggaaaccccctcttcattgtgcatgcagagacgctgaggtcctgagaagtcagtcactgctgacccaaagccatccttcaagtgaaggcagagctgggacgggagccaggctctgtgtgtctatccctctgcctccagggtgaaagacatgcttttctcccattaggtggacccaggcccaacgccgatcccccacaacagctcatcacgatttgactgcaactctgtctctacggctgtgcgtactcatctcacctggtccttgcctgacccagggcccctgggtctatagaccccactcccagcccttcactacccagctgggactgtcatgattaaaacagttgagacctgggctgggcgcactggctcacacttgtaatcccagcactttgggagaccaaggtgggaggatcacttgagcctaggagtttgagaccagcctgggcagtatagtgagacccccatcttaaagaaaaaaattaaaaaatatatatatataaaataattgagaccttaatataatttctgaggctgaggcggatggatcacttgagaccaggagttcaagaccagcctggccaacatggtgaaaccccatctgtactaaaaatacaaaaattagccaggcatggtggtgcacgcctgtaatcccagctactcaggaggctgaggcaggagaatcacttgaacccaggaggtggaggttgtagtgagccaagatcgagcc

SEQ ID NO: 82870 - DNA, 1049 bp, Homo sapiens
agctgaagcctcccacagtcataactggtgctggcaggctactgtctcggtcttgggcgccactgatctaaggtcacggctctgcttgctgctcccacccgctccagtttaaaacctgcggttccagggttctccagcccctccctttttcacgctccgaagccgagaaggcccaaagcgaagacagagaggacccggaagtagggaaaacctctgagcacgtgatgggggaacacgcgggtgctgtcacgtgatccgacaaacggcctctgcatagtgcagaacattctgctgctcttaaaggtacaggcctcagggtccctgctgtagacggggcgggggagagtacgatgggtggggcgtggtgggtcgtagggcgctcgagatggagcccccagcttccttgatggatcgcggggcgcgagtgccctagacaagccggagctgggaccggcaatcgggcgttgatccttgtcacctgtcgcagaccctcatccctcccgtgggagccccctttggacactctatgaccctggaccctcgggggacctgaacttgatgcgatgggaggctgtgcaggctcgcggcggcgcttttcggattccgagggtgagtattcccgcccaccctcatggaacgaccacctctggctcgcagcccacctgaggggaatgagagctgactcggccccgggaggacacgcaaggagcggtcgtgcacctgagagtaggtgggggtcatgccctcttctcgctctcccaggggaggagaccgtcccggagccccggctccctctgttggaccatcagggcgcgcattggaagaacgcggtgggcttctggtgagtggcctgagacttcagcgagtgacaatggcatgagaagagggaagtgaccggaggaaagggggaagaaagagttaagctgcgcaaaggagctgaacccacaaatatttactgaatccactggtttgccccaggggcagcatgtaaaatttccaaacttcactccttatcaccttccggatttagcaagatcctcatacctacc

SEQ ID NO: 82871 - DNA, 1031 bp, Homo sapiens
cttttccttccaccctattaatccaggcaaacaaaaacactcttttttttttggagacggagtctcactgtgtcacctaggctggagtgcggtggcgcgatctcagctcactgcaacctctgcctcctgggttcaagcgattcttctgcctcagtctccctagtagctgggattacaggcacacaccaccatgtccggctaattgtttttgtatttttagtagagacggggttttgccatgttggctgtctctactaaaaatacaaaaattagctaggcttggtggcggatgcctataatcccagctactggggaggctgaggcaggagaatcacttgaactcgggaggcagaggttgcagtgagccgagatggcgccactgcactccagcctgggtgacaaagcaagactccatctcaaaaaaaaaaaaagccatttttcccctatttgatatcttttctttcacagatacaagggagatgcgtattggtgcctgtagctcactgcaggctatcgggcatgctctgccacattttgcccacgatactcagggtttatagctacacaaggatcagtttgctggcagttgtgcaccgcacagccaggaaggagtagatcccagaaattccttcccaaatggtattccttttagacgtaacctggagagtaagagtcagaagatgccggcactcattgctaagtgaaagatgccagtctgaaaggttacgtgctgtgtattccaactgtaaacgaaaagcaaaactagagagtgaaaggatgagcggtagccagggccttgggagagataggatgaaagggatggataggtggagcacagaggattttagggggtggaactcttctgcagggtaccatgatggggggcacgcaacatgatgcgttgtccaaacccatagaacggcagaacacacagagtaaaccatcatggggatggatgtagttaattatctaacagtattggctcatcagttgttacaaacgcaccactctaatgcaagatgttaacaata

SEQ ID NO: 82872 - DNA, 1751 bp, Homo sapiens
caagtctctgttggaagagaggcggattggtgagtgggagagaacatgctgggaggtcctttgctaggacaagaggagaggccctgcgggcagcagtcaccctcctgtgggggcctgtggccaccacctgctggcatcctcccatggaggctctggcagactggctctaccactgagaagggacaggaggtcattcccagtgcccagaggcaggggtttcccagttctccctcagcagccagagatcatcccgccctggcccctcatctcctgccccttctggggcctgggccagtcgccccctcctctgccatggcccatgcccatctgttgccctggctggtttctgcagagccacacgctgtgtgtcgtaaagccagccttccagaccccctcagcctgcattaggctctcctacctgtctgccctcccaacaatcccatggtgggcagaatcttggcatgtcagtgtccccacacagccatgctggttctgtgtgaagtcaagtggggtgtccagctgtgcctgaggaggttgaaggtgcacatttaattttttttttggtttttttaactttctgttgaattacaatgtatattaatagaagaaaagtacacataagtgcagagttcaatgaaatagtcactaactgaacacacttctgtaaccagcattcagatcagcaaacacagcctgaacagcaccttggaacccgctttctttcttctggttcctccccctggatccccgctgtgctgccatctcacccaactgtagttaaacccagcagcccctataggtgctgacacatggccgatggggtcacagtcctgctgggccctcgggctcactcgggaactgggggctcccaggtgctccttcaacagctcagtgcagcatgctcgggggtcaaggccggcacctatccctggggcctcaggcctcccttccttcccacagcggccaagattgccggtctctacaatgactcggagccaccccggaagaccatgcgcagaggggtgctgatgaccctgctgcagcagtcggccatgaccctgcccctgtggatcgggaagcctggtgacaagtgagggcagcagctgcgagggaggggctggtgcccaggggctgggactgaccctttgttccactcacaggcccccacccctctgtggggccatccctgcctcaggagactacgtggccagacctggagacaaggtggctgcccgggtgaaggccgtggatggggacgagcagtggatcctggccgaggtggtcagttacagccatgccaccaacaagtgagtgacaccaaccctggggctgctctctggtcaccgaacttgcctgggctacgggagaaaagctctgcagagggtgctccccagaggctggttgtgcagggagcaccaggtcctcccccatcctcactccccaacaggtactgcgcccctggctgcatccagccttttcctccttttgtctgcaggtatgaggtagatgacatcgatgaagaaggcaaagagtgagtgtccaggccagggcagggcatggagcctgggggcagcctaacagctgagaaggagcatccccacccggccacaggttgatataagcccctcttcccccaggagacacaccctgagccggcgccgtgtcatcccgctgccccagtggaaggccaacccggagacggaccctgaggccttgttccagaaggagcagctcgtgctggccctgtatcc

SEQ ID NO: 82873 - DNA, 1046 bp, Homo sapiens
tccgagatgggaagctcctgccctgagccctgggctcctaccgccttgtgctcttggtgacatgggacacaagccacctgaggccaggatccctgcctgccaccctctgggttgccctcagtcctctcaacaaagagtccttgaaaggcagcagaccctccagctatgaccccactaggaagggagtcagcacccctactcctccctgcctattccctgccttgggtctccagccactgagaaaagagctctgtagcagcagggactgggccaagacttcttgaccccagagtgaaggatgttaggagtggctgagagtccacggcccagagcctcctgtggtctaggctgggggaagggggtgcctgtcctggcctgggggtctctgagcagcccctcctgtctgcctgccccacagccccaggatgactactcggtcctgtttgaagacacctcctatgcagatggctattcccctcccctcaatgtggctcagagatacgtggtggcttgtaaggaacccaagaaaaagtgatgccgcctggcagactcgccatcccccaacgacacagggcaggacagcagaggacgtgctgggattaaacacattccccctctactcgtctcctgggttttacttctccagaccctctcccctctccaaacagggcaagttgaggagctggagcggggaggtggccgtatttggccccagtgggcgatcactctttcagctcagggtttctcttggcttggaatagagactctgcattgaacacaaatcatactttattctggagcctcttggtcaggcttgattcgcacactccctctgcagtgactccaggaacccctctcacagctcagagcggaagctgaggctgcagcctgccatcttcttcgcatagtccgcatcgaagcgctcattctgcgccacggtgaaggtggtcttccagtccccagccatgcctgggggaggaaggcagggagcaaagctggagtctcatcccaggggaggccccgagtgcctatggggaggctccagc

SEQ ID NO: 82874 - DNA, 1079 bp, Homo sapiens
acaacagagcaagactttgtctcaaaaaaaaaagtagctgatccatggccacccgtgcagctgactcaggcacaggagatgagagctgtgcccagcctgctgccacatggggctgcagtggggcctgggccagggagtcaagatggggaatccgggcctgctggaggggccgcccagggagggtggctgggtggccttggcaggtccctgtgaagtgcctgcccccaggtgtcacgtggagggaagcatcaaaggcggtctcacctccttcatgtcttcatagaagaggtagagaacagggtgggtgcggctcagctcccaccactcttgcacgtgctggtaccaggacccataggacactggagaagcgggcagggagtgccgacacagggttgctgtgcgttgtagccaccaccccttagctccacaccttccttcctcccatcaagcccaccttctccagccatgaacttctccaggaagctttcccaggtcccagggtgagggtacactttggccatgtggtagaagtggtagtaggaaaccgccacatcctttgcgttgcgggcaacatagaccacctgcaggggcagaagactcaaccccagcaccatcaccacacagcctgccccaggccagctcatctcttggtttggcaaaggaggaagctgaggcttagaggctgacttgtttgagatctcacggcacaggtagggccaagtcaggatctgaaccctgctcaaaagccaaagtcctgcctggtccctgagaccatcatattctatagtaatataatctgcatcaatgcgtcacaccccgatctggagcaaggcatgctccaccaggcatgttcccaccaccaccaaattttgtgggcctgtgaggacccaccctctacctttcttaggtctacccggaagagtctcatgtttttggtcatcagagcaaaaggcagacagtcccccccgtggaagatgagacaagtctggaggaagtgaggcgactctcccagaagaacaggaccaaagctgggctgagccggggcctccttccctggattcacatgccccacacctgga

SEQ ID NO: 82875 - DNA, 1057 bp, Homo sapiens
gtggccaggatcccacagcactccagcctcggtgacagcaagacctggcctccccggaaaaaaaaaaaaggaagggagggggattcaggccggccggggttgtctgaaatgggatatccatggggagagggcagggatagcagaggcctcggcttctggaatgttggagccacaagctgagcagggtgagggcgtcctgggccattccggtgtgtcactcacctgagctcttgggaacctggccttgtgccctcctcgcccgcagtggctgagtgtgggtgttgtgtggggaatgcaggggtgttgtctgtgctgagggtttcttaggtcagtgtgggagggatctggagccggggctggacttagatttgcttccggaaggaaggggtagggttgggggtgggggagcttctctattaccctccttagtttgccagctggagacaagcttaaagtgatctccaaagccacgactgggtttggtgtgtagaaaacagaagaatgaaaggggaaagggcccaatggtgggtttgtttttgtgggtttttttttttgagctgtcactgggctcctgacctgcccctgaactccaaaagacaagctttctctaattgacccaggcaagagaggggagggattggaggagaaagatgggataggcaggccctggaaaggtcacctacctgctggctccaggccagtcttgaaggtgccaggggtcctggcccagtgcaacccacaggcctccagcagcccatgcactccaggctctgaccacaaggccagtctggagtgatgcgtgtgggcagagtgaaggggcaggggtggagcagagcatggatccatagaacaagaaagaacaaggacactgcagtcccattgccctgggagccagccccagcttcatggctccctggggacctcacagaacatcgatagaagatcctagaagaaccacagcccctggcaggtacttttctttccatgggtttgaaggaggctccacagacagaggccagaggaggttgaggcttggaagccacagggccccgtggaa

SEQ ID NO: 82876 - DNA, 1042 bp, Homo sapiens
cctgctgcatagaggggttgctgccagctgcctctccctccttgtctcttacctgcctgctgcctgggacaggatgaagcggggcccttgtgttgccccaaccctggctgttggctaagagcccacgtgatctgcctgtgagaggagttccttccggaagaaccagggcagcttctgcccctagagggccaatgccctagctgagtgcagtcccccggccccagcctggtccagctttgggaagagggtgcccagttgtgcaatccaggccggggcagccgtgtcctgatcttggtattcagggctgagcctggagggggcttgtgatgcctgactctgtctctctctctggccccatgccttggtagctgtgaggcgtcactgctttgggtgacctgatctggctgtgatggatgagcacgggggaaatagtggaagactcggaattagaagacgtgagtgggctttggccccagcctccctaccccactccctgtcctgggctgcctgtgaccaaccttgtttctgcaggcacactggatagccctgctggagctcagtgtccctaatcccctccagatactggtggcctaggggaggtcatcaaagaccggtgggacatcgacctcagcccgtttccacgcttttttttgttttgttttgtttttttgagaccgagtttcactcttgttgcccaggctggagtgcaatggcgtgatcttggctcaccgcaacctccgcctcccgggttcaagcgattctcctgcctcagcctcccaagtagctgggattacaggcgtgtgccaccaggcttgactaattttctatttttagtagagacaaggtttctccatgttggtcaggctggtctcaaactcccgacttcaggtggtctgcctgcctcggcctcccaaagtgctgggattacaggagtgagccaccgtgccaggccttctccaggctcttggcaccttagccagaaacaatttaaggacaagtgcaaaagtcatgaatgtaggcagatttcctgcagagtaaaggg

SEQ ID NO: 82877 - DNA, 1068 bp, Homo sapiens
ggctgtggctcggttccggtggggcggaccccgacccggcaccgtcaggggcaccggctgggtggggagtccccgtgaagctgggggagggccccctcaggtccgaacaggtcggacggaaagggtccccgggcggccaccggagcactgaggggccgcgctcggctctcggggcctagtcagggctcgcagccccggccttcaggggaggcggggcgcatcccgccggcgccgtcggaacggggagttgggggggggcaaggagctgatcggggtccccggttccattaccacgaagggtctcgcggtccccggcttcagccaatggggagtctgctgcgggaaggggtccccggccgtagccaatggaggggggcgcgcggcccacagtttggccaatggggagggagggacttgggagcgggttgctgcctcccccttcccggtctggccagtaggaggggagcgaggtgggcggggggacggaaggagggatgactgggaggactgcgggccgggagcctctggcgcgcgcgcccccttcccgtacgtgcgcgtggatgctcggtctcatgacccgggcattcgcgcgccccgggaacacctagggcagggactagttcgtggaggggctcgtctggtggcagtgcatgagtagtggaggccctgctcagtttttcctgtgcgagtgtgtgtgtgttaatggaattaagagtggcagcacacgcaggcgcagtgggctctgatcgctggaggtgggggttcggaaagtcccgtgggttttagtgcgcaggcgcagaccgggcgaggcctcccggtggatggcttttgcggctgcgctgtcccccagccccgccagcggccccctcttcgccctcaaccgccggttacatcagccagcgacgagcagggttacctggcgattggtgatccccgcagagtgggtaacgggctgaatgagtcatgaggtcgaggggatggggtgtggaggggatacccctcctcccacagttttgaggcgtcaggctgctgaaaatgattgtcttttctgtttgggaggtaatgtac

SEQ ID NO: 82878 - DNA, 1821 bp, Homo sapiens
cttgaacagacttaagtaatttcttgttttcttttataggggacagagcacaggaaagggacccccacagtcacctgtgagtgtcttctcccaccctgtttaagatacatagacctaaaagatgcataatgtgggaatatagggcacattaggtctagatagagtctaatgtactcaggagggctgtgggcccggcacacacaaggcagaatgagtagagtgcggcgggcatttagaaaagaaaatgaggtgttgactgattactcctttaattctccctcttatgttaactgacaggtgtttgaaggcgtctacaacaattccagaatgctgcatttccttacagctgttgtggtaagttggtacttaacccccgggttgtttaaggaacgtaatgcatctactttctggagacactcttcttatttttcccactctgccagggctccacttgtgatgtaaaggtgaaaaatggtaccacttatgagggtatcttcaagacgctaagctcaaaggtcagtgtactcaaatttaattatttttggagttgcagagtaggaggagaatgaaataggctcattgaaggtgtcaattgggtgatgtcagagtatgcctttagttgtttctgtaggcctgtgctgaatagtgctgcagggaaaaaagacaaatttgagggctgggtactttaatgttaaaatatttaagtttaaatttttgtgagacttttgctaagtcctgtggctgatgttgagaaaacaatgcacttggttccaagcatgttgaggatgtagtgttgtgaaaagtttgggaagggtaagagaaatccagttctatttaagagaaatccagttctatttttgccttcacttttcttgaaactgacccatgggtgtggggaatggggtgtttgtagtttgaactagccgtggatgctgtgcaccggaaagcatctgagccagcaggtggccctcgtcgggaggacattgtggacaccatggtgtttaagccaagtgatgtcatgcttgttcacttccgaaatgttgacttcaactatgctactaaaggtattgtcctaggctgttacctcagacctgctctgtgtgcatagaggacagagggtagtttgtgtgcaggtggaacatggtgatgtgtttggtttgtttttttgtttttgtttgtttgttttgctttaatgccttttttttcctgagcgaagtgggtggatttttcttcttaaaaatatgtcttgatgtctaatatataatgcgatgaattcctgtctgtgttgtggttcttcatattttctttgcttggtttttaacttcttttttctttggaatcatagtactgatagactttttatactcttcttctcttgcctccccaccccctggccatcctaacacacgggcacacgtactctggacttcttaaactttgttcctgaactacttacggagagtggggttgggggatattggaaagaagtctgtgaaatatagcctgactcctgatcttcacctctgcccccacagacaagttcaccgattcagccattgccatgaactcgaaagtgaatggggaacacaaagagaaggtgcttcagcgctgggaggggggtgacagcaacagcgacgactatgacctcgagtctgacatggtatagcctccttccctgagaacttgggagctggacagacagaatgggttgttgacagtgaggttcatttgagtggggagggaaatatttactgttgcccattgatggtagtcagataacaaatagaaaggtatagaaaatagcaaagtaaaaatatctat

SEQ ID NO: 82879 - DNA, 1097 bp, Homo sapiens
cctccctccccagtccaatggatgggaccccaatgaaatgttcaagttcaatgaggagaactacggtgtgaagactacctatgatagcagtctttcttcttatacgtgagtatcttggtgctctccaggtgatgtgttggtgatatggggtcactaagtgaagacaggtttccaggtagaacatagtttttgctcatttttctctgggtgtccagggtcgccatccctactcctactctgccttgtggaattcttccctcaaaggttttaagcgtcttaagtgcttctcacattcccagataagccttggtgctctacctgggatgcagtcggtgcccgttacccagatgttgaagggattaaatacttccatgcctgaactggtgattggacttgttgaaatgtttttccttttttcctcttttgtcccctggcactgggatggtggtggtctgtgggtgctgtctcagggtgcccttagaaaaggacaactcagaagagtttcgtcagcgagagctgcgtgcggcccagttggctcgagagattgaatcaagcccccagtaccgcctacggatcgccatggagaacgacgatgggcgcactgaagaggagaagcacagtgcagtccagcggcagggctcagggcgggagagccccagcttggcatccaggtgactgttgcaaacagccaggactacttggggcttctgggaatatcctggggcctgggcccagagttgatgagtgctgtggtttaagccttgtgaccatgtaaaatgtcatacacaggtttaggaggttgaggtaaagcgagattatgtaatttgcctaaagtaacaaagctggagcttgtagatctaaaaaaaaaaaattcaaaatttatgtgctatttctttttataaaagtgaaatataactacattatttgtgtcttttaaaaactatccctggaactacggtgtgatcctacttttgtcataggtcaggagttgtagaattgtggagcactggccaggttggttggctcagagttgatgtcacatgaggtcataagtccgtagccacagaacgttaaactagggcagatcttcaagtggg

SEQ ID NO: 82880 - DNA, 4389 bp, Homo sapiens
ttgccacctcgtggccctcaccatctggacaacagcagccctggcccaggttctgaggcccgtggtatcaatggaggtgagttatgaggtgactttgaggaagagggcagggaaggggatgccaaggaggtgggagggtaattggaggggtttgggtgtgttggaatgacgctgcatcggtgggaatgtaataggtcgtctgcctcctgacattttcttctcaaaaaaaaaaaaaaaaaccaaacaggcccttcccgcatgtccccaaaggcacaacggcctctgagaggtgccaagactctgtcttcgcccagtaataggccttctggagaaacttctgttccacctcctcctgcaggtaaagctttagtagtgttggatgaagaaatggatggaaatttgtaaagagatgtaaatatgtccatttgttacagtgctggaatgggagataattttaagatagatgttttgggcatttgggatttagtcatattgggaaatagttcttcgatttccctagtgcagaaatctcaacctagcaatccatgggttgtgtctgcttggcagacatcttttgtttagatttgaatcagttgctaagttttgttttgttttgtttttttctttttttgaaacggagtcttgcactgttgcctgggccagagtacggtggcgccatctcagctcactgcagcctccacccctcagattcaagccattctcctgtctcagcctcccaagtagctgggattacaggcacccaccaccacggctggctaatttttttgtatttttagtagaagcggggttttattatgttggccaggctgatctcgaactcctgaccttgtgatcctcccaccttggtctcccaaagtgctgggattacaggcgtgagccaccacaccctgccagttgctaactttttaaaacaggccgaggtaggcagattgcttgagcccaggagtttaagaccagcctgggcaacacggcaaaacccttctgcaaaaaataaaaagattagctaggcttgatggcgtgcacctgtactcccagctacttgcgaggctgaggtggggggaatcgcttgagcccaggaggctgaggttgcagtgagatggcatcacaccattgcactccagtctggggaacagagcgataccctgtctctaaataaataaatcaatagaagccatagaaaatttttagtttcttttgaattacaggaaattctgtcaactgagcttgccttgctgcgtagcttgagttgactggaacagaatccctgccactcctttaagcattccagttgtcgatgatgcccatgaggccatttacctgcttgtgttacctgccttgagcttctagacatttaagttggtgactctggttgtatagtgtgtaaactttcttgctgttttgagtaaggcccttgtactcactgctgttgaccagcagtaaccatcctacagctcccccttttcttccagtgggccggatgtatcccccgcgttctcccaagtctgctgcccctgccccaatctcagcttcctgtccagagcctcccatcggctcggcagtgccaacctcttcagcctccatccctgtgacctcatcagtctcagatcctggagtgggctccatttctccagcttctccaaagatctccctggcccccacagatggtaagagctaggtgtttgagtgctgtgaatgcatatttagtgtgatttgtggttctggacagaaggacctttaggcatttctctttacttgaacagtaaaagaactctctaccaaggaacctgggagaactctggagccccaggagctggctcggatagctgggaaaggtgagggtggttttttttctgctgaggattaatgctcctttgtctgggggagagtatttcagttaggaagtttgttggaattcagaggcaaacaatgtctatcagtccttggattataatttcacttctgtgatcctcaagagtttctcttttttctttgctttcttgtcctctgttcttttggcactgtgtagccaccttagagaaagaatgttttgtattttcttctttttgactgttttctcatagtccctggtcttcagaatgaacagaaacgattccaactggaagaactgagaaagtttggggcccagtttaaggtgagagaagagtgagctgggatattagcagggtaaaggggttgggagtggttcgtagatgaggcaaaggactagataggagtcaaagagatgagatcaaaaaaggatgaaagaagaaagccaggactagggtctgggtcagactggactgtgtgtgtttctctcttccagcttcagcccagtagctcccctgagaacagcctggatccttttcctccccggatcttaaaggaggagcccaaaggaaaggagaaagaggttgatggtctgttgacttcagagcccatggggtctcccgtctcctccaagacagagtccgtatcggataaggaggacaaaccacccctggcaccatcaggaggcactgaggggccagagcagcccccaccaccttgtccaagccaaactggcagccccccggtgggcctcatcaagggagaagacaaagatgagggccctgttgctgagtgagtggagcggggtggggctctgggaggatggcaggagggatgagagcaagccgtgaagatttactgtactttctctcacagacaagtaaagaaatcaacgttgaaccctaatgctaaggagttcaatcctacaaagcctctgctgtctgtggtgagctgggacaggagaatgtggactttggtttctgtggggagacttgggcagtgcttatagatgaatagggggaggaacacttcacttccaggaccacttgcctggcaggcagtgtgaggagatgtcataaaaatgtaaggatggcacctttggggctggcttggggaaaatggactcaggtctctaggtttgggtgatcaggggatcagggatcccagtgagtctgatgaggggttaacaggcttttctttggttcttggcatttggctgagggagtattggagtggggtagtcatgaacagaggccagctgacttggcttgagcccctgtatttggaaggtttgtgatcttggacgtcacttacattctctgcctcacctgtaactttagaatactcatctcctcatagggtttaatgtgaggctttatcaagataagtgcagaatatgtttggtatgcagcatttcacgaatgttaattattaccactctaggcatggccaggagtagaggggaaaatacaaaataaaattgtcctcccttgtttttgcagaataaatccaccagtaccccaacttctccggggccccggactcattcaactccctccatcccggtgctgacagcaggccagagtgggctatacagcccccagtacatctcctacatacctcagatccacatgggaccagctgtgcaggtatgcagagagactggccgggcccagggttagcggggtgggatttggttgcgctggttgagggaccaggtcaggcctgtctgggcattcgtgagcgagtcattcagcctcatctgtgtcctcatccccaggcacctcagatgtatccatatcctgtatccaattcagtgcctgggcagcagggcaagtaccggggagcaaaaggtgagcagggctgggaggggcaggcggcgaggctgccaagggcctactggcaggtggagcttgagctctcctctcctcctcctcttccaggctcccttcctccgcagcgctcggaccaacaccagccagcctcagccccgccgatgatgcaggccgccgcggctgctggcccgcctctggtggctgccacgccctattcttcctacatcccctacaaccctcagcagttcccaggccagccagccatgatgcagcccatggcccactacccctcacaggtgactgcggcccaggagggcagtgaggatccagggcccctgctagggatcccatcttctccagagacttgggagctggctaggggtggcaggcagtgttgtaggtgggatcggccctctgtggtattggcggtgtcagacttgggcttgagccctggctctggtggtacctgtaacaaggcattggacatctgtatctctgaagtgtagagaaaatagtgtctgctgggtgggatcgttatgaatgttgaatcaatagggtgattgtgaggaggcccaagcggtgctgtgcacgcagtgactggcaggaggacaccttcccagctggcggctgtgccaaccactcctctctctgtcccgccagccggtgtttgcccccatgcttcagagcaacccacgcatgctgacgt

SEQ ID NO: 82881 - DNA, 2322 bp, Homo sapiens
cagccgcagtcccagcatgcggcccccagtcctgtccaggtgcctgccatggggggtgctgagtggtcctggtgcaggaatgggtggccagaagaagggatagagctaggggtcatttctgagtggcgaggactgggggccagcgagttgctggcctgtgtggcactcaaccttcccctccccagcagcatcaggcggggcaggccccacacttgggcagtggacagccacagcagaatctgtaccacccaggggccctgacaggcacgccgccctctctgccaccgggaccttctgcccagtcccctcagagcagcttcccccagccagccgctgtgtatgccatccaccaccagcagctgccccacggcttcaccaacatggcccatgttacccaggtaagagcccagctgtcccacttctgggtctgtttgccagggcccgtctgccatggggaccatcccattgccaagtccctggtgccacccttgccatagtgctccctaactctggctctcagagtctgtttcaggattctgtggtcttcccggctacttttttgttttccacaggcccatgtccaaactggaatcacagcagccccgccccctcaccctggggctccccacccgccccaggtgatgctgctgcacccaccccagagtcatggggggcccccccaaggcgcggtgccccagagtggggtgcctgcactctcagcttccacaccctcaccctacccctacatcggacacccccaaggtgagcagcctggccaggcgcctggatttccaggaggagccgatgacaggattcgtgagttctcattagctgggggaatttggcatggaagagctgaggggctgcaggtggggcaggatgcacgggttctgggtggggagtgaggggtcttggaggcagggctgtcccacagggcgcccgccgacctgcacctgtctgtgaagtatgtagggtgggcagaagccacagtcgccgccgccaggggcttgctcctggctctgtcctttgcttccctccgtcctcgctcagttgtgatccagcagcccccctccccactgcctccccagctctcagtgaccccgactgtctcctgacttagccgaggtaaggtcagtgcagcagacagggccagactggggtgtggggggctgagctgggcacatgagtgagggctctggcttactgggaaacagcgattgacctgtgcttctgacagcccccgagacaccttgaggaggccgctccttcccagacacacccccacgcccccactggacggcattggaggaagggacagctgcttgggttctaatgctcctgctctcttctctttcccctccaaccagttcaatctcatccctcccagcagctccccttccaccccccggggaactgaagattgtcctggccgcgacctgagacctccatgagtggagggaagagtgatctatgtctcttcccccagcagctcggaccactcccagccccccatccccccgttccccaggggagctggggaattcctgccaagcaccttgaatgggaggggcctcacagagggcagggccagggtccagcaggggtggggggttcctgctctgcccctgcccgtccccacccagtcttgccctcccatcctctcatctattcccccgctggagacggaagatcttttattttctattatttataacttcagacttgggccccctgttctttctttcccattaacttgagtgacctgtgtgagagacagacagatgccccacgaggatggctggacaaggacttttactttttattacataaaaatattaaaaaataaataaaaaaaataaaattttaaactaacttaacctgcctggagtttcctccttggagactagagtggggtgacagctgtcagtcttttgtggcattgataggtgctgcattgtgacctgttccttcacctccatgtaaaaatcgtgtccagtggccagccatggtggctcacgcctgtaatcccagcactttgggaggctgaggtgggcagatcaccaggtcaagagatggagaccatcctggccaacttggtgaaaccccatctgtactaaaaatacaaaaattagccagatgtggtgggacatgcctgtaattccagctacttgggaggctgaggcaggagaatcacttgaactcgggtgaaaccctgtctctactaaaaatacaaaaattagcctggcgtggtgggacatgcctgtaatcccagctacctgggaggctgaggcaggagaatcacttaaacccaggaagcggagg

SEQ ID NO: 82882 - DNA, 1294 bp, Homo sapiens
gacactggagacagggccagaagctgcctcttgtcaggataaatgttaggcttgtggggaggagattaagatattcagtgtttgggtatgagatggcaggtttgtggtcttggccacgcagaatgggtggtgaggagatggtagagaaaggtgggcctgagtttctaactgctacacttggctatatggatgtgaactgaagagctcgttgaacttggctgtttcctttccttctcctctccagaatatgatcacaggcactgcacccctcgacggctgcatcctggtggtagcagccaatgacggccccatgccccagacccgagagcacttattactggccagacaggtactcagagcctgggtaaggatgcaaaagggaagagtggggagttgggcccctctgtatattgtccctgtctctctggcatctacagattggggtggagcatgtggtggtgtatgtgaacaaggctgacgctgtccaggactctgagatggtggaactggtggaactggagatccgggagctgctcaccgagtttggctataaaggggaggagaccccagtcatcgtaggctctgctctctgtgcccttgaggtgaacgcggggtcaggcagggcagctgctgcagagggtggggctggatgggcacccagagctctgctttgtgtctgggaagtggctcttgataatcgagggaagtagaatggggatttcagagtcctggcacttcccctcaacagggtcgggaccctgagttaggcctgaagtctgtgcagaagctactggatgctgtggacacttacatcccagtgcccgcccgggacctggagaagcctttcctgctgcctgtggaggcggtgtactccgtccctggtgaggactctgtctgttcccacgcactctctctagcagaagcctagctcggggtccctgatatcctgtcttattccctcccaggccgtggcaccgtggtgacaggtacactagagcgtggcattttaaagaagggagacgagtgtgagctcctaggacatagcaagaacatccgcactgtggtgacaggtttgggaagccagtctggagagcagggcctggctgaagggtggccttaccccggcagatcccttgtgccttccctctgtctcacattcgccttccttctccctgctccttttccctttccgtcctaggcattgagatgttccacaagagcctggagagggccgaggccggagataacctcggggccctggtccgaggcttgaagcgggaggacttgcggcggg

SEQ ID NO: 82883 - DNA, 1333 bp, Homo sapiens
tctgccgggcccaggaggaggttcctgagcagtcggagccgcagctgcctcccggagcccgagcccctccctccgggtccggcctagcccgcctgactcccactctgatcacctccacagcccgccgacctgagaactactacgcccatgagccttcgcggcgccggtgatttaggggacgctcctcagtgccccctgcgaccgccagagagaactacgttgcccctcagcccgagaggcgcgagtggtggaaaacctctccatcatactccgccctcgagacaccagccccctccatgacgtcttcagccgcgcgcccgacgtcggctgagacggccatagacactggcggctagaggggcccggacttgccctcccagctctaacttccgccggaagtgccttccagccgcaggcgcccttcttcttctgtgcgctcgggctcctggtcccggctccccggttaccggggcgcgagtatgaccacaatggcggccgccaccctgctgcgcgcgacgccccacttcagcggtgagtggtcagggagggcgatggcggcccaggaacactttgggggagtggtaggtggctgggttcggtctgaccccttccctgcctgactccaagcttcggtcccggcaggtctcgccgccggccggaccttcctgctgcagggtctgttgcggctgctgaaagccccggcattgcctctcttgtgccgcggcctggccgtggaggccaagaagacttacgtgcgcgacaagccacatgtgaatgtgggtaccatcggccatgtggaccacgggaagaccacgctgactgcagccatcacgaagagtgagtggggttggggcgtccagcagcgccctatctactgatgggacctggagccagggaggcaaggccagcagagtgtctgctggaggagtttactgtggccccaagagcccgaatttgtgcgacaggtggattgggagatgcaagagacaaatttctcctgaacaggaagaactttgtgatccaccaatggcttggggatcacaaagtcgtggggaatgctctgcaagcagaggctgtaccctaaagaagtcacagggcagacccttaaggccctctaacatttctttctgacccacagttctctctgctggaagagttagagattggaggaggttatgtatttaggtgggagggttcaggggcgtggtctaagctctgcctctagcactggaactttagctgagaggtgtgttcttttcctcctttagttctagctgagggaggtggggctaagttcaagaagtacgaggagattgacaatgccccggaggag

SEQ ID NO: 82884 - DNA, 2249 bp, Homo sapiens
gacgtggaatttgttcaagataacatcgctcataaggtggctggactgggtgctcataaggtggtttgagccctggtctgactcaagtccatggccttaaccagaaggctaacctgcctttagggcatactccccagtgggagaagaggaaggtgaaaaatcctagggccccagctctccctgtgatgttttgtttacgtgaggccagcaaagacttgacctgagccaacccagtttctcctctggggcccctgcggcctctggccccagactgaagggataccaaagaagtgggctgtagctatttcacatctccttcacgcagtgcgtgggtgctggactctggggtcagctttcaagacaattactgttttggtccatcatgcatccatcctcattaatgaatcggccccctccaaagagttggaccctaagatgcgtgaggcaggctctctaaggtctagaatcccagctcctctctagccccctgcgagctggggcggtgaggtgctatggctgaggctggcccagccgggccctggggacagggactatgaagtggggaaaacagtagacttggagttctgaaacttttctgagcttcggtttcctcatctgttcgagaggtctttgaaacctctcagggaaaggtaagataaccaagtgggagcctctagaatggctcatgggaagtgtgacatgaatattggaggatccgatgtagagggggggtgatctggaaaagttcccttttttagggggaaggtgctccaaagccctctactgctggatccaaagctaaggaaagtgggggcaaatgtggcaggctcggggcaggttagacgctggggagccagttggctggggcctgcagggtgccaggatctgggagagggaagggaggtgttgggctcccttccccattgctctctgcggagtctgaagtagggtcggacgtctctggctgggggtgggatgcagcctccggtgcgccctcagcagtgaccctcgtgtgtgcctctctcttcctttcgcagctgctgccgcccacccctcgtcttctggctgcctccctctttgtgccccacaggctccccctctccacctcctggggcccatcatgaatggtgccccttccccagaggacggggcctccccctcgtctcccccgctgcccccacccccgccccctagttggcgggagttctgtgagtcccacgcccgggctgcggctctggactttgcccgccgttttcgcctctacctggcctcccacccccaatatgcggggcccggggccgaggctgccttctcccgccgttttgctgagctcttcctgcagcactttgaagccgaggtggcccgggcctctggctccctgtcgccacccatcctggctcccctgagccctggtgcggagatttcgccacatgacctgtcccttgagagctgcagggtgggtgggcccctggctgtgctgggcccttctcgatcatctgaggacctggccggccccctcccttcctcagtctcttcctcctctacaacctcctccaagccgaagctcaagaagcgcttttccctgcgttcagtgggtcgctctgtccgaggctcagtccgtggcatcctgcagtggcgggggaccgttgaccctccctcctccgctgggcccctggagacctcgtcaggccccccagtcttaggtggaaacagcaactccaactcctctggcggggctgggaccgttggtaggggactggtcagtgatggaacgtcccctggggaaagatggactcaccgttttgagaggctgagactcagtcggggagggggcgccttgaaggatggagcagggatggtgcagagggaagagctgctgagtttcatgggggctgaggaggcagcccctgacccagccggagtgggccggggaggaggggtggctgggcctccttcagggggaggagggcagcctcagtggcagaagtgtcgcctgctgcttcgaagtgaaggagaaggaggaggaggaagtcgcctggagttctttgtaccacccaaggtgaggccccttggagggtgggtgactgagagcaagtgagagagtgctcagagtggtcacagccctgcagataagctctggggtttaccagcccatggccctggtgtcgctcactttttgttggtaaagctggctcttggctctgtgttagcagctgcgggcaggactgagaaagcagtgtgactgcctt

SEQ ID NO: 82885 - DNA, 1042 bp, Homo sapiens
cctccgcctcccgggttcaagcgattctcctgtctcagcctctcgagtagctgggactacaggcgcctgccaccacgcctggctaatttttgtttttagtagagacagggtttcaccacattggtcatgttggtctcgaactcttgaccttgtgatccaccctccttggcctctcaaagtgctgggattacaggtgtgagccatcgtacccggcctcgccttattttatttttcaatttttttagagacaggttctcactatgttgcccagactggtccaactcctgggctcaagtgatcctccagaggtgctgggattacaggtgtgagcctctgtacccggcctccagagagaattcgaatgcatcttgtttgtagacagcctgcatacattgttctcattaggcatggattaagcctcctccctgcccctgccccagctgaggcgtcgtctcatctctgtaggtggaaggtccatccgagtatatcatggagacagtggatgcccagcatgtgaaggcctgggtgtctgacatccaagaatgcctgagcccagggtgagaagcctgacttctgtcgctaagggacatagagtggggttggggagcagccttgcgcctctcacctggtgactttcctcccagcaccatcttccctgtctctgcagaccctgccctgctaccagtccccgccccatgaccctccctctggcccctgggacctcattccttacaagggagaacacagacagcctggagctgtcctgcctgaatcactcggagagtctacccagccaggacctgctgcttggacccagcgagagcaatgaccgcctgtcgcagggtaagggtggagccttagagagctcggagcctcggaacctgccatgcggggcccctgctgtcaggcgccatgccctctccagacgccactgtgcccccatccctgttttccagatgccctaccccaaccccaccaaatgttggtctttgatccctgaacacagccacagtttgctgtttagaataatcatgaccccacg

SEQ ID NO: 82886 - DNA, 1031 bp, Homo sapiens
atcatggaatcttagatctagagtggaccttgcatctcatcagatcttagtagctaagaccagggagaggacacctgagggtcactgaggaagacaggggctgcgccaccctgtttcccaagccatgctgtctgtgcaccacacgcctgtcttctgagcactgcctgcctatgacatttgtgtaggcagtggcctgctgttggacagacttggaggatggccctagtgcatacctggccctgctctgtgtcccgggccaggatggggtagctaggatgcctgagatgagctccttgttctctagaggctttcagctgggttgacatcactccctatagaaagcttagtgtcccctgagcagcacaagcaggaatcacgttgggagctcaggaggaagagagcaggggaaggtgggagagacagggactgcgacgccgaggagaggagaggacatgcctggggacgtgaagggcaagagcagagacctgcggggagggcccaggatatggggacaaattggatgggaaattgggttaaagtggaagagacatgaatacaaggtaaggtaaagctcaagttggtgtgggttgggggagtaatagaaggagcatctttgatgcctcttaagagttaggggctttgtcctatagttcaacaaaggacacctttttttttttgtttgtgtgtttaatttttttatttttaaaaaattattgtttgtgtttttgtttttgagatagggtcttgttatgtctcccaggctggagtgcagtggtgcagtcacagcttcctgcagccttgacctccctggctcaagccatcttcctgcgtcagcggcttaaggtgctgggaccacaggcgtgtgccaccaccacacctagctaattttttattttttgtaagagatggggtctcaccatgttgcccaagttggtcttgaactcctgggctcaagtcattctcacacctcagcctcccaaaaggctgggattacaggcgtgagccactgtgtgcagccagaattccgtgtg

SEQ ID NO: 82887 - DNA, 1012 bp, Homo sapiens
ctggtccccgtggttgagctggtccccgtggttgaattggaagaggccatagccccaggctcagaggcccagggcgctgggtctggtggggacgcgggggtgcccccaatggtgcagctgcagcagtcaccactagggggtgatggagaggaagggggccaccccagggccattaacaaccagtactccttcgtgtgagccaaccccacccgctccaccctttttaaaccccccagccctgctcgtgagattgggctgggtagggacagaggaggccgaaatccctcccccatgcttcctgacccttgttggccaagggcatctttgatggtacaagcagaggctcgggagaggctcccgtcacacactacaggtcccctccccagggcaggggatttgggctccatgagctccttgaggggctcttctggtcagccccaccctgggggccatttccccattaactacccccagcccgaggcagggtgagggggaagggctgtcagttacattaaggtggttgttgttgttgttttaaacaaaatggagaagcataaataaataaaaaggtttatctcggttctatcgtgatggctatggccattgtttgctgtggggactggggacagttgggttgggaaggcagcccactcagtgcccacaggccagagggctggcccaggccagtccccatcattctgcagtgctgtgctttcggagccatccctgtgtctgacagccttgttcgtggagcactaaatgatgctcttggggtctcctgcgagtttttgtcatgggacagtgctgtgaatggcaggcatggtgatctccagcggcccttcctgagttatggctttgtaccctagagagagctggcagtgagagatgggaggcacggtggctgtgctggaagagattgaacgtggcagtcacagggtagccgcagaggggcccaatggcccccttctcaaagccaggctggagggatggcagagggcactagcttctgtcc

SEQ ID NO: 82888 - DNA, 1060 bp, Homo sapiens
gctgccatccccctccccaaaagtgggggcctcccttttctttgctctgctgtctcctattctgtcctctgcttcggagtttgagccccagaatggaaagcagccttaagaagccacacttaggaagtccacatgcctctgctcatttcaggaaacaggcctagacagaggacggacttgagcccagggcaccaggccccttcccctcactgacctttcaccctgactctcatccagcctttctgcctgcctgtcctccccttcctgcacccctggtaccctccctcggctcctccagcagctgccctggtggtaaccaagagacgcccccatcctggagcaggggtggggaggggcagctcagagcagctgcttctctgaggaagctgacaccaaggccagcattcagcaacaacttgtggctttgcacccagcgccggggtccccgcccacctggctccctgctgtccctcttccccactgctgctcggacttccctctgaccctggtggctctgtgtctctgctccctttccccctaggtctagacatctgtccttatttcccccagacctgtccccagaagtccacccttccccattcctttggtctggagcccctgcttggtccagcttccccaggccccgacacctttctgtggggtctgcctagctcctgcacgcacacagcatgggcctgatcctgttcccctcgtggacagatgcagcagggcagagtgcagcgcagaccacaggcctctggggctggccacagaaaccccgttggttagagcacagtgtgggatgaggtgaccctcagtgcacgacttggggtgacccctgcccccatcctgagacagttacccctccccctctgccatcagcacattctgtagcctcttgggttacttggctgccttggtgtcccattttcttgggggtggggtggggattccctatccaggatgggggggccctcagggctctgttcccagaggctgagttagagcgatggggaagggggggggcagttttggggagagacaggcagtgctggctttg

SEQ ID NO: 82889 - DNA, 1048 bp, Homo sapiens
gccgttgccactgctgctgctgcgcttccagtcagggtgggccgctggcctcccactgggcgtcagtttggctcccaggccctgggcagtgccagcctctgggcccgtctgctgcgctgcgttgcgctggctgtgtgctgggctgtctttgctgtggggctgcagtgggggggggcggggtgtctggggacgcaggtgagtaggggagaaactggcagggtggtaagcttctgagcctccaggtaagtgcgtgcctgggagatgcacctgggagggacctcgctgccctcctgccgcctgcctcatcccttctctttccccttccagatccagaagatgaaagaaggaagtgagcatccttttgctctgtcctccccaccccgatagtgacacatcttcaggcagagctgtggcacagacccccgtcctgtcccccacacccgtgtcatgtgtctgtttataaacatgtccccttccctttccttccccctcggccacccgcctccctctcaaccttgtaaattccccttcccaaccccgaggggcttgcagggacaaggcgaccgactgcgctgagctgcttatttattgaaaataaacgacggaaaagtctggccttgcctctgtgcaagcttggaggcctgggtcgccgctgtggacaagcgtcttagtgtcatgcagaccagaaggcagctgcctgtcccagggccggggcccacctcactgcctctgatggggactcccagcccccatggctccgctgtgccctgggcaggggacgggctgggggcaggggagggctggagcccaggaggcagcacagcagccagaaagccgcaggcctgagcctgcacctttggttccgggaggggcttgggcccctcacccaggtgtgatccctgagaacaggaggcccagccaccctgggaggaggcgctggagggcggggcggtggtggcccccgtcagtcccctcaaccccagtctcagggacggtggaaaagccatccaagaccccagagcgaggcctcatggttcaggagtgggga

SEQ ID NO: 82890 - DNA, 1027 bp, Homo sapiens
ctgggattcctgagattttggagagggactgggaggacctggggccgttggattttgaggttggggtccatggcaaatgaagccagggagctgcagtattgggggttggggtccatgcgggttcagagaggactgggcggctccagaggctggggtcccccgatggtcgtgtgagcaatgggctgagagtccctaagagtcaggggtagaggggcggctagtaacctagttaaaaagggcaaggaagcatacatttcagagtgtcttaggcagatggaggaaagggtgaagggtacttccattctgaatcctggggaagctggacttctaggttgccaggagagggccaaggtgtccacgatcttagggaggatttgggagctgggtgtcagggaagaattacccccaattttttctttcggtaggggaaggacttgggcctgacccctctcccttctttgtctttgcaggttaaaagcagccttcgccttatcccagatgatctatccctcctgaaactctaccctccaggggatgaggaaggtaagggagggcctccagggagaggcacgcagccgctggcttctcttaagagaattcctggggtttatattcctgcagtcagttgtctcctgaggctcaagggaagagcgtgggagaggggactcctgcatcccagccacaggagctggattgttaacaagcatagaatgtattaatgtatacatttctggtgccacctgaagagatgctgattctgtagtcctgggcggggcaggaggcggtaaggtgttgagaatctgtgacatcttgttacatctgcagcaagttctttgggaacactggagccagcagggtgttctctgaatcttatcagggatgccctgtctttgtcctcccccactgatgcattttttgcaaacaactcaagggcggggaataggaatctagtctaataaggaaataatccagtgggcaaatggagaccttggaccaagactcttgtaccatgagggagtacagtggg

SEQ ID NO: 82891 - DNA, 1100 bp, Homo sapiens
tggctggtcttgaactcctgacctcaggtgatccgcccatcttagcttcccaaattgctgggattacaggcgtgagccactgtgcccggcctcagctctatctcttaatagctgtgtgatcttaggcgagtttcttttttcttgttttgagacagagtctcactctgtcacccagggtggagtgtagtggcgcaatcttagctcactgcaacctccatctcccaggttgaagccattctcctgcctcagcctcccgagtagcagggattacaggcgcccgccaccatgtctggcttttttgtatttttagtagagatggggtttcatcatgttggccaggctgatctcgaactcctgaccttaggtgatctgtctgccttggtcacccaaagtgctgggattacaggcgtgagccaccacgcccagcctgggcaagtttcttaatttctcagtgcttcaatttcctcattatcaaagtggggataatagtagaccccattttggtgctgattttggtgagaattaacgaaagggaatatagagagagctgcctcttggctagatatatgctttaggacagtacctaggacacagaagtgctacgtaaaaggtacctctatccctgatactcaaaacgtgggcccagccatatatggcatccgttggaagcttgctagaaatgcaggatcggctgggcacaatggctcaaagtgctgtaatcccagcactttgggaggctgagatgggaggattgcttgagcccaggagttcgagaccagcctgcgcaacatgatgagaccctgtttctacagaaaaataaaaaattaaccaggcatggtgatgtgtacttgtagtcctagctactcaggaggctgaggtgggagaaacacctgagcccaggaagtcgaggctgcagtgagccatgatcatgccactgcactccaacctgggtgacacagtaggacctggtctcaaaaaaaaaaaaagaaaaacgaaatgcagaatcataggcctcttgcagctgccatagttagttaggacaggatttcatgacttcagcattactggcattttttggactggaaaattctttggtgttg

SEQ ID NO: 82892 - DNA, 1028 bp, Homo sapiens
ccccaccttcaccaaggaccaaaagcagaacgcatactcgggcactcaagaagttaaggtgccaagtgcaggggctctggctgggatggaagagggcaatccgggagggtggctgactccagttgacccagagtcctgtctgcactgcagtgaggtgaacaagcgcctccaggatctccgttcctgtctgagccccaagccacctcagggtcaagagcaacagggccaagaggatgaagtggtcttggtggaagggcccaccctcccagagaccccccgactcttcccactcaaaatccgttgccgggctgacctggtcagattgcccctcaggatggtgagtgcctgaggcccatgggagaaggacccaggagctgcttctggagagatggtggtgtccagcaggggtgtcctggcagaagggactgtcatccttttcccatcctgctctctagagctgcccatcattcttttcagtctgtcctgccttcacactttttgtttcctctgtctgcattttcccaacgctcccctctctttctggcaaactttctacccattcttcaaggctcctcataagcatcctgtgtctttttttttccttcaaaaagtggtcttactgtgtccaggctggttccgaactcctgggctcaagtgatcgtccctcattgacctcccaaagtgctgggattccaggtgtgaagcatcctgtcttctaagaagctttttttggtagtctctcttgccttcctccctaggaacctgggcttccctcctgggcttgctctcactgccctggacacagcagatgtcactcagtcaccctgaactccaccagcttcctggcgaagcctgatatttttgtagggatgaccctgtttcaacaccaggaatgataacagacattaccattactgatgcacagtgcatcagtcaagcaactaaggcagaggctgcaaactggcagcccatggcttttccaacagtgtgtctgctttctttgtagacttattttattttattttatt

SEQ ID NO: 82893 - DNA, 2731 bp, Homo sapiens
tgtttctgtgtctgttccataagcataccagtcccaggctgggtgcgggggctcacgcctgtcatcccagcactttgggaggccaaagtgggtggcttatctgaactcaggaagtttgagaccagcttgggcaacagagaaactgtctctaccaaaaatacaaaaacttagctgggtgtggtggcctgtgcctgtagttgcagctactcaggaggctgaggcaggagaattgcttgaacccaggaggcagaggttgcagtgagttgtctaccagtcccacggcattagcactcgtcccaatccagtacaacctcaacttgattgcatctgcaaaggccccgtctccaaatcacatcacattcacacttaacaggggttaagaccacaaggtgtcttctctggggaacataacctgtaacatttttctaaggtcacatatctaataggtgggagagcctggcctccagctcgactcatcctcactctagaatctgggctctcttagtcattggtacacacttctgtttcatagggaaggaggctgaggctaggaggacttgcctgacttagagcctatacccctaagccttgggctcgtggcccccgtcctctacctgagcaacttggagcccagagggatgacaggattcgtcccagctcccagagaggagcctggctgggctggcttctttgtcctctctcctttccccgcatggggccctgactttattgtttccgcccctgccgccatcctccctgtcccaagttcctcgtctatccctacgggatccccgccccctttcatgttctgacgtccattttcttttgtctccatccaggattcccctctaaagaccctcatgtcccactatgaggaggccatgggactgtcgggacggaagctctccttcttctttgatgggacaaagctttcaggcagggagctgccagctgacctgggcatggaatctggggacctcattgaggtctggggctgacaccccactccctgtttgacggcccagcctggacttggggagaatgactttcccttttttgccccataagggctagcataagctgaggtagaacttatctttaagctgcagcaaaatcaaggagtgacttttgtcccctctcctgttgaccctggtttagagccgttaaccacttggtgagttatgtgggtgttgttgccctgggtggcctgtggctccgtccacaagtcatgctgagttttgcagcctctgtgacttggagatgtcccttcacccctcccctttcaccaccatcctcttttcctcatggaaatgtctgctttatgaaactatgcacatattgaaagtgagttgaaacaaatgagggttgggtaggagcttccaggcctgggatttacaccacgcctagcccagcagaggccttagtcccatttggggcttgggagtgacatttgcttgaggcttatacactggtgtggttgcctggcttgcaggaaatgaccaagctcacacatgctggctgaagcgtaagcagacaactgaggtactcttttgaaggatgaaggtggtggattctcagccctgggggtcttcctcacctgaggacccttcagagccaccctttctagtttgcatttcctggtgcacacatttaaggcataacagcacattcatccctttggtttgggatctcaggaatacagtcccatgcaaagattctctggttttatggcttttttccctttctttacaccatcctctcccataagcacccatgtctttgaatatgaatgtatttgtaaaataccacgtttcatgtgtgaatatgtgcttttactgtacatagtgctattgtgcaataggtcttatgctgttttcactcaatgtgtgctaagatctagccccattgactcttctagaaatgcagtattgctttgacctgccatgtggcactccacaatgtcaattgcagtttacacacattgcctaaagtgggggacacctgggtgcccctgaccccttggcaccggatacaggccacgataaacatcctttcgtgtgttcccttctgtgcttgtgtggcatgtgtacccaggatgggcctataggtcacagaggtcagtttctctttggttttccagattttctttagaacggtgactgaccctcctacttgaggccgcccttttctccttatccttgccagcacttgtattgccagactacctaatttttgccagtctcatgggtagatagtggtgcagtgctttaacatacattcatctgatcagcattaatttggggaattttttcacttagcctttctggtttcccttcctgtgcattgcccattttctcatggagtttcttatcttttttggtttattctcaggagttgcttgtacattcttgggcaattgcagataattccaagaatgcatatttgggctgggtatggaggttcactggtaatcccagcactttgggaggcccaggcagaaggatcgctgcagcccaggagttcgagactagcctgggcaacatagcgagacctcgtctctacaaaaaaaaattaaaaagggggctttgggaggccaaggcgggcagatcatgagggcaggagattgagaccctcctggccaacatggtgaaaccccgtctctactaaaatacaaaaaattagctgggcatggtggcgcacacctgtagtcccagctactctggaggctgag

SEQ ID NO: 82894 - DNA, 1146 bp, Homo sapiens
gcaaggctccactcaaaaaaaagatttaaaggggaaaaaattgaaattttctttgtatctaggggtatccgtcactgaacagaaattcttaattttggctaggcgtgatggctcaggtctgtaatcccagcactttcggtggccggggtgggtggatcacttgaggccaggagttcaagaccaccctgaccaacttggtgaaatcccatctctactaaaaatacaaaaattagctgggtgcagtggcgcatgcttgtaatcccagctactcaggaggcagaggcaggagaatcacttgaacccgggaggtggaggctgcagtgaacagagacagtgccactgcacatcagcctgagtgacagagagactttgtctcaaaaaaaaaagaaaattttaattttaatgtagacagtatgaattatcttgttctgcagttggttgctttttgattgcttatttaatagagttgttaagatattttacatcttctcctgttagctgttcagcttttcctttcatattgagaacactacacagtgctgaagtccagctggtacacaccggggtgacaccttggctgcatctgttctcaacagtcagacacttcttctaattggttgatgctgggctgtactggttgctaaatattgcacatcattttaaaactatttgagatgcacttttgtactcaggaggccaaggcaggaggattgcttgagcccaggagtttgagaccagcctgggcaacacagcgagaccttgtctcttaaaaaaaaaaaaaaaaaaaaatgagagaaatcggctgggcatggtttctcatgcctgtaatcccagaactttgggaggctgaggcaggtggatcaccggaggttaggaattcaagactgaaaccttgtctctactgaaaatacaaaaaaaaaaaaaaaaaaaaatgagctaggtgtggtggcaggcgcctgtaatcccagttacttcgggaggctgaggcaggagaatcgcttgaacccaggaggcagaggttgcagtgagccaagatcgcgccattgcactccagcctgggcgacaagagtggaaactctgtctcaaaaaaaaaaaaaaaaattcagtgaaatacacctttatatatgagatccaagtttcactttt

SEQ ID NO: 82895 - DNA, 1107 bp, Homo sapiens
ccacaccccctccctgtcagtctctgctgctgctccttggagctatggcagactgggcctcagggactcctgcagtttccctggtccatgccattttatacccctccttgcctgagttaacctgccccaccccatcctccccttttcttccagagcattctctgtccattatcccctcttcccctgaccactgactccttctactccatacctaaacactccaaaccctacctggcctgccctctctccctcctctcattcctgatcagacttcctgaagggcccctagagcgtggtgccagtgtgggtaaaagagcagccggggagatgccatcactctgcctgcacttcctcacgcctgctcacccctcgagcgctgccactgacttctgctcccaccactccacggaccctgctcttgccaaagttaacagtggcctcctagttgctaaacacagctccaacttcctggtcctgttcatgctaggagcctctggcactgttgacccactcttccttcctgaaactctctcctacctttgcgatgccacactcttctggctttcctcctgcctccctggctgttgcttctttgttcctttgaagcctcctctgtctgttctcactccaccccagaactctgtcctcagccccaggacctacgtactttccttgggtgactgtacccgtccttagcttcaggtgcctttggtagacacataaactcccatctaaggtcacttattcattaaaaaaaaaaaattaaaaaactttcccctaccaggcaagcaggggttgtcttatttagaccttttattgtctagtccttgcaatagctctgtgaaaagttgttgttatcctccttttgcagatgaggaaactgaggctcagagaggttaagttattttccccaaatcgcagctagtaagtggtggagccaggatgcaagctcaggtctgtgtgattctaaaacccaggcatctcccgccatccctgctgcctcttgggagcgggctggtgaggtagcccggaggctggttgcaggctggggtgccacctctccccggtctctctccccagcatttctggctgctcctcctgacccgg

SEQ ID NO: 82896 - DNA, 2624 bp, Homo sapiens
ggtcgatactgtccccttgtggcagctgcttgaattacaggcccagatcctgggagccagaaccacctctgcacggtgttgtgaccttactaaaataagccaggaagggagaagagaggtcccctcctgcctcgacacctccgtggggtcttactctctccctcccaactatctgcagtcctagtttcgtcctgtcttccctgggcttcactgctgtggcctttgtcacgggctccctggctctgtgggctccggcattcctgctgcgttcccgcgtggtccttggggagaccccaccctgccttcccggagactcctgctcttcctctgacaggtgcccagatggggctatgctggggggcctgcgggtggcagggctggagtgaagagcatctgtggctcagacccaggcagggagtttgactcctgacttcacaagctgcctgctctcctggaatctccgtttcctggtctgggaaataagtgatgggatgatgtctgccactcagggctgtgccaaccatggggtgctgtgtctgtagggaccttggttgtgagggtggctaggatggacagcgtaggggccttggcaggcacagggacaaaccccccattcccttccctcacccctagtctcatctttggactcatcacctgcctgaccggagtcctgggtgtgggcctgggtgtggagatcagccgccggctccgccactccaacccccgggctgatcccctggtctgtgccactggcctcctgggctctgcacccttcctcttcctgtcccttgcctgcgcccgtggtagcatcgtggccacttatgtgagtagccagcaggtgtcaagggggatggcgtgggtccagggtggaggagcagtcagcgtaatggccactcgaggtggaatgcctggttttgaatcacagctctggctcttcccagctgtgtgacattggacaagtgacttaacctctctgtgctcagtttcatcatgtgtaaaatggggatattagtagcacctgtctcactggggtgtgatgaggattaaattagttaatagatgagctgggaacatggtcaactttccatgtgttagcccttactgtcatgaacccccgaccctctcttcccccagattttcatcttcattggagagaccctcctgtccatgaactgggccatcgtggccgacattctgctggtgagttgctgggcagctccagggtcagcgcagaggctgatgagagcagagttggggtcaggagtgttgcctctacccctcaaagcccagcctcaacctaccttctgcaataaataacatctgtagcagacccccggcctgccctgcgacctcaaccccaggcacacctctgaccccggcctaggcggatccttggtggtctcctggccccctgcctcctgccccctggagcccagagcatccactgagctccaccaactcctccacagtacgtggtgatccctacccgacgctccaccgccgaggccttccagatcgtgctgtcccacctgctgggtgatgctgggagcccctacctcattggcctggtgagcattatttcttggctggcatggggtggctggtgtcctgagcctgggctggatcagaaggcctggccctagtgaagtgtctgtgtcctgcgtgctgggcacttctcaccttccattgtcaactggaggagaaagattttgtctttgaatatttctaccagtaaggccagggacctcaccctggtggtccaaactcctcctttcttttctcttttcttttcttcctgagacaagacctcactctgttgcccaggctgcagtgtagtggcacgatcatggctcactgcagcctcgacctcctgggctcaagcgatcctcccacctcagcctcctgagtagctgggatgataggcatgagccactgcatctagctcaaacctccttccctttcctgggctccacttgtctttctccctggagctcaggggcgtgccctccctggttcatccatgaggctgactcccctggctttcctgtctcctctccctgcagatctctgaccgcctgcgccggaactggcccccctccttcttgtccgagttccgggctctgcagttctcgctcatgctctgcgcgtttgttggggcactgggcggcgcagccttcctgggcaccgccatcttcattgaggccgaccgccggcgggcacagctgcacgtgcagggtcagttaggagctgtgcccggcccagcttcttgatctgcctgtctgtctgtccatctgtctgcccactcctgtgcacctggcagctcagtccacagccctccccttgtttggcctccagtctgtctgcatccacccctggggtggctctgtggctgccccatccatttcccgctgcctgtttgcccttctctggctttgtctgtctgtccatccagctcaccctggctctgaccctcccccctcaggcctgctgcacgaagcagggtccacagacgaccggattgtggtgccccagcggggccgctccacccgcgtgcccgtggccagtgtgctcatctgagaggctgccgctcacctacctgcacatctgccacagctggccctggg

SEQ ID NO: 82897 - DNA, 1011 bp, Homo sapiens
actacaggcatgtgccaccatgcctggctaatttttgtatttttagtagagatggggtttcaccatgttggccaggctggtcttgaactcctgtcctcatgtgatgcaccagccttggcctcccaaagtgctgggattacaggcttgaaccaccgcacccggctataacgctgatctctttatacatttggtgtttttgtctatcctccttgggactgtgagctccctgttcatctctgtcactccagggtccagcaaagagcttggcacagagtagctgttcgacaatcatgttgagcaaatgaattaaaaaagagcttaagacaaacacgtgaggcccttaacaacaagttccttccagccctaacacgtggtacgttcccagccttagagaaagcactgtctaaaggagagactgcaaactgattgctcaccaacgtgtttaatttttttagatgctatggttaaaaaaaaccccaccacataagataacatttaccatcttaaccatttgtaagtgtacagttcagtagtgttaagtatattcacatcgttgtgcaacagatctctagaactttttcatcttgcaaaagtgtttttcatctttgcaaaactaaaactccctacccattaaacaacaactcctggcaactgccagtctactttctgtttcttgtttttgcatgtgtgtgactggcttatttcattagcataatgtcctccagattcatccatgccatagcgtgcgataggatttccttccttttgaaggttgaataatattccattgcacggtgctacaattaaaagtcccctccaaaactcatgtttaattgccatcgtgatggtattaagaggtggaatgactgggcgcagtggctcatgcctgtaatcccaacatttgggaggccaagatgggaggatggcttgggcccagaaatttgagaccagcttgagtaacatagagagaccctgtctctacaaaaaattaaaaaattagtcaggtgtggt

SEQ ID NO: 82898 - DNA, 1045 bp, Homo sapiens
ctgctgaggaatctgcaggcctggcagaggacaggagggaggcttggggagcctgggaagggccggctgacagcttgatgggccctccctccctccacagtcccacccccagcctggggcctctgggagccttggtcctgagcagccaacacaccagcccagacagctgcaagtcaccatggacgctgaaggtaaagggacactctctctgccatgtccctgcacccatccccccactgcctacccctgcccccaccctggcttgtctcagccccttgttgcctcctctggagtcatctctcctctggtcccgccatcgactcccttacctaccccatgtccctgcagccttgctcaacccccagaggccccttctcactcttctttctcctgtgttgagtccccaaggagctctggggaaggaaggggcttaagccctagaaaagggcagggtggcctggaggaggtggcgtctcctgggggcagtgggggccggaagtgggaggctggttgggggagcagcatggacttctgctctcgctggtagctcgggagaagcagagacaaagtcctgtcccttctgcagctgggtgggggagggggcttgagtcccgtgattccctgcctggagggagctgtatgcaaactgttggggtgatcagtcccaacccccaaccatgaagtccggtggcaacaaaggaatgagaaaagacaagttaagatttaaagcagccccagggggccagttgctaaagtgaaggctgcagagccctggttgcctgataatttattgagtacaatcttttgatctaagaagcagatggtacggggtgaaacggtgaaggtgggggtgtgcgcgtcatttgaaagatgtatagccgtggtggtttatgtgaatttcctttaagctcaaagcatatgtctaactactaagataatcttttttttttttttttttgagacggagtctcgctttcccccaggctggagtgcagtggcgtgatctcggctcactgcaagctccgcctcccgggttcatgccatt

SEQ ID NO: 82899 - DNA, 1035 bp, Homo sapiens
tgagttagagaccatcctggccaccatggtgaaacgtcgtctctattaaaaatacaaaaattagctgggcatggtggcacgcacctgtagtcccagctactcgggagactgaggtgggagaatcacttgatcccaggaggtagaggctgcagtgagctatcattgcaccactgcactccagcctgggcgacaggttgagaccctgtctcaaaaacaaaacaaagcaaaaacaaccccaaagtctggtttccttattaaccccaagttcatggtccacccgaagcttttcaaatgtcagtcccggctccccgcgccccagctgcagtgctgggccctatcgtcaccctcgccctcccggctccctgcgccccagtgccaggtgctgggcccagtcctcacccttgtcctcccggctgcccagcaggcggtgcgggcggccagacaggcggctgacttcactctgaaggtggaagtggaatgcagcagcctgcaggaggccgtgcaggcagctgaggctggtgccgaccttgtcctgctggacaacttcaagccagaggtaaggtgggctctgcctccggggagggatctgtggtgggctcttacctccccttggcttgtgtcccgcaggagctgcaccccacggccaccgtgctgaaggcccagttcccgagtgtggctgtggaagccagtgggggcatcaccctggacaacctcccccagttctgcgggccgcacatagacgtcatctccatggggatgctgacccaggcggccccagcccttgatttctccctcaagctgtttgccaaagaggtggctccagtgcccaaaatccactagtcctaaaccggaagaggatgacaccggccatgggttaacgtggctcctcaggaccctctgggtcacacatctttagggtcagtggccaatggggcacatttggcactagcttgagcccaactctggctctgccacctgctgctcctgtgacctgtcagggctgacttcacctctgctcatctcagtttcctaatc

SEQ ID NO: 82900 - DNA, 1648 bp, Homo sapiens
gtcaacccttttaatccttagaacaaccctgtgaggtgctggtctacttcacccttggcaattcaaaacatgtcctgggccaggcatggtggctcctgcctataattccagcactttgggaggctgaggtaggaggatcgctggagcccaggagttgaagacaagcctgggtaacctagtgagactccatccctctctctctcttttttttttttaagtgcccagcatcacctgggagcttgttagaaatgcaaaatctcgggcatcaccccagggagacggagaccaaatccacattttcacaagatcctccaggttatttgtgtatacattacagtctgagaagcctgctatacacctgctgcacttgcttgtagagcagggaaggcactgaggccaagcttaggggtgtccacaacatgaccagggcagaatgagcttctccaacatgagctgtggcccccagcccgcccagcaaagttggtccctgcttcttctgctaccaccatacttcatgtctaaaagtgatcttctctcctccaggagctggtcgctgtcggctaagcaagattggagctactcgtcgtccacctccagctcgcgtaagggtggctgtgcgactgcggccatttgtggatggaacagcgggagcaagtgatcccccctgtgtgcggggcatggacagctgctctctagagattgctaactggaggaaccaccaggagactctcaaataccagtaaggttcaggccactcctcttccctcatgccatcacctccctctcctaggcctgcccacgttcccctgcctccccaggatccttgctccctccttagcaccgctttgttccctgagccttcactgttcacttaggaaatgttgacaggtgcccccatgatgggccctctctgggatactgtagggagagatgagaggttgaatcaaacatacattactgtgcacagagagggaggagcaatgagggtgagcaggtgagccccaagtagaggctgggggacatatcaggagggttggcggaacacagacctgccagccagcctacccaagctgcagctgggtagtgtcagagaagaccacccagatttggggacagaactcagaagggcagctactttataatcctactggggatttaaagttcaaactccttggcctgtttttctaggcgggggctggcaaaccatggcctgcaggtcaaatctgatcaggagtaagattttcagtaaataaaattttatcgtttatttacatattgtctatagctgctttctgactacagtggcagagttgagtagttgtaaaaggaacacatggcccacaaagcctaaaatatgtacaatctgcctttttacagaagtttgctagctcccatactaggccgttaacaatttgggcttcagtttctttccagcctcattccctcaatatatattaaactccctgctgtggcctaagctgcacttctccaccagaacgcagtggataggtgattggtatgtagagtctagttcagtcataagcagcatcctctattttccccattatggtgtaaaatacaatgttctacacatgtagccatttgaaaaagactgggaagccttgcttttttgctattcttgattctc

SEQ ID NO: 82901 - DNA, 1555 bp, Homo sapiens
aaagggctggggaaacggagaggaaaacctcacagttttctccactctcttcccagggaagacgcacacaatgctgggcagcccagagcaacctggggtgatcccgcgggctctcatggacctcctgcagctcacaagggaggagggtgccgagggccggccatgggccctttctgtcaccatgtcttacctagagatctaccaggagaaggtgaggccccgtgctggttgggagaggagcaacaaagggtcaaagtaagacctggttctagaacatgaagctctgctgtagcagggaggtaaggtgagacctagaaagacagagactggggtagcagatggtacaactccgagaatagaacagagaaaggaaactgatccccaggaagaaacagcctctctatggagaattgcccttccccttcactgcttacacaggtattagacctcctggaccctgcttcgggagacctggtaatccgagaagactgccgggggaatatcctgattccgggtctctcccagaagcccatcagtagctttgctgattttgagcggcacttcctgccagccagtcgaaatcggactgtaggagccacccggctcaaccagcgctcctcccgcagtcatgctgtgctcctggtcaaggtgaggccgcagacaggggcgaggacctgggaagcccaggagcctgagctaagcacgagacctttgttcttacccccaggtggaccagcgggaacgtttggccccatttcgccagcgagagggaaaactctacctgattgacttggctgggtcagaggacaaccggcgcacaggcaacaagggccttcggctaaaagagagtggagccatcaacacctccctgtttgtcctgggcaaagtggtagatgcgctgaatcagggcctccctcgtgtaccttatcgggacagcaagctcactcgcctattgcaggtcaggcccacctgtctcagggaagaaggggctgcagaaggaggttctcaggcctgctgtggggtggggaatagcagttgaggcataggaaggctgggcttctgacccacccactgcctggtctcaccctcaggactctctgggtggctcagcccacagtatccttattgccaacattgcccctgagagacgcttctacctagacacagtctccgcactcaactttgctgccaggtccaaggaggtgatcaatcggccttttaccaatgagagcctgcagcctcatggtgagaactgggggaggcaggagtggaaacgctgggtctggaaattagggagtttgttgaaaccaccaagcatcagcacagaggctgaccacccccaatccctctctccaccccatcctccaatcatctagccttgggacctgttaagctgtctcagaaagaattgcttggtccaccagaggcaaagagagcccgaggccctgaggaagaggagatcgggagccctgagcccatggcagctccagcctctgcctcccagaaactcaggtgagcagtggggccttgggtgtatccccttcctgatgtatgg

SEQ ID NO: 82902 - DNA, 1061 bp, Homo sapiens
ctctgtcccagggggctactgtagttaaggaagatgccacacacaagaagatgcttgtgcactcatgaccccatctctcagtcttgtctttcccaaaccatctgtcagcactccccactgctgtgtgcacccagaaatgtgcacaggtaagctgtcagacaggcactctgagtaaggggaagctcagagttgggcacatcaaacccagcagacccagagcttgggggcctcacaggagagcaagtcagatgggaacatcagtatatgataccaggtggagaattcagaatcaggaaggagtagctgctgctgctgtgagagtcaggaaggaagagatgacttctagtgtttgcccacgtatgttctgatcctgtttttccaaggcactagcatggaaagcacaggagtgtccctgtcctccaggagccagttcacagcataggaagggagatgcattgttaagcttggcgtcatgggaaaggtggcatcaaactgacctggaaagattattgatacagatgtgaggaggtgtggggcaagattccaggcaaaataaatgaatgttagacgttgctgactgggcgcagtggctcacacctgtaatcccagcactttgggaggccaaggtgggtggatcacttgagcccaggagttcaagaccagcctgggcaacatagtaagaccccatctctacaaaaaataaaaaaattagctgggcatggtggcatgcacctgtggacccagctactcaggaggctgagacagggggattgcttaagcctcaggaggccaaggctatagtgagctgtgatctcaacactgcactccagcctgggtgacagagcaagaccctgtctcaaaaaaaaaaaaaaaaaaaaaaaaagaatgttaagccttaccgtgctcagagtcagtcaggactgcttgaacaggccttcccagctgcccacagcagggaagcttggcagctgaggtcttcggtggatttcaaagccctgctaaagatggcatcctctgtgatgttttccgcaactgctcctccaaatggataggcactgtcc

SEQ ID NO: 82903 - DNA, 1083 bp, Homo sapiens
acctaagcagtcaagcaagaaaccacacatatgcacatacccagaatcgaacaccactagaactacccaaaaactgagatggttgggggaggtatcatttattcatattactttctcccatgtactttttgaaagacagcttattctttcccttttagagatgagggaccagatttaagagcttattttgtgctttacattcattaactcacttgatctccacagcaactccatgagaagggtgctaatattaccactgggtactgagtagtacctctctttcactagttgcataataagaattaacccagagagtgacctgagggcgggattttggacacacttgacaagagaggaagaggctggagcgcaggaggtagctggtgctgggctcctagtcttggcagaggagcccaaagcacttggctgccctgcgtgtcactcatctccctttgcctcccagctggagtccctggatgccctagagcctgaggagaaggctgaggactgctgggagctacagatcagcccggagctactggctcatgggcgccaaaaaatactggatctgctgaacgaaggctcagcccgagatctccgcagtcttcagcgcattggcccgaagaaggcccagctaatcgtgggctggcgggagctccacggccccttcagccaggtagcagcccactggactgggggagggcgggggcgggggagaccgggtacccccgagaccctgtcccctatcgatcctgtcccgccaggtggaggacctggaacgcgtggagggcataacggggaaacagatggagtccttcctgaaggtgaagtcacggccctgcccctcctctgcctgtcctgcgccccgcgcccctctctaacgtcgctgtctccctccctcctgtgttgcaggcaaacatcctgggtctcgccgccggccagcgctgtggcgcctcctgaccgtcgtctcctcactccgccttttcaaatttttgtataaccccgtgttgtgtaaatacagtttttgctccggtgcttccgcctgatttttggggctgcgggggcgggaccggggtgtgaccg

SEQ ID NO: 82904 - DNA, 1817 bp, Homo sapiens
cctgaagcagcctccggcgccccctccgccacccccgccagtgtcggcgcccgcggccgaggccgcgccccccgcctccgccgccactatcgccgcggcggcggccaccgccgtcgtagccccaacctcgacggtcgccgtggccccggtcgcgtctgccttggagaagaagacaaagagcaaggggccctacatctgcgctctgtgcgccaaggagttcaagaacggctacaatctccggaggcacgaagccatccacacgggagccaaggccggccgggtcccctcgggtgctatgaagatgccgaccatggtgcccctgagcctcctgagcgtgccccagctgagcggagccggcgggggagggggagaggcgggtgccggcggcggcgctgccgcagtggccgccggtggcgtggtgaccacgaccgcctcggggaagcgcatccggaagaaccatgcctgcgagatgtgtggcaaggccttccgcgacgtctaccacctgaaccgacacaagctgtcgcactcggacgagaagccctaccagtgcccggtgtgccagcagcgcttcaagcgcaaggaccgcatgagctaccacgtgcgctcacatgacggcgctgtgcacaagccctacaactgctcccactgtggcaagagcttctcccggtgtgcacggggcctcggccgcccgctaggccgtggggagggagggacgcgacggaggtggcctggccgtggctggcggggagggaggcggctgctgaggctggggaaggggagccactcccagggcggagggaggaagcctctcccggttaccagggagcaaggggtggtcctttgtcgaggaggtgggccttggggttgacggaagcttcgcgtgggaggaggcggcggcggcggcagcggctgctgggctccaggggagggatttcctgcttaagtgtcgctgtgacggcctgggctccgggaggaggcgcagggatcctcggaaaggcctgtggtgcggtttggtggatttggggcgcaccacctccgccctaaccccaaccccaacgtgtccccaggccggatcacctcaacagtcacgtcagacaagtgcactcaacagaacggcccttcaaatgtgaggtaggaagcccgcctcctcctgtcttggttttcatgattttgatcctcatggtagctgtctgagtcagtctctcagaccccctttttctctctcttctttttgcctttttgctccattttctcatcccttcttcaaggcctcatcatgtcactcccatttcctacagatcaaagatccccaaggctctgattcctttaatctcttgctcccccctccccagcccaccaagctttaactctcctgtgacaccccccacgcccctcccccctcctcagaaatgtgaggcagctttcgccacgaaggatcggctgcgggcgcacacagtacgacacgaggagaaagtgccatgtcacgtgtgtggcaagatgctgagctcggcttatatttcggaccacatgaaggtgcacagccagggtcctcaccatgtctgtgagctctgcaacaaaggtacatgccgagggctgccgggagggccaggggcagagggtgggcgcctggccagacgccttgccacggatacgggttaagggtgctgtagccaagagctcgtggcgtctagattcctacaagaggtcaagggagcagcggggggacacctgaatgaacatcattagactctaagaagtcctggttggaagagatgatctgccagagaggttgaacctcctggtaatgtgtggggaaa

SEQ ID NO: 82905 - DNA, 1136 bp, Homo sapiens
tgggaaggtgtggggtgagggcaaggctcttgccattcagatcgcgctgtgatccgtggtgtttctcctgtgcaggtactggtgaggtttgtccaatggcggcggcagcggcagcggcggcagcggcagcagcggcagcagtagcagcccctcccacagctgtgggctccctctcgggggcggagggggtgcctgtgagctctcagccacttccctcccaaccctggtgagctccaagttggttgcgggggagaggggagaatggagtagagtcccttggtacaagctcctctcccccctcttttcccaccaactcctatttccctaccaaccaaggagcctccagaaggaaaggaggaagaaatgttttcttaggggaattcgctaggttttaacgatttgtttctcctgctcctcttctgtcagacctgaccccacacaaacctgtcccctcggttgtgttgaagtcccctggacagtgggcaggggtggcagaggacacgagcagccactgcccgtaccccctctcctctctgtaagcccatgccctgtcttcccagggacttgtgagcctcttccctcgacggtcctcttctctccttccagtcctctccccctgctgtctgcagcccctccccggggagttggtgctttcttttccttttttttttttttccagggggagggaggagaggaaggagggggatcagagctgtcccaaagagggaaagcggtgaggtttgaggaggggcagaagcagggccggcaaaggttgtaccttcataaggtggtatggggggttggggtcaggccctgaacatcgtcctacttgagaatctgtcaggggaaaaagtcaaggggagcaggaggaagagccaggagggccagaggcagagaagagatggagtcttaggggccagggtgagcgaggggtccagggcctagaggtgcttcctgggggcgggggaatgcagccagtgtccccctcccctcttccaccccagctccagccctggtcttgtcttttcatccctcttccccacgacagaagaagttgtggccctggccatgtcatcgtgttcctgtgtcccctgcatgtaccccaccctccaccccttccttttgcgcggacccca

SEQ ID NO: 82906 - DNA, 2016 bp, Homo sapiens
agtcctgctctgtcacccaggctggagttcagtggcgggttatcggctcactgcaacctctgcctgctgggttcaagcgattcttgtgcctcagcctcctgagtggctgggactaccggcacgtgccaccacactcggctaatttttgtattgttagtagagaggggtttcgccacgttggccaggctggtcccaaactcctgacctcaggtgatccgcctgtctcagcctcccaaagtgctgggactccaggcatgagccacacgcctggctgagaccaggagttttgaggctgcagtgctatgatcatactactgcattccaacctggatgagagagcgagaccctgtctgtaaaaaagaaaaaaaaataagagaagtaatatgccgagattgtgccttcattagtgctgggggggcagggggtggcacacgcctgcctcttgctaacgtggcctgtttgctgtgtgtgcagcctgctctgttcaccttgtgtgctgggaatgagctcttctactgcctcctctacctgttccatttctctgagggacctttaggtaggagatgaggggctgggcaggaggatgggagggggatctggcctgcccagggagatggaggccccctccttcgggccccaaactcccctgctgccttcctgcagttggctctgtgggactgttccggatgggcctctgggtcactgcccccatcgccttgctgaagtcgctcatcagcgtcatccacctgatcacggccgcccgcaacatggctgccctggacgcagcagaccgcgccaagaagaagtgacgctggagccccgggtcctggctgcccacctgccctgggagtcttgctgtgccacacagctccccaccccctgctaggaggtcccagtctcacgccttcctcatgtgttgttctacctgctgggatgggggtcagcctctctttggtgacgtcacgttctctgggatcctgaggacccgggcctcaaatcagggaggatacgcgggaggccccctccatccaggcggtgctcctggggtgccgggaccgggcagtgtcacaccctgcctgctcagtcctggggtccgagatgctagggacgcttgagtgagggaggtggtgtgagggccaggtttcctgaaaggcgggagtcagacctccgcccccagccagagcaagcttggggcaccatgcccaggagggaagaagccatccacagccttccctgtcaccggctcctctgtcctgcctaccctggtcctggcgggacttcactatttgacttggtttcctttcagatattcttggctcagggcctgggttgagggagcttagggaaggacgtccgtctgggtgcttttcctccagtttgctggctggcttctccgtctacccacagtgacctcacagagaggccctcctgccacccatgctcatgtggtgtccccaccgcccacttgtttgatgtcactgactgtctacatgtatttatattcttgatattttctaccctcactagaatgtaaactccatgaaggcacagacttttcttgttctcttctctatccctagagtaagaccaacttgaacctggcatatagtagctgcttaataaatactcgtctgtcaatgagttggtttctcagagtgtggtccttagaccacctgtggtatatttctatttctcttttttgcttttctttctttttttttttttttttttttagagacagagtcctactctgtcgtccaagctggagtgcagtggtgcaatcatagctcactgcagccccaaactcctgacctcaagtgatcctcccaccttagcctctcaaagtgctgggattacaggcatgagccacaaagcctggctggatatttctttaaaatgcaaattcaagccaggtgtggtggctcatgcctgtaatcccagcattttggaaggccaaggttgggtggatttagtacaggagttcgaggccagcctgaccaacatggtgaaacccca

SEQ ID NO: 82907 - DNA, 1674 bp, Homo sapiens
tctgtctcggaaaaaaaaaaacaaaaaacaaaaaacagtgtattcaacaggtgtttactggaggcctactgtgtgccctgcataagcagttggggttccagaaggcatgcttagagggaggatggagagggaagggtgatggcttctggagggttgactaattttttaatctgttctccagacccaactgtaaggcttcccctgaggcatcaagtctctatctagccctggagtcttggttctggggttgatgagttgcagacatagctttcctctcctcctaccctgttccctccactctcatgcctttctcagttcatgccatggtgacctttgcccactgacctcacacacagcctgttttctagcctgcgttcctccccaggcaggcggacacttccagtcttcgtttacaccctgcgtcagagtgataaaccaaatatgggcacctgtcctgcatccactgtgccataacagcccttgcccacctaatcttccaggaacccggtttggggccatgctggacatgctgacggaccgctgctccaccatgtgcctgttggtcaacctggccctgctgtaccctggagccacgctgttcttccaaatcagcatgagtttggatgtggccagtcactggctgcacctccacaggtctgctgcgattctgggggcctgggccacttggagacattacagtggggtgggctgagcctagacggaagggtgtctgggatggcactaggcatcctggaagggctcctttttagctctgctttgtagaaagaccccaggcaaacctgcctctctttaaagcttcagtcatgtttacagttgcattaagcaattcttaggactcttctggctgggtattctaggattccatataggtgacagcttataggaaggggcatgggagctttcaaatgtggcatttgaatcctgactctgcccccaaataggtaactgtggctttcggcaggatactggtccttagccgtgcccagttttccatctgtacaataggtgttaacatgaggattggatgcatggtagtggtcatgaaaccttgtgggttcccctgttttctccccaagttctgtggtccgaggcagtgagagtcacaagatgatcgacttgtccgggaatccggtgcttcggatctactacacctcgagggtaagcatttcctgcacaccccacccctcaggctcttggctgtgggaagccctgggctgaatcctggtcctagcctaggagaaggcgagggcgcagagcagggcctgcccagtcactccaggaggagggcccgtaagctgaggcgtggaggaggaggattggtggggaaggcctgtgtgaattactccagggaacaagtgggaatgaggcctgcaaagagaagggactgaaagcgggaagggagataagccagagaggtctgcagggctggagtgtggacttgattccaggaacacaggcagcctctggaaggatttttaaaaagataatggctgggcatggtggctcatgcctgtaatcccagcgctttgggaggctgaggtgggaggattgcttgaggccaggagtttgagaccagcctgggcaacaaagtgagactctgtttccacacacacacaaaatcttgaattagcttagccaggcacagtggtacac

SEQ ID NO: 82908 - DNA, 1910 bp, Homo sapiens
cattctgagcctgtctggctcttgcgtatctatccagaattcggtggataggctggtgcactaagggtacaggatagacgtgagagagctgggctcaaatcacatattagccaggcaacctcggacaaataaatagggcaatgcagccttccttaggggccactgtgaacaaggggctctggcctggtgcctctcactctttggaggtttctgaggcttcccctggagctatttccacggacacagacccaaactgttgcgttaacaccagcaagttggggaggtctggggagaatccagtgagctgaattggtatgagagtgtcatgagatggcacagaagctgaagtgggcgtggcttcaaagcaggtactcaggcggggcctagagttgtgtagggcgttagcgaatttggtctgtgattggccagagctggagttgggctaggctgtggatctcatggtgatggaggagggagtggacagtgggcggagttagtaatgtgcaagcttagggattgggtagtaggacatgggaggagccatagaataggggaaccctgaggcactagcataggagaaaccatggttggtcaaaacggaggcggcgccagacctgggataggagaatatgggcggggctggagagtaggaggggctaccaatgagcagagttgaggatggggcagagctggatgggaggggccagtcgcagccccgccccattgcctggtctcaccccctgcagattgaatgtgcgggaaggggacatgctgacgctgttcgacggggacggtcccagcgcccgagtcttggcccagctgcggggacctcagccgcgccgccgccttctctcctctgggcccgacctcacactgcagtttcaggcaccgcccgggcccccaaatccaggcctgggccagggcttcgtattgcacttcaaaggtactgagggatagagtcccgggatgggcaggggtcgggcaggccagagatcccgggaggtggccggtcgtggtggctcacgcctgttatcccggggccttgggaggccgaggcgggaggatcgtttgaagccaggaggttgaggctgcagtgagctatgcttgtaccactgtactccagcctgggcgacaggaaaccctgtctctaagagagagagagagagacagatcccgggagggggcacagagcaaagcctccgaggctggaagggagcccgcagttaaaacgcagcctccaaactcgccttccctcccctgcagaggtcccgaggaacgacacgtgccccgagctgccacctccggagtggggctggagaacggcatcccacggggacctgatccggggcacggtgctcacctaccagtgcgagcctggctacgagctgctaggctccgacattctcacttgccagtgggacctgtcttggagcgccgcgccgcccgcctgccaaaagagtgagccggccccgcccgcgtcccctcggccccgccccttccctgtgggccccgtcgtcggcctgtcctgtcccgacccccgtgctttctgggttccatcccttcgctcggggtccttcctggatcttcttcaaggcctgcccccatgccctttagttctcactcctccgcccggttccccgaaactgtcccctctgggtctccctctcatcttctccgggctgcatccctctttcttgcaccgacctgggctcggtccctgtttcctcgtctcacggccccgccccgtcccctcctgacccctcctctgcggcatctgagtttggcccctaaaagggctccgaccaggttcccactgggctccccgggtccacacttggctccaccttcctgtcctacgccccgccccaatcccgcagtcctatcagttgaaattgtagggagccactttg

SEQ ID NO: 82909 - DNA, 1087 bp, Homo sapiens
gtagtccctgagaagtcccagctcacagccccgaagtcccgcaaaatggcagggaagctgctctccaggagctccacgtcgtgccgctgggcgtcccgcggcacaaagggggctgaaggcaggtctggtaggaaaagcaggcctgggcgctgaatacctaggacccctggccctctcccagggcctgggccaccctgagctgcccgcctcactctacccatcccagcccaggagtagcgccttgcgtaggcccgaagccgccggctcactaggccttccgtcctaggtccttccccgggatccccaggaccccctgggcttggcccgccggcctccgagcatcccacaggcccaccacgaacacccccagctcggctcccagcccctagggcctgcatgtcttgggagcccaggcggtagcagtaccagaggaacagggaagtgagggccccgaagagcaaggtgagggccgaggaggccaggggtagtggccacgggagcatgatcagggaggccctggccaagaggcctggggcgtcctccggaccccagttcccctgtccccccagctccccacctgtcccttccatggctgccccctggctccccgctggactgtttcccttccacattccactctgggctgtctctctctccttccgcggtcctctctccacgctgaagctccctctcccctccttcatgcacctccaaccctcctctctcctttctctcccctttctctctccttctacctcttcttcctcctctccctctgtcgcctcctcaccctcttctttctccttccagcagcctcctctctctcgctctgcttctctctcccacctcaatctccccctttcctccccacccccgcttttcgctcgctctctctccccgcttcctcctagctcccctgggcagcggttcctaccctgcctggacctgcagtcccgggaacccgcagcctgtcttcctccgcggcagcttctttctctccggcctcactgctctctccttgccctcgctcctcactagccccgaccctgcggtcctgcctggctctcgctccctctctcctactcgc

SEQ ID NO: 82910 - DNA, 1056 bp, Homo sapiens
cctcccaggttcaagcaattctcctgcctcagcctcccgagtagctaggattacagctgcctgccaccacgcctggctaatttttgtatttttagtagagatggggtttcgccatgttggccaggctggtctcgaacccctgagctcaagtgatctgcctacctcagcctcccaaaatgctgggattacaggtgtgagccactgcacctggccagacccgttattttattttattttattttattttattcttatacagacagtgctggtcttgaactcctggcctcaagcaatcctcctgctttggcctcccaaagtgctggtatttcagggatgagccacggcacctggcagcaacctctcatttcgagaaaagagaaggcttcctggaggaaatggcttttcctcctgggctttcgacagtttgactcaagagcttactgtgtgataggcgctgtctcactgagaggtataagattaaagacgttcctggcccaaggaccacatggctgagtgctgtgaggaaagtgagcagccaactcaactgatgggggaacaggaagccaacccagaggaagtgtggcacttgaaaacttgagtactgaaggctgagtaggagtttttcaggaggtggtacgggggaaggggattctaggttgaaaagaacagcacatgtggcatctgtcaggattggccagaaggttttcatgatttagagcacagagagagggaagagaggaaggattgggaactgatcctgaggctagtgtgccctgaagtgtaggacacatccagctggcagcacaggagatgattgggggcaaaacaaggtcatggcatggaataacagaaaattatttccttttccattttcttccagtctttaagacatcaaaaagtgccaggtgcggtggctcacgcctgtaatctcagcactttgggaggccaaggcaggaggatcacttgagttcaggagttcaggtccagcctgtctttacacaatttttttttcttgtttttgagatgaagtttcgctcttgttgcccaggctggagt

SEQ ID NO: 82911 - DNA, 1073 bp, Homo sapiens
cgggcccgccctagcccaggaatttgaggcagcagggagctatgatcatgccactgcactccatcctaggagacagagtgagccctaactctaattaaaaaaaaaaaaaagggaaactcagaaaggcccattgccaaaaatagattcttaaaacctcagaatcagatgtctcttagaacatcctctgagtttgtagatcctgagtcattaatgtggcaatcatcaagatattccccaagcccctgctctgtgctaagtactgtaccgggctggaaatcaaggggaatgaagtgctgagcaaaatacaagcccttcctcatctggtcccttccgagcttactatgagccacatgcctcaggtacaccacagtcatcacaagtctctaagcactcagtgctatttcttacctcttacctctgcacacactgttgcctcttggaattctttccttctatctgcctaatgaacttgtacttaatcttaagactcaagctaagcatcactttctttgggtcaccttcactcatgaactttcaatccagcaaccccaaagttggtcacactcccttcatagctaaagacagtgttttatcatgtgtggtggaggggagggggtttgcatcagcagcgaggtgttagttccttgagggcagggccatgtctttttctttcctatctcccattagctgggcccttttcacacagtggaagctaggaaacatttattgaatgaatgaatgaatgaatcagtgacccagcttccaagaaacatcctctgattgggaagataggaagataaaccaataattagagtgcatggctcacacctgtaatcccaatactttaggaggctgaggcaggggaccattaaggccaggagtttgaggccagcctgggcaacacagcaagaccccatctctacaaaaaataaaaaaaaattaactggacatagtggtacacccaggtactcaggaagctgaggtgggaggatcacttgagcccgggaggttgaggctgcagggatacatgatcacaccactgcactccagcctaggcaacagagtgagatctt

SEQ ID NO: 82912 - DNA, 1049 bp, Homo sapiens
ctgcaactctgagcggatgccgagtcctcaccgggaacccgggcgcggctggtctgtgctattggcgcgggtaggggacgcacagcccaaaaatgcccgcgacaagcttctggggcagttctcgccagtctctctggagggagcctacgggttctgcgacgtttctcgcacttgctccctggcctcgctcccgtttccacccctcccacggaggttttcctttctggtggctccttccttgggtgtccctttggtacgcccccaccctggcggtgagctgcgaggctggcgcccgcgtggccactgcgcatgcggacccggccgcggggcggggccgcgcgaggaggagggtcggggacggaagcgcagagcacggaccccgccccctcgcggccccgctcgtgacgtcgcggggggcgccggcctccgcccggccccgaggggtaagagcgagcggctggcggatccgacgcgcgagaccgggaggggacgagggcgttgcaatcgttcggggcgggggctttccggggagggggtgctcaggtgcaccagcggcggcggaccctcagactctgccctcccctccctttaacccccttccagccggacgggaggcggggcagggctgagcatttgtgacacctacatttccgtggctcccttcttttcccccgacccctgtttatctcttcgccttccagaagttcttttccatcaggccgtcgcaccttgcgtgggaaggagcaccccacttggaagcaggaggcggggttcagatcttggccctacccctcctgtgttaaagtccgcgagcctcagtttccctcacagtattttttgcctcgccttacccggttttgaggatctgtacgagaaagagaaaggaagtggacatttgttgaattcctgcatggccaaataccacgcagactgcttcatccgccacgtttaatccttattacttggtgttctcagaactcccatttcatggattcttaagctcacagagtcagtgaataacagaaagggattcagatctagccgtttag

SEQ ID NO: 82913 - DNA, 1084 bp, Homo sapiens
ttttccgcgcccagcagcagcttcctttgcccctcccaacttccaccctgcgcgcagtcgcagatcgccgctgctgtccgtccacccgcgccccctcaaagcttcccctagcaacaagctcgggctcagagcgaaggcggggcgagcgcatgcgctgcagctctgtccaccgccagtcgtgggacagagtgccgggctcctccccttgcaagtctagctcttctccccgcctcctccggcctggggtccgcgtggcggggcgggcgcgcactcgggcttggcggctgccggtctcccaggccgcggcagtgaggagagagggcggggctgagtcctctgcgcccccgccccctttagcccggcgtccctaccgcgcctgcgcgctcccgcccggtctccatcttggaattgggaggaagagggagagggagaccgggacgagaccggggctgtggtgcggagagaggctgagacggagaagaggagaggcagagagggcgcggggaccgtcagcagcaccttagctacaatcgttcagctattctcggaagagagaagggagagggaggaggccggggcgggagtgggggctgtcaccctcggaccccggcgtgagaggggccgtgcggccggacgtcctcggggtgggcccccagtcggtggccgaagacctacagctcaggcccctgggtcccaaatttccaggctttgcccctcctcctttctcagatacccgggtaacagtcctcatagtccagatatccgggactcgggtcccaacctctctaaacctgggtctctgtttcatagaatttcaaatatcaggttcaggcccctgcgtgcaccagtatccggggttcattccccgggcgttcaaatatcggattcagtctccatcccgttcagatattcggggttcagaccccacaatcagaaatccggaattcggcagctgtcgccctcgacgagggggaggactggaccgcgaggtcagattaggttgtcaccccctcccctccaggggaggcttcccgggcccgcccctcaggaagggcgaaagccgaggaagaggtggcaaggggaa

SEQ ID NO: 82914 - DNA, 1061 bp, Homo sapiens
tgagaagttaacttacttgagatcacatgcttggtaagtggcaaagctgggatttgatcccaggtatgtctgactcactgtttcaaattagtatggattgttcctacttttgtgccaggccctgtgctcgccaccttttatcattcggccacaccaacttgtgatgtagataatatcaccattatccagttgaggaaacaggctagagtggccgtgtgtgaggaaggtgttaaatgagaatgaaacccatgagttgaaaacccatgctcttccccacggaagaccccttgtgttaattaactaggggccaggctgagccccagctctcaccctctctccttccccaggtcagccgtcagatccaggagcatgagcaggactctgcgctgcgggagcagctgagcggctataagcggatgcgacgacagcaccagaagcagctgctggccctggagtcacggctgaggggtgaacgggaggagcacagtgcacggctgcagcgggagcttgaggcgcagcgggctggctttggggcagaggcagaaaagctggcccggcggcaccaggccataggtgagaaggaggcacgagctgcccaggccgaggagcggaagttccagcagcacatccttgggcagcagaagaaggagctggctgccctgctggaggcacagaagcggacctacaaacttcgcaaggaacagctgaaggaggtgagctagggctgcttgggggcggagccgatggcgagccaggtgggtcctgaccctgcttccctctgcactcgcccaggagctccaggagaaccccagcactcccaagcgggagaaggccgagtggctgctgcggcagaaggagcagctccagcagtgccaggcggaggaggaagcagggctgctgcggcggcagcgccagtactttgagctgcagtgtcgccagtacaagcgcaagatgttgctggctcggcacagcctggaccaggacctgctgcgggaggtaggcatcccaatctctgttcccctcccgctcactcgtggatcccagggacccacccttttcca

SEQ ID NO: 82915 - DNA, 1031 bp, Homo sapiens
aaggacttggagtgtgcactgctgcttcggcagcacgaggccacgcgggagctggagctgcggcagctccaggccgtgcagcgcacgcgggctgagctcacccgcctgcagcaccagacggagctgggcaaccagctggagtacaacaagcggcgtgagcaagagttgcggcagaagcatgcggcccaggttcgccagcagcccaagagcctcaaagtacgtgcaggccagcgccccccgggccttccactccccattcctggggctctgggcccacccaacacaggcacccctatagaacagcagccctgctcacctggccaggaggcagtcctggaccaaagaatgcttggcgaggaggaggaagcagttggagagagaaggattctgggaaaggaaggggccactttggagcccaagcagcagaggattctgggggaagaatcaggagcccctagtcccagtccacaaaaacatgggagcctggttgatgaggaagtttggggtctgcctgaggagatagaggagcttagggtgccctcccttgtaccccaggagaggagcattgttggccaggaggaggctgggacatggagcttgtgggggaaggaggatgagagtcttctggatgaggagtttgagcttggctgggtccagggcccagcactgactcccgtccctgaggaggaggaagaagaggaagagggggctccgattgggacccctagggatcctggagatggttgtccttcccccgacatccctcctgaaccccctccaacacacctgaggccctgccctgccagccagctccctggactcctgtcccatggcctcctggccggcctctcctttgcagtggggtcctcctctggcctcctgcccctcctgctgctgctgctgcttccattgctggcagcccagggtgggggtggcctgcaggcagcgctgctggcccttgaggtggggctggtgggtctgggggcctcctacctgctcctttgtacagccctgcacctgccctccagtct

SEQ ID NO: 82916 - DNA, 1047 bp, Homo sapiens
aagagtcatgttttttttctcctctttgattttgtttttctgtctcccttccaacctgtccccttccccccaccaaaaaaagaaaaagacaaacacaaataaaatatctgagcggaactgtgcctttggcccaggctgcctctgtctgctttgtcctgccgcctagcctccccggtatgcccccaggctgaccctcggcccggctccatgacctcttcaccccatctccgttatctcagccccctcactcctccagcctcatgctctctgccttcatagcttcattgcaccatgaccaccaccggctctggggtctgggcccctgtagaacttcaccgaacttcttggtcccacagagcgcctgtttgcgggttccttccagaggtcttagtttccaggcccttggtctcctcatcccttgccttttctcccaaccatggctgcaggggaccaaattgctctcctgcatcaggcattaccctagtgggttgggggacggggctgcagaccctccacagtagggggtgctgagctgggggcaaccaggcggagtatgaaggctgtggcagcaggattgagtgtgggcctggagtgggagctgagtgtgtgaggggccgggctggaatgcggatctggtcagggtggtagctgctggccggttgaacttgtcaggccctttctggccacctcctttgcccctttctcctctgcggcccaaaatggggcagccccttcttacccatttctcagctcggtgcttctcctccttccctgccttcctccctgagctgctggacctgggacttcctgtgtctgtccttagtcgtgttgctttcttcatgggtgttttgtgtgactggttcttctcgcttgttctcgtgcacgttctcatatttgctcacgtgcttctgtctctaggtcacagtctctccctctttgcctggtcagagcttccaagatcctcagttccctgtccagtaactccgatgttctttctcgtgggtatcgcacccaactccgtgcacgtgctcttggaacctcttgtct

SEQ ID NO: 82917 - DNA, 1431 bp, Homo sapiens
tgagcgcagccttggtgcatagtttgccctcttggcgcacacacaggtggatgaagccgcttccagggaagacaaactggaccttaccaagaagggcaagaggcctcccaccccttgtagcgacccggagagaaaaaggttccgcttcaattcagagtcgggttagtgcttcctccctgctgtgggggccttctgcatcgttggttcactcaagaagcattcactgcgcatctcttatgtccccaggcgttagatgagggagcaaggctagtgagtcaggaaccgggaacagcaagtacagatagctgtttcctgctgcccctccaactgtcagggcagggctcgaggcaacctatccgaagtgaagggagaagggacaggaggagcctgtctcaaccctctctcctctccatattccagagtccggctctgaagcctccagcccagactactttggacccccagcaaagaatggggtggcagcagaagtcagcccagccaaagaggagaatccaaggcgagcctcaaaggcagttgaggagagcagtgatgaggaacggcagagggacctgcccgcacagaggggagaggagagcagtgaggaggaggaaaaggggtacaaggggaagactaggaagaaacctgtggtaaagaagcaggcaccaggcaaggcctcagtcagtaggaagcaggccagggaagaaagtgaggagagcgaggcagaacccgttcagaggacagcaaagaaggtggagggaaataaaggaactaaaagcctgaaggaaagtgaacaggagagtgaagaggagatcctagcccagaagaaagagcagagagaggaggaagtggaggaggaagagaaagaagaggatgaggaaaagggggattggaaacccagaaccaggagcaatggccggagaaagtcagctagggaggagaggagctgtaagcagaaaagccaggcaaagaggctcttgggagactcagacagcgaggaagagcagaaagaggcagccagcagtggggatgacagtgggagagatagagaacccccagtgcagaggaagagtgaggacaggacccagcttaagggtgggaagaggttgagtggaagcagcgaggacgaggaagacagtgggaagggggaacccacagctaaaggctctagaaagatggccagactgggcagcaccagtggtgaggaaagtgacttggagagggaggtaagtgacagcgaggcagggggaggcccccagggggagaggaagaaccgctcttccaagaagagctccaggaaaggcaggacacgaagctcctcttcctcctcagatggaagtccagaggccaaaggagggaaggtgagggtgaggaggggtgggaggccactattagggaagagggagaccctgcctcaggcccagcaggcttggc

SEQ ID NO: 82918 - DNA, 1007 bp, Homo sapiens
ctctgcactgggggttctctatctctcccactgtcatccccactgctggctgcctctttctgctcttcctcgctgtctgagtctcccaagagcctctttgcctggcttttctgcttacagctcctctcctccctagctgactttctccggccattgctcctggttctgggtttccaatcccccttttcctcatcctcttctttctcttcctcctccacttcctcctctctctgctctttcttctgggctaggatctcctcttcactctcctgttcactttccttcaggcttttagttcctttatttccctccaccttctttgctgtcctctgaacgggttctgcctcgctctcctcactttcttccctggcctgcttcctactgactgaggccttgcctggtgcctgcttctttaccacaggtttcttcctagtcttccccttgtaccccttttcctcctcctcactgctctcctctcccctctgtgcgggcaggtccctctgccgttcctcatcactgctctcctcaactgcctttgaggctcgccttggattctcctctttggctgggctgacttctgctgccaccccattctttgctgggggtccaaagtagtctgggctggaggcttcagagccggactctggaatatggagaggagagagggttgagacaggctcctcctgtcccttctcccttcacttcggataggttgcctcgagccctgccctgacagttggaggggcagcaggaaacagctatctgtacttgctgttcccggttcctgactcactagccttgctccctcatctaacgcctggggacataagagatgcgcagtgaatgcttcttgagtgaaccaacgatgcagaaggcccccacagcagggaggaagcactaacccgactctgaattgaagcggaacctttttctctccgggtcgctacaaggggtgggaggcctcttgcccttcttggtaaggtccagtttgtcttccctggaagcgg

SEQ ID NO: 82919 - DNA, 1027 bp, Homo sapiens
agtggactacaaaaaaaaataccggaatctgaagcggaagctcaagttcctcatctacgtgagtgctgccgcgggaaggctgtgggggatgaggcctggcgcggacaagatctcagtttacccaggtgtaaagtgggtggggcgagcggccgctggttccggggcccttcacggaggaccgttggcccagcgcaccccttgcccgtgatacaggagcacgagtgcttccaggaggagctgaggaaagcgcaaaggaaattactgaaggtgtcccgggacaagaggtgaggcacgttgcaggggcggagggcgatgtgcttcctaggaaatctacattcggaccccatccccgagtagggccacaagtgcatgggctctttcaagtatccgatgggccagctgggagggacaggtacccaggaggacattgctgcgctggaaaatcactgtccgtgtctccttccctcccctcagtttcctcctagaccgacttctgcagtacgagaacgtggatgaagactcttcgggtgagcaaggtcttcaaaaattggtggagagcatggttcctggtacttagcaagcttcctgggcccccgccttttaggcagtggtggctgatgcagcccccagtggtccttaagcctagttgcttgccttccacctccaccgttctttcattcaggcacttactgagcacctattgtgtttcaggcactgtgcttggcacaggggatacagcagaggcagagataggcaaagcccttggcctcttgtaatttatattctagttgggaagaataagtaaatgaagacaatagactagaattttaggtcataggaaggacttgaaggtaatgaaaacagttatgcggtaatgattatagtagaacaggggttgatgaattgtttctgcaaagggccagatggtaagtaagctttttgcaacatacaatctttgaagcacctactgaactctgccattgtagtagcagccgtaccccataggcaaatacatgagtatggctat

SEQ ID NO: 82920 - DNA, 3012 bp, Homo sapiens
gcagaggcactgaactaggaaatacatttcttttttgacgaaataggtcagtgtgctttaaagaatacagttacgttagttgaccagaaaggtacattgaagccagattaagcagcaccatgaattcatgcaggtagtgggtgatgtcatcaggaaggatgtgaccaggtttgttttaggtcactctggggttgggggtggacagtgggtggcacggtgaggtgagactgcttagcaggtgattttgacgtgctggtggcctgacctgtgttagttggtgtggggagcagtggatgaaggggaggacttcaggggtagatgaacaggaccctggttatggggagtggggcagaggcaggagttgaagactgctcagctcagaggcaaggaaccagtggcatcaaacagccaaggagtcacagacctggcttggagtcttagcctcacaccttactttctgagcctcggtgacctcatgtgacaagtggaggtgctgcccttcccatccttccttggatctgatgacaaggagaggtggtgagtgggaaagagcctggcaccctggccatgcgtggcaggtgtgttacggaggaaccagagcgggcggggggctggggaggctggagaggctatgggcctccctgggacagctcgagtgtgtggtgcatgcgtgtgcccaccagctggtgagtcagattcccccggggcccttctgttaggttttggtttgtttcatttttttgaggcagggtcttgctctgtcacccaggctggcgtgcagtgttaaaatcacagctcactgcagtctcaatctccgagtagttctcctgcctcagcctcctgagtagctgggactacaagcacacgccaccatgctcggataattgtttttgtttttaatagagatgaggtcttgctaggttgtccaggctgctcttgaactcctggcctcaagcgatctggccacctcagcctctcacagtgctgggattccaggcgtgagcccccgcacctggtcttccagtgcccttctgtagtgtagaggaggttatacctttctgggatggactgggatccccccatccccactgaccagctgtccccatcacagactcagatgccactgcatcatcagataacagcgagacggaggggacacccaagttgtctgacacaccggcccctaagaggtgagaagaagatgcattcctctcgctggggagggtcaggtggggcgcctgggctcctagccacatctgacctcgccctgtcctttctccaggaagagaagccctccgctggggggcgccccctctccctccagcctctccctgcctccttcaacagggtttccccttcaggcctccggggtcccctccccatacctgagctcggtgagttggggtcagggatgggaagtgcttgggagtaaggtgggcgtcatttgggcagaagggctgggcctcggggcaaggccagcccaactttggggacatctgtctgggtgtggcccaagtgtcccgtggagggtgtgagtcggggctgcccccttctctctggtataggaacggggccaggcctgactgaggagagcaaagcccaggacagcatcctgctgctgcccggcccttctgtgctcgggagccccgggagccgcactcatcaccatctcttttgtttttccatcctccttctgtttgcatttcttcccccaccctcaccccggtccattccgcctcccatctccatccccgctcccgcccgcagctggcctcctcccgctaccccccattcccttctgactacctggccctgcagctgcccgagcccagtcccctgaggcccaagcgggagaaacggccccgcctgccccggaaactcaaggtaccctgacgtgggggtgctagggaggggcaggacggcaggaggacagtcacctgagggaggctgaaggcgggggcctgtcagagaaccatgaacagttaatttggggacccagtcagcacttagcactgaggggtggatcacagaagtctcggcttacaggcttgtatggagacaaatcagggcagaaccagccttggaggacccggtgtgcagatgccagggatcccgccctttcatggctgcagtgtagcggggccaggctcattttcccaggggggcgtgttgtgtgatgccaggtagccccagaccgggtcaggattatgggatctagagtcaagtcaagactgcctgttagaaaccacgtggccttgagcaggtctctgctaccctctaggcctcctaggcttggcacctatagggcgagtggtcctactcgatgtgaccagcaagcgcccctggagcgcctcctgttacacggcagtgcacaaagcagaccagtgcctgccctcacagagctcacagtctagcaagataggcagaaaacacaccagaaaagtaggtacttgtggagaagaacagagcgaggtccagagcatggggacgccagggggacgaggctgacacttagggcccagcagtctgggatgttcttgatcagagacttacaggaaatggcagcaagctgtgtggctcctgggcagtgtttctgtcgggcagagtctgtgtttgggagaaaagtaagcagggaattgggtcccggagcaggtcagagggggagctcatgaggtgccagtgtgcaggattcgctgtgaatgaagccttggagacagcagttccctggcggggcgcaggttgcaggtgtggagggggagtgatctaattgcatcttaacaaaattgcagacactggtggtcagagaacagactgagcggtggagtgagttgggacgggagtgaggaggccaccacggtaaaccaggccaagggcagagggtccagagggagctgcggacccatttcagagaatgagcatgggagttcctggaggacctggtgtgggctgtgcgggagagaggccaggatgcctccagggctttagtctgagcacgagtggagtctccctccc

SEQ ID NO: 82921 - DNA, 1077 bp, Homo sapiens
agggagtccagttaggaggctgggaccgcagcccaggtgagctaagaggagggctgggcctaggccacagctgccgggaccccgaggaggggcccatccaagacataatacaagcttcttgggggcagataagccgctggggctcctggctcaggcagcctgcaataccctccaccgaaccagtgagtgccgcagaagagggagaggaggagtagggagaggaagctggtggcaggtggcacctccggggccggcaggcaggcaagcactccaggccgactccgcctctggcttaacccctgtctcagggcagcccaggcgcctccctggagagggcaggtgcccgggcctttccctcccggtttcctgtgagacacccccatcccctcatctcacctctatcaccacccccaggcacttgctggtttgaggctctcgaggggctgaggggggcaggccctgagtgcagcatgggttggcccagctgtgcccagggcctcttccccctccccagagctgccctggggggcaaagcctagtctcctgaggccccagtgcctccctgactagtccccctgtgtttcttccccctgctgcagatggcggtgggaccccccgactgccctgtgggagggccgctgaccttccctggccggggttctggggctggggtcgggacaaccctgacccccctcccaccccctaagatgcccccccccacgatcctgagcacggtccctcggcagatgttcagcgatgcaggtagcggggacgatgccttggatggagacgatgacctggtgatcgacatcccggagtgaccgtgacatcacgccatgcccaccacggccccgcccggcgccctccccgtgccagcacacacgagtccagcttcctcggaggtgtttattgatgcccagctgccatgctccggccactgacacaaccagaaaaggcgtaaacatgcacgggtgtcccccaggagggtggcaggggccctgccttcaaaccccggccccctccaggggacagttatttaaacgagtggccgggagcatctgccacctgctggggagg

SEQ ID NO: 82922 - DNA, 1068 bp, Homo sapiens
gaaggagccagggagggtggcagggaggccacgtgatccgagtcccctcacccctttccttcccacaggtccctggccaaagatttatttctcttgacaaccaagggcctccgtctggatttccaaggaagaatttcctctgaagcaccggtgagtgggcaggggctccctccccatcaatagggccgacccaagtcttcctcccccttcccccatgccgggccccacgatagtgtgaatgtcaggggcttcaggtttccctaaatataggtccctgccagaggatccgtggcgggaaaagggcaggggtcattagagaagatcggggacacatgtggggcgggcaggagctgccttataaccagcccgggaacccctagctcactcgctgctgaccaggctctgccggctccttcggcctcgccgcaggtgggccccttgcaggaccgggccggggtggggatggggttggggttgggccaacagggtccagatggggtccaggtgaggaggggagatttggacgataggagcagggggctcagcatctgggaggcagatcagttcggggacggattttcttttggagaaggaagtcaggctcaaggaagacgtttggcaggaactgtgaccccgcatgccagaggccgagcagcggccggtgcatagccgcgcattctggttttctgtggcgcagaggactaccagcctggctgcggcggcccggcggagagcgcgcacgcatgcgcgacccagcccggcctgccagcctggaactcggatggggaggtctcgcctccgcgcgccgctagttccgccgccttctcgcgctccctgcgtgtcctctcgatgccctttcctccgcctcccttacgcctgggccagtgacagggtgtcggctccgcgccgattcagcccgcgggcgaggcaggctaacgcacgactgcgcgatgtggcccctatggtgacacgcgctgcagccgcgaagaccggaagctggggcggccccgggccgcgcgcgctgggcctgggaggcgaaactcagcttccttcgtttccgacttttcc

SEQ ID NO: 82923 - DNA, 2242 bp, Homo sapiens
cgccgccctctgccgccgcaccctgcacacccgcccctctcctgtgccaggtgagcgcccctcttcacgtgcggggaccagggaccgtggagagggatcttgggggcagtggcgggttgggcgtccgcgtggaggcctcccccatcccatgccagcgtctccccactaccaggcacacacaggctccccggcccctccagcctgaggtcctctaactgcgcaatgcagcggctgcgcgcgctgagtcatggcgggggaggaagccggacgagatgaaggaccattctcccccttttcttgcagggacccctgtggcaaaggattagggccccttagccctggcggggatcctaagaggcagtgaggggtgggggccggcccatgtacagccccagggttctcgcaagtgggagcttggtttctgtcctgggaaacggggcgcccttcgcgaggagggaaacccctccgcggtgcttgatgcccccttaacactttccctgtctctccttatcgggcgaccttgattctgagcccggaacagctgcagccatgcgaagcgacgggagcatttttcaggggaaggcgcttgctcctccacgttcttgccccgtaggaacagtgacgatggcaaagcttaccgctttcctcgcctcgggctagggcttgttccgccgccctttcctgggcttctccttgctctcttatatttttcctaatgcccctttcctaccacccgccccctcccttgtggggaaaagcctgaccttgggatgtccttgaagccttggagcccgggccagccctgggatcttgaggggattggaaggaacaccccagtggcagtcagaagagctgggttctaatctcagatctggctccggggttgctgtgtggcttgaagcacagacctttcccatatctgggccctttcccacgagggtgttgggccctctgcttgattcacgatctttacattctaaaatactccggttcggttttgttttcaggcaaggtgaccccatggcaaggcgcaagccagaagggtccagcttcaacatgacccacctgtccatggctatggccttttcctttcccccagttgccagtgggcaactccaccctcagctgggcaacacccagcaccagacagagttaggaaaggtacaggggcaggcctagcaaagggaagttgggcgtaagagagagctggggaccagaagtgccccagggcctgctgggtgtggggcaggggaggtagggaacatttccctgacctccaggagaggggccctggtcatcgggagatgatgggaaaccctagctaactagtccttcccctctgtttcctgtatccaggaacttgctactaccagcaccatgccctaccaatatccagcactgaccccggagcagaagaaggagctgtctgacatcgctcaccgcatcgtggcacctggcaagggcatcctggctgcagatgagtccactggtgcgggcaggagacagaatgggtggagggtgcagggttgggagtggcaggctgatcccctaattcccatgtgacactcccagggagcattgccaagcggctgcagtccattggcaccgagaacaccgaggagaaccggcgcttctaccgccagctgctgctgacagctgacgaccgcgtgaacccctgcattgggggtgtcatcctcttccatgagacactctaccagaaggcggatgatgggcgtcccttcccccaagttatcaaatccaagggcggtgttgtgggcatcaaggtaaggggagggcctccggacgtgaggtttgagatggaagtggaggaaggaaatccaggttagtgaggcagggaatgaatgctggattggtggcctagagacttgcatggagcctgcttcaggcttagggcatttactcgacatttttaatcctcacaattctgagagaacagtatcattcccactttacacatgaaaatctcagaagctcagggaagtgaagtgttttgctcagagtaagtggcagagccccagtctgacacccaattcactcaacatttctgttgtcaaataacatcccagtgtatcctgtctcagaggattgttactaagtgaactaagtgaaaatattttaatttaattgtaactaagtatttgagtaactaaacattttaagtaaattttttttttttttttttttgagatggagtctcgctgtctcccaggctggagtgcag

SEQ ID NO: 82924 - DNA, 1058 bp, Homo sapiens
ggccatagccatggacaggtgggtcatgttgaagctggacccttctggcttgcgccttgccatggggtcaccttgcctgaaaacaaaaccgaaccggagtattttagaatgtaaagatcgtgaatcaagcagagggcccaacaccctcgtgggaaagggcccagatatgggaaaggtctgtgcttcaagccacacagcaaccccggagccagatctgagattagaacccagctcttctgactgccactggggtgttccttccaatcccctcaagatcccagggctggcccgggctccaaggcttcaaggacatcccaaggtcaggcttttccccacaagggagggggcgggtggtaggaaaggggcattaggaaaaatataagagagcaaggagaagcccaggaaagggcggcggaacaagccctagcccgaggcgaggaaagcggtaagctttgccatcgtcactgttcctacggggcaagaacgtggaggagcaagcgccttcccctgaaaaatgctcccgtcgcttcgcatggctgcagctgttccgggctcagaatcaaggtcgcccgataaggagagacagggaaagtgttaagggggcatcaagcaccgcggaggggtttccctcctcgcgaagggcgccccgtttcccaggacagaaaccaagctcccacttgcgagaaccctggggctgtacatgggccggcccccacccctcactgcctcttaggatccccgccagggctaaggggccctaatcctttgccacaggggtccctgcaagaaaagggggagaatggtccttcatctcgtccggcttcctcccccgccatgactcagcgcgcgcagccgctgcattgcgcagttagaggacctcaggctggaggggccggggagcctgtgtgtgcctggtagtggggagacgctggcatgggatgggggaggcctccacgcggacgcccaacccgccactgcccccaagatccctctccacggtccctggtccccgcacgtgaagaggggcgctcacctggcacaggagaggggcgggtgtg

SEQ ID NO: 82925 - DNA, 2567 bp, Homo sapiens
aggttcacgccattctcctgcctcagcctcccgagtagctgggactacaggcgcccgccaccacccggctaattttttttgtatttttagtagacactgggtttcaccatgttagccaggatggtctcgatctcctgatctcgtgatctgcccacctcggcctcccaaagtgctgggattacaggcgtgagccaccatgcccggcttaagtaactaaatattttaattgtaactaagtgaaaatatttgccagccctgagatgcagtttaagggattaagtaaatgtgggggaagactggggctaaagaagaggaaagaggggcacgcccagctacctaggaggctgaggcgggaggatcacttgagtccaggaagtggaggcttcagtgagctgagattccaccactgtactccagccggggcgacagtggaaagggtgctagaggtcatttcctgtgtcttaatgttgttaccctgaccccaacaggtagacaagggcgtggtccccctggcagggacaaatggcgagactaccacccaaggtgagaactgtttgattctctgccctacgaacccaaccagagcaggtttgggtgctgggaggagtggaaaccacatgcccctccccaccgtgctctgaccccttcctcttctcttagggttggatgggctgtctgagcgctgtgcccagtacaagaaggacggagctgacttcgccaagtggcgttgtgtgctgaagattggggaacacaccccctcagccctcgccatcatggaaaatgccaatgttctggcccgttatgccagtatctgccagcaggtgggcctgcaggtcctcaataggcaacctcctacctcatttggttccagtgttgttaatttgcctattacctgccatgatgcctacctccccaaaagcaagcattagctttggcccgtggaggacactcaagggctgttgaaggcagaggggccaaggagggatggtgggtggatctgaggcggctcttgtctcctgtaatctgagggctttgaagcctgagtccctggcatcatcaagatacggtcttgaccagtggctgtggagagatgtaggtgggactctgggttaggaggcctcacagtgaccctgtccctcgccctgcagaatggcattgtgcccatcgtggagcctgagatcctccctgatggggaccatgacttgaagcgctgccagtatgtgaccgagaaggtaaatggctacctgcctgaccagtgcaaggtggctggccggggaccctggggctaacccctatcctctcctccaccccactacccaccgtgcgcctgctctgctccaggtgctggctgctgtctacaaggctctgagtgaccaccacatctacctggaaggcaccttgctgaagcccaacatggtcaccccaggccatgcttgcactcagaagttttctcatgaggagattgccatggcgaccgtcacagcgctgcgccgcacagtgccccccgctgtcactggtgaggcccacactcatcttgatctctatgcagtagataagctccacccacaaccctatgcccatttggacggatttccatggcaacttccaccagctcctgccagcttcctgggtctctgaccacagcccctctcgcctcacccctgctctacagggatcaccttcctgtctggaggccagagtgaggaggaggcgtccatcaacctcaatgccattaacaagtgccccctgctgaagccctgggccctgaccttctcctacggccgagccctgcaggcctctgccctgaaggcctggggcgggaagaaggagaacctgaaggctgcgcaggaggagtatgtcaagcgagccctggtaaggataggcaggaggtgggcagggtgcctgggtggatgggactcggagaagagcccttctcactccacccctctccctgcttaggccaacagccttgcctgtcaaggaaagtacactccgagcggtcaggctggggctgctgccagcgagtccctcttcgtctctaaccacgcctattaagcggaggtgttcccaggctgcccccaacactccaggccctgccccctcccactcttgaagaggaggccgcctcctcggggctccaggctggcttgcccgcgctctttcttccctcgtgacagtggtgtgtggtgtcgtctgtgaatgctaagtccatcaccctttccggcacactgccaaataaacagctatttaagggggagtcggccgtccgtgtcttgtggtgtctaatgcaggggagggcctggggaggtagcagagcccagaagaagaaagagcccctgttctctgttttttctgggcagaaaaggagtgaaaggtggaaggaccttcctgctctgttttatacttggccagggcttcaagaaaggctgagagcttgtgacattttcttccagccactgcaggctctgccccttcacctaacagcataagatagggctaacagttggggagtatggttgtaactgctcatgtcttaggaggcttcagcctcagcacttttaggtcca

SEQ ID NO: 82926 - DNA, 1032 bp, Homo sapiens
gtgaggggaggcgggggtgggggagccgggccggctctagaatcgagttgtccgctccgagccccggacggacactgatccgcgggctcgtcttggcctttcccaggagacccctgtgcggtgcggagggggcggcggccccgactctgacccgcgccgggggtgggccatggcggagatcagcgacctggaccggcagatcgagcagctgcgtcgctgcgagctcatcaaggagagcgaagtcaaggccctgtgcgctaaggccaggtgagctcgttggccctggggaagggaggccaagccgccgcccacgggttctggcctggggcaaacccaactgagaactttgggcttgcctcgttctggaagctttcccagagaggagcaggatggagccgctgccctcgaggaaaagctagcctgctcggggaagacagagtggataaagacacttaaagtttattagacgatgtgtttccagtggagtaagagtgttacataaagtacttaggaaactcaaggaaacaagtccatctgtcgggggacggaagcttgttggaggggggccgaactgtgggagaggcctcgaataaggaggtggtaaaagagtcagccaaaaaccaaaagtttaagacaggaaagttaaagaccctgtgatttataaaagtcttctaattacaacaacccttaaagattggtggtattgtactcattttacaggtgggaactttcatgttcaaagttacccacaagtaaggaatggggtctgaagccagctcttagtgtcctgtcctttttcaggccataatgcaaaaaggtggagttggatcattcacgttcagggtgggagcctgagaaatcgtagcaagtaagccagggtagaattaagcacgatagggaggccagttcagagttctgtgggaagtaggatgatgtagtggttaaggctctaggttttgcagtgtgagatggctctaggtttgaatctgaactctgccgctttctagctgtgttagtaatcttaagtgtctt

SEQ ID NO: 82927 - DNA, 2607 bp, Homo sapiens
cttgggaggctgaggcaggagaatcgcttgaaccccagagttggagattgcagtgagctgagatcaggccactgcactccagcctgggtgacagagggagactccgtctcaaaaaaaaacaaaaaaaaacaaaaaaaacaggccgggcgcggcggctcacgcctgtaatcccagcactttgggaggccgaggcaggtggatcatgaggtcaggagatcgagaccatcctggctaacatggtgaaaccccatctctactaaaaatacaaaaaaattagccaggtgtggtggtggacacctgtagtcccagctactcgggaggctgaggcaggagaatgacgtgaacccaggaggcggagcttgcagtgagccgagatcgcgccaccgcactccaggctaggcgacagagtgagactccgtctaaaaaaaaaaaaaagaaaggaaagaaaagaaaggggttatgggaagggactttggatttgttagtggagattcttggccagggcagaaggactcctatttggcgagtgattctgctcacatatctccagggctctgtgttagtaacttgattctgggtactttgtggggagtagagagaggaaggggccgggacatctacctggaaggacttagttctagctcttgcctacagaatagttggtactcagcataggacagtgggtatggttccagaccagactgacttggggtgggagaggagaattttggtcctaggaagtagaagtgcagccaagagtgataaagctcactaaagcagcgggtgtttggagggtagtccctggcaactcccactgcttgagttccaaccccactcttcctgttccccaggtgtgcggcgacatccatggacaattctatgacctcaaagagctgttcagagtaagagtgtggccaacactgtgaaatgtaacggggggatgactggaagacccctgtaattgagggtgggagccttaatttggggcgtggagtgggggcaaggggccccaagttagatgggtggttgtggaagaagggcctccgctggacagaaacaggtagggggtaggggactgtttacgacagggcaaaactttctacttccccacaggtaggtggcgacgtccctgagaccaactacctcttcatgggggactttgtggaccgtggcttctatagcgtcgaaacgttcctcctgctgctggcacttaaggtggcagtccccggcttctgcacccccaacctgggcgacctcgggccgggcctgtcttagtccgttccgccctcatctcctatcgtgaccagccccaccttggagctgtgtcactggtgatggaccgattctgcttttgggggtggtcagagacttgatgggggttgaggccagcggggcagcattctgggaggggcagaggctcactgttgcgaatgtggcaggtcattgatgccactggtgggagaggcagtgtggggccagatgacaaagggcctgggtgccttgctagggacccggtctgtgtctggtaggtgaaagaagagccattaggttcatagttgagggaatgggtcagctttacattctctggaggggtcgtgtgggcctgggaggtggctgatgccacacgattcaggcaagaggtgccaggagtgtgctgggcagtggttgtgaggatggcaggctggcgggcacgaggaggtcagagagggatgtgtggagagaccgtctaggcgccagccctggcttggtggccacccccaggttcgctatcctgatcgcatcacactgatccggggcaaccatgagagtcgccagatcacgcaggtctatggcttctacgatgagtgcctgcgcaagtacggctcggtgactgtgtggcgctactgcactgagatctttgactacctcagcctgtcagccatcatcgatggcaaggtaagccagcccagggctccatgggacagggagaggaggggggcttcaggcctcagccccgtcctctttccctgctctcccctgtagatcttctgcgtgcacgggggcctctccccctccatccagaccctggatcagattcggacaatcgaccgaaagcaagaggtgcctcatgatgggcccatgtgtgacctcctctggtctgacccagaaggtgagggcatgtgggcaggggcaggcagggacagccaggaggggttgggaaagagagggagcagggctggtcttcactgtcactcgtcctccacctgccaaatggctggaaccctggaggaggagcagggaggcctgcatggcaggtgctttgagcacacagtggcttggggcatggcccagagggctgtggaggacaaccaagtcatggctccctgaagtgaaggggccttagaacatgacagcagcttcttcagaggtcagaaccccagaatggtagccccctgagacccctcattttgtgggttttccactagtgtagagcagagctgagatttaaagtcaggtcttctgaggaccagccagagttcctgttgtcacaggcacacacgcacaggcagcctctgctccagcgcagacacacacacacatacacatagcctctgctccatcacagcc

SEQ ID NO: 82928 - DNA, 1235 bp, Homo sapiens
agcttatctgcccctacatttgctgtcctggtccccgccatcccacagaccatattcaggccccatgctctggtcccacgggcctctggtggacttggggaggggccaggctgctcaccctcaaggggcagcgctggcagccagagaagcctgaggacatccctctccatccctccctttccgcatcagacaccacaggctggggcgtgagcccccgaggagccggctacctatttggcagtgacgtggtggcccagttcaacgcagccaatgacattgacatgatctgccgtgcccaccaactggtgatggaaggttacaagtggcacttcaatgagacggtgctcactgtgtggtcggcacccaactactgctaccggtgagccggctgggccgggctgggatgggcgggcatctgagccgagctgctcctgaccctgctgccccgccttccagctgtgggaatgtggcagccatcttggagctggacgagcatctccagaaagatttcatcatctttgaggctgctccccaagagacacggggcatcccctccaagaagcccgtggccgactacttcctgtgaccccgcccggcccctgccccctccaacccttctggccctcgcaccactgtgactctgccatcttcctcagacggaggctgggcgtggggggggctgtcctggctctgctgtcccccaagagggtgcttcgagggtgaggacttctctggagaggcctggagacctagctccatgttcctcctcctctctccccacttgaaccatgaagtttccaataatttttttttctttttttccttcttttttctgtttgtttttagataaaaattttgagaaaaaaaatgaaaaaattctaataaaagaagaaaaatggtttttgggtttgtgccagacttggttgggaatgcacagggttgctggcctgggacctggggtggacgtcagggccttgactgcctcagggccccgacctgccaagagggccaggctcaggccagtcagcttgcccagggcctccaggggccgctgcctgctggcttccccagccctagggagagggctctgttctcatgggcagccttatcttattaacagcatacacacacaggcacacacagaatcacaggattctgatttctccattttcctgaagaggagatgggcctagagggccagtggattttgtgctaggtcaggcagctggaaacac

SEQ ID NO: 82929 - DNA, 1080 bp, Homo sapiens
ccccacgcgtgtctgtccccctcgttctgtagcgtttgtacataataaaacaatggagtggagacagctcaggctcgcgtgtaatccgggaagggggagctcaagcggagatttccgcccctatagacctgtgcggttctgagccccggcggggcatggggtaggcacagccgtccaagctgggtctccgggaaccgggacggtttcactgctggcggaggtcctgagcccactctggctgcctacgccgtgacctcggctgatctgcgtctgctcatctgcagcgtttggccgccgcctaggggcagcgtcccagggaggcaaccgcgccgccggcctcgcagccccctcgcggtcggactgcaactcccagcggcccccgcgtggtccgtccggctccttcgggcgcgcctcagcgctgagcctgccgggaagtgtagttccgagggttccccagcgcgggaccttcgggaaaccctggcgcgaggcgtcagaagctgtcggactgtgagcgccttcgaactttggaggcttggctcgggatggaggtttttttagcatggggaccagggaggactacggtgctcgggactgggctgcggcctcctcgcggccccgagtgccctgtgaaatcagctcaggccgcgtccctctagcctgcactttccctctgttcacgctgcttccctccagggcccggcctccaagtgaaggggggcggagggcggtcacctgccagaaggtctggggcgccaaggtgtgtcccgggactcttggctccgtccaggttccaggccccgccccccagcttatccctagccggggctccccaccgtgggaacggggaccagctggccggaagcgccaaactgcgtccctgtccgagccctggggatcaatcaagccgaggagttaattatgtaatgagggggcagggggtcgaggctaatgaagcctcccggggtggggagggaggggaggaggggaccgtacccaggtatccgaccccctctcggaccccttcgaggccccaggggtctccaccccagcccaactccagggccccaaagaggggagggg

SEQ ID NO: 82930 - DNA, 1050 bp, Homo sapiens
caaggctaagtcccacacctgaggaggcaccagacctaggatttgagcctcggtctgcctgaacccagcccccttgctctgcaccaccatgctaatgactaggaggtgactgagggattggcatgggttgctgggctggggggtcttgttcttgccttgttgcctattctgttcccagaaagaaagaggtgatcatttaccaagtcacctccttatccacaggcatcctgggctccccatcccaggaggacctgaattgtatcatcaacatgaaggcccgaaactacctacagtctctgccctccaagaccaaggtggcttgggccaagcttttccccaagtcagactccaaaggttcgagagacatgagggtgggtgtgggataaaccttgggtgtcgtggagggtgtgtgagcccagcagccgctggaggagacaggcaaagcaatgcttctcggagctcctccagtcttccctgtgacccctgactcctgcccttccatagcccttgacctgctggaccggatgttaacctttaaccccaataaacggatcacagtggaggaagcgctggctcacccctacctggagcagtactatgacccgacggatgaggtgggccagtccccagcagcagtggggctgggggcaggggagcaggggggcacgtaggcatcccccatgccaggcctgagccttgctgtctctaccaccccagccagtggccgaggagcccttcaccttcgccatggagctggatgacctacctaaggagcggctgaaggagctcatcttccaggagacagcacgcttccagcccggagtgctggaggccccctagcccagacagacatctctgcaccctggggcctggtgagtgtctccatggcccacacatggacaccctgatactaaatatctatatctgtatatctatatctatatctatctgtacatgcctccatacagcagcaagcttaccccacacccatggtcaatgtgtctggtgacaacagaagtgcccagggggctgggtgtggtggctcatgcc

SEQ ID NO: 82931 - DNA, 1207 bp, Homo sapiens
gacccccgcgggacccatcgggccttggggttcgggaaccacagcagggggttgattgccgtgacctagggtccaggggagggctggatcgctagggctgcagggtgcttgcttcggaacaagctctcggggactatccggaggcagcctgcaggaagccgtagcgccggtacgtgcccctctcctgtctggaggcgggtgtagaagtccgaccgcggaagccagactgctgtccagtcggcgagcgcgtaccattcagcatcggctccgcccgagtcccaccttcctcaggctctgattggctgacacatggcaagcgcgaaaagcctggaccgctggaaagcccggctgcttgagggcggaagtactgcgttgacgtacgccttagtaagggcggaagtgagttttccagcggaagtggctcctgtaaggcagcaaggtagcgtggccggcgcccgagctggggttgtgtccctgctgggctgccgttccagctggactgccgccatggaactcagcgccgaatacctccgcgagaagctgcagcgggacctggaggcggagcatgtggtgagttgagccgccggacaaggggaaaagagctcggggggcgggttcggcaccattcatattcttccgctcggtaggaggtggaggacacgaccctcaaccgttgctcctgtagcttccgagtcctggtggtgtcggccaagttcgaggggaaaccgctgcttcagagacacaggtaaggccctgggagcaccttgcctagctcctgtaccacaaccccagccactccccctacccctgcaacctgactcccgcactccccctggcgtggctcagggaccttgaggatcccgccttcgtgacccctgcttcgagtatttcgatgtagaccctctctccaagtacgtgttcccacggcctggggactacaaccttggggacaccagtctcttgggtcaccctagcctcggggtgtgcgatcaccgctggccttttcctaaccccatctctcgccccaggctggtgaacgcgtgcctagcagaagagctcccgcacatccatgcctttgaacagaaaaccctgaccccagaccagtgggcacgtgagcgacagaaatgagggactgggatctgcacagccattaaattataaatctggaccagcttctgtgtcgatgtgtgtgtgggaggggtgctga

SEQ ID NO: 82932 - DNA, 1102 bp, Homo sapiens
gggagtcagcagtttcagattcttacactccatagctccccttaccatgaggtggagctggcttccttttccctgtcttcagccctccctgtctcccccacttcctggccagggctctcattctggacctgtgttgtaattgtgtacagaggatggcgttggcctggggtgggggtgctcgctttgtcttctgtcctttggttctccttccataatgctcctgtacccagtttatttaaggggacatgcactggaataggaaatgtcccccatctcccttcctgcaccctgctgtgctccctccaaacccaccttgctctgtgttctcaggcccccctgcttttgtctcaccaggacccatacctttcaccttgttcccttccacccctccagttagtccctatctgggtaagggtcttcccttgagctccagggggtggaacccaatgtttacattctcttctgtctctgcccccaccccatgcagcgctttgaggaattggaaaagaacctgctgttgtacctgggcctgttttctgccttgttatttgatgagggggggatggggtaaggacgagggagggagggacagagccaggacctgggtctctgttgaagcagtctgctgtcttggcaagtaggtacctcttagctttgggtccatctctcagtcactcatcagacactggttgagctcctgctccatctttgcctgggatctgctgtctccattgtcactggctgcctggagctctctatgtaccacgtgcagcacccggatctccttcccaaagtgctcatgcaactcctggaagctggagggggtactcacagtggctagaaagccactgtcctctggggatgagatgggttcttggccagttgcctggcacagctcccagtattgggttttggtggggggggaggggggacagcagcccagccagccgcctccagctcgcgccagccagtgcccacagccaagtctccagctcttcctgggtttctgcagccagcttgtaggcccgcccacctgtgccctccaccccaggggtcaggatggtaaaggcatagggttctgcagccttaaggtgtggttcca

SEQ ID NO: 82933 - DNA, 1024 bp, Homo sapiens
gccgggcctccccgctggcgcatcgccacctgcggcggcagcgcattgaccctgtgctctacatgacggagtggttcatgtgcatcttcgcccgcaccctgccctgggcgtcggtgctgcgtgtctgggacatgtttttctgtgaaggtacttctgtggccctccaggccatgaggggctggggtttctgtggtggctaccaggggttctgtcatatttctggtggtccatggacaaaaggtacttgttgggtggaggtttcaccataagcagctgggggctggagaaacaggcctgattttagttctgccaccaacccagagcctgctctccctgccaagatcctgagactgatagcagctcatgtactttcacagggcctcagtttcctcatctgagattggcagtagatggggatgggggctgtgagtctatcctgatcaggacaggctgagatcttgggtctgaccaccccatgctctctactctccacccctgcaggcgttaagatcatcttccgggtggccctggtcctgctgcgccacacgctgggctcagtggagaagctgcgctcctgccaaggcatgtatgagaccatggagcagctgcgtaacctgccccagcagtgcatgcaggaagacttcctggtgcatgaggtaggcctgtgccctcaacgcagcccctgcctgcctcagcccgctcccaccctcagctccattctggtacgcatttcctctctgtgcaggtgaccaatctgccggtgacagaagcactgattgagcgggagaatgcagcccagctcaagaagtggcgggaaacgcggggggagctgcagtatcggccctcacggcgactgcatgggtcccgggccatccacgaggagcgccggcggcaacagccacccctgggcccctcctccagcctcctcagcctccctggcctcaagagccgaggctcccgggcagctggaggggccccgtccccgccgccccccgtccgcagagccagtgctgggcctgcccca

SEQ ID NO: 82934 - DNA, 1018 bp, Homo sapiens
tcaagaagagcagatctagggtacagattttattcttttggatgcagagacaggagaaagggctgaggcacagctggcttccaagccttccccaagaaccatgaaatccagtgagaccgataaggcaggccctgccctggggagctactgctttggggtgacaaagacatttagtgctagaggagggctgatgctgcagctgtggaaagcttcctggagaaaatgacctggaaggtttctgggatgtggctgaggaaggagggcgagggtgcagcctgtgctgggatggccaggagcatgtggagtatgtagccaaaggcggagccccggggcctggagtgctctgctgtgggctgagcctttagctgaagctcgctcagcaggactgggcaggtggatggaggagcctggtgataaactctgggacgaatctggaactgggtttggggacagagctctcagcccgtgactgccctcacagtcttccccaacccccacaggcaacaggacctgtaccgaatcctgaaggcctacaccatctaccggcctgacgagggttactgccaggcccaggcccccgtggctgcggtcctgctcatgcacatgcctgcggaggtcagcgccctggtcctgggccgggaggggcaggggggatctcaccctacagtggtgatgggggagctccctgctccctgcttctcaggccccacccctcctccttgttcttgctcttctcagcaagccttttggtgcctggtgcagatctgcgacaagtacctcccaggttactacagtgcagggctggtgagtgtctggaggctgggtgcatccggggctgtggcgtttcctccaggctgcaggcaggtccttgccttgccccaccctggccttcccggcttctgcccacagggccggccagttctcccctgatgggggcacagctgacttggccctcttctcatggcttgtcccacctgcaggaggccattcagctggacggggagatcttttttgcact

SEQ ID NO: 82935 - DNA, 1256 bp, Homo sapiens
gaagccgataatatctgccctctggaccacactggggatagatgggccctggcgggggaatggctttaaaaatagaagtccaggccaggtccagtggaatcaagcctatgggatgtcggaggagtatccagggagtttgtggactgctggggaaaggttggaggctgtgccagcccttgaagctgtccccctcctgccactttgccttaggtgaagctgcgctgccggaaggggatcccctcctctctcagagccaaagcctggcagtacctgtctaatagcaaggaacttctggagcagaacccaggaaagtttgaggtgcgtgcagctccaaggtgtggggacatgtggccctgtctgtgcaaggggtatcagttcccccagatgctgaggtaatccccactgtcccactgcaggagctggaacgggctcctggggaccccaagtggctggatgtgattgagaaggacctgcaccgccagttccctttccacgagatgtttgctgctcgaggggggcatgggtaaggtggccggaccatgggggtcagtcagcaaacattggctggaggatccaccttttagctaggtggatacaagactgagtcgaaagtggtttttgcccttcaggacttgtagaagagctatctgtaatggactaagtgtcaagccatgtcaaaggaactgtcctgggaaggagacttgactcaggttgtgtgtgggggcacgtcatgggctccttgaagagcttgcatttgggctgggttttggaggggtgggagctacagcagtggggcagggttttcctgcctgggggttatggaaaagatcaccagggacccttaaatgctatgccaaagcatttggaattttgttctatagaccaagcttcctccagatgtcagtatatactcttctctagtagtatgcaagatgatcatcttagggagttctctgatggacttttttttgttttgttttttgagatggagtctccctttgttgcccaggctggagtgcagtggtgtgatctcagcccactgcaacctctgcctcccaggtacaagcaattctcatgcctcagcctcctgagtagctgggattataggtgcacaccatcgtgcccagctcatttttgtgtttttagcagagacggggtttcactgtgttggccagactggtcttgaactcccaacctcaagtgatctgcccgccttgacctcccaaaatgctgggattacaggtgtgagccactgc

SEQ ID NO: 82936 - DNA, 1050 bp, Homo sapiens
cgagggctctggccgcaggggcagactcgccgaagacagaggaggctcgaccctcacccgccccaggaccagggacccccaccgggacccctaccaggaccccttccagaacggctcctggtgccctgaccgccaaacccccgcttgcccccaagccgggaaccacagtggcctcaggagtgactgcacggagtgcatcaggacaagtgacaggtgggcatggagctgccgcagcaacatcagcatcagcaggacaggctcctgaggacccctcaggccctggcacaggcccctctgggacttgtgaggctccggtagctgtcgtgaccgtgaccccagctccggagcctgctgaaaactctcaagacctgggctccacgtccagcctgggacctggcatctctgggcctcgagggcaggccccggacacgctgagttacttggactccgtgagcctcatgtctgggaccttggagtccttggcggatgatgtgagctccatgggctcagattcagagataaacgggctggccctgcgcaagacggacaagtatggcttccttgggggcagccagtactcgggcagcctgtgagtaccagtgggcacccagcgggaccgcctcggggaagcaaaggttgggggagggcgaaacgaaaacgatacactttgcccagactctggcagcccagcctcctctgaggatccacggggtgatcagcgcgagctgccgtgtcttgagcatcctgaggtgcctgtgacattggcatgttagtggagtttcagaccaggggtcaagaggtctgggtttaagccttgcctttgatgggttgtgtgcccttgagctagtggcttccccatttccgtgcctcagttttttcctctataaagtggattgaatgagatgatacctgaggtcatccctgctctttgatggggaactccagctacaggccggatattctggagggttggttgggcgagggttctggtagagacccttggtcccttagggtggatagcctgggaggggtgcaggcatctcccttccc

SEQ ID NO: 82937 - DNA, 1044 bp, Homo sapiens
tcctctgagcctcagacttgctgtgtgaccccagccactcatttgccctgtttgagcctctacttttcttttctttttttttttttttttgagacagagtcttgctctgtcacccaggctggagtgcggtgctgcgatctcggcttaccgcaacctctgcctcccgggttcaagcgattcttatgccccagcctccgtagtagctgggattacaggcatgcaccaccacgcccagttaatttttgtatttttagtagagacggggtttcgcctgttggccaggctggtctcgaactcctggcttcaagtgatccaaccaccttggcctcccaaagtgctgggattacaggcgtgaaccacagcacctggcctgagcctctactttctcatttgtaaaatgggatgggagttattgcctggctggtgccagagggccttaggaagatggagtacaggaatgaatggatcaggctttgagagggactgggcccctgtgagttgaatgtctgggcggattatcattgattggatcctttaggccatcacacagtctgttttccatcagtgatgccgagaaagagatgagcatccttttaactttttgttggactgggaaccagctactttctttcaaagggtgaggctgccctgaggtctaagggatctgggcaggggttggaggattctcactcaccatgtcttcagtctccggggggcaaggcagcggctccggctggaaagaagcaaggagtcagcatggggcagtccctctggggttatatagtcctgccccagggagcccttaacataccaaggtaaccttagccctgcgggtgcccaccccagataccaaaatagcccaactcagggcctctcctttcttggagggctggcagcagctggagcccagcggggaggaaggggggagcatgtcttgcgatgcatgtctcactagggcctgggcaagaagagatgttctttctcccaaagaggggctggaatgtgccagagtttagaggggacgcaacccaaggcatcattctg

SEQ ID NO: 82938 - DNA, 1238 bp, Homo sapiens
aaactggaaggctgaccaaaagcagccctgctggccctctccctggaatgtgcacctgcttgaaggaggggaaaggtttagaattccttcctcccctctctgcttggggtggaagaggacagttggctgagagccagcatctgatcctcctggggtagggatgctgaggctgggccatgggggacctaaccctccccaccacggccctccccaggccttcactgtgatcgaccagaaccgtgatggtattatagacaaggaggaccttcgggacaccttcgcagccatgggtgagccccctacccccaggtgggaatattcaaggctgcagagtctaggaaattcagtggccttgggttccagccctgtcagctccaccttgggcctcagtctacccagctgaaaaatgaatgggatcagctgaattagtgggaagcgcaggcccggccccaggagcctgctccagcccatgcttcccccaaccccctccaggccgcctcaatgtgaagaatgaggagttggatgccatgatgaaggaagccagcggtcccatcaacttcaccgtcttcctgaccatgttcggggagaagctcaagggtgagtggagtgtcctgggtccaaggccccggctgccttttcccagacccttcagggacccatcagcttcatgtgccctctgacccccacaggtgccgaccctgaggatgtgatcaccggagccttcaaggtcttggaccctgagggaaagggcaccatcaagaagaagttgtaagcatcggctcccccacccttccgacccttcccccactccaccagctgctcccacactgacagcctccttaaatttctaccaaggctgggccctgtggctcaggcctataatcccagtgctttgggaggcagaggcaggaggatttacttgaggacaggagtttgagatcagcctggataacacagcatgaccctgtttctaaaaacttaactaaaaaattcgtgggctggccgggcacagtggctcatgcctgtaatcccagcactttgggaggccaaggcgggcggatcatgtgaggtcaggagtccaagaacagcctggccaacacggtgaaaccccgtctctactaaaaatacaaaaattagctgggcgtggtggcgggcgcctgtagtcccagctactagggagactgggacatgagaatcgcttgaaccctggagtcggaggttgcagtgagccaagatca

SEQ ID NO: 82939 - DNA, 1085 bp, Homo sapiens
tgggcgacagggtgagaccctgtctcaaaacaaacaaaaacccaaaaattcctacgaagggttaggcactgccagaggtaagggagtagttaagattgtggtaatgggcggtaagattgcattttcacagcaaatgtgggcggagagggcaaaagcgagtgtctgggaggccaatgaaggaagtagagtgacctgggttttcaggggaggctggggctggcatcggggatgaggtgcgagggagtggaaaggaaccaggaacccaatcgcaactccccttgtgtcacctctctccagcctggaggagctgctgaccacgcagtgtgaccgcttctcccaggaggaggtgagtggggaccggggcggggccggagcagcaaaggggctggggccggggagactaagggcctgtgcgagacgcccctacgtctttccccagatcaagaacatgtgggcggccttcccccccgacgtgggcggcaacgtcgactacaaaaacatctgctacgtcatcacgcacggcgacgccaaggaccaggagtaggggcacccgcgggcctccgctgcccgacgcttctgttcggcccgacctccaccccggctcccaataaaatttaactgatctttgtttcttatgggcggcgccttcagagtgtctgcgcgagggcctcaggtgggagcgccccacaaatgaatggatgcggcctggaggcctgcgggggtcggccccacaatctacgcccgccgcctttttccgcaaggaaggagaaggctcgcgtggccgcgggaagctcagtttttattgaagacagagtctgggagaagaagggggactccggaagacagtgatgcggtcggagattgtgcaggccccgggccgggaagtgggcggtgtctgggtgggcgggaccagcgccggggcggggctacggactcaggctgggagaacctccccctagcccgcgcgagggcggcacccgcggaggtcccggggggcgctgggcagtgtggggcgcggggattggacaagaggccgactgaaggcggagccgaggtaaggccgggcggggcgtggcctcagaggg

SEQ ID NO: 82940 - DNA, 2428 bp, Homo sapiens
ctatagatgaacaccaccatgcctggctaacttaaaaaatatttttttggctgggcttggtggcagacacctgttaatcccagcactttgggaggctgaggtcagtggactgcttgagctgaagagtttaagacaagccacggcaacatggtaaaaccccatctctacaaaaagtacaaaaaccagccaggtgtggtggtgtgcacttgtagtcccagttactcaggaggctgagatgggaggatcacctgagcctgagaggttgaggctgcagtgaaccaagatggagccactggactccagcctgggtgatagagtgaaaccttgtttcaaaatatatgtgtatatttgttgtagagatgggatctagctatattgcccaggcttctcctggtctcttaatgtctgccccatcttagaatcttgtgtttctcaccatctatgtctctgagattttgtttttgtcttcctgtatgtccatctctccccatctctgtctttcatgtctttctctctgtctctgaccacccagtatctctgtgtctcactgtctctggtcatgaaatgtctgtcattgtggcccgtttcacactgtctctatatctgtttcccctgagatccgggatcagttgaaggaagaggagatccacatctaccagttccccgaatgtgactctgatgaagatgaagacttcaagaggcaggatgcagagatgaaggtgtgggaaacaaagaaggaaggcaggccgggcacggtggctcacgtctgtaatcccagcactttgggaggctgagacgggaggatcccctgaggtcaggagttccagaccagcctgggcaacatggcgagaccccacctctactaaaaatacacaaatttgccaggtgtgatggtgggcgcctgtaattccagctactcgggaggctgaggcaggagaatcacttgaacactccagcctgggcaatggagtgagaccctgtctcaaaaaaaaaaaaaaaaaaaaaaaaaagaggaaggggcaggaagcagaggaggcgggtgtggagattgaagctgggaaagagaaagtttctgccgtgtgagccaatggtgaacccctgccccctgccctccaggaaagcatcccttttgcagtcgtgggatcatgcgaggtggtgagggatggcgggaaccggccggtgaggggacgccgctactcctgggggaccgtggagggtgagtgaggccaggcaggggtcctaaggccagcagggagcccggggcctctgggtcaggcgcactcaacatgtgaagttggggtgggctttggtcccaggggatcctaggaggaaaggggggtcgctgggctgcagaccgcggaccctccgctagagtggcagcaggactttcctgtagacccgacccttacgggtgggttggacccgaaactccctgacgttcgctggtccgcgccgccccccctccagtggagaacccacatcactgcgatttcctgaacctgcgacggatgctggtgcagacacacctgcaggacctgaaagaggtgacgcacgatctgctctacgagggctaccgggcccgctgcctacagagcctggcccggcctggggctcgcgatcgagccagccgcaggtgagacccggggcggacagtatcagagcctccaaggtcccgcctcacccatgaccccgccctgaggactcgtccccaccacccgtgactccgccttcaccactcagacttctctctccctccctccctccctccctccctctctccgtctctccctctctccccctctctccccacccgctttgcctccggccctaacctcaaggaactggctccgcctcctagaccccaacctcgccccaggccctgcctcctgggcctcacccacaacctcaggtcccgctcctgattcctgtccccttcccactgtcccgcagtaagctttcccgccagagcgccacagagatcccgctgcccatgctgcctctggcggacaccgagaagctgatccgcgagaaagacgaagaggtgagcacgcacctcgcttccccccgaccgatgccccaggtccccctctggcttcgccaggtcaccgcctgcaatctcgccctgcacagctgcgccgcatgcaagagatgctggagaagatgcaggcccaaatgcagcagagccaggcccagggcgagcagtcagacgccctctgaggccacgccccgcccggccttacctcggctccgccttcagtcggcctcttgtccaatccccgcgccccacactgcccagcgccccccgggacctccgcgggtgccgccctcgcgcgggctagggggaggttctcccagcctgagtccgtagccccgccccggcgctggtcccgcccacccagacaccgcccacttcccggcccggggcctg

SEQ ID NO: 82941 - DNA, 1697 bp, Homo sapiens
tattgtccacccccatccataggacaaggagtacgtgggttttgctgccctccccaaccagctgcaccgcaagtctgtcaagaaggggtttgacttcacgctaatggtggcaggtctgggggttttggagagggaactgcggaggggatgtccttaggaggccctggctgtcccctcccctgaccagttgggcctgttctgtccacaggggagtcaggcctagggaaatccaccctcatcaacagcctcttcctcaccaacctctatgaggatcgccaggtgccagaggccagtggtaagaccctccccaccctcttgaggcagtagcccctgtccccaggttacaccctagtcttttccatctggggactcaggtagttgactgctttttttctgagactttcctcccctgggaaatgggtgcaggcaactgtgatattgacaaaggaaattaattctgcctcagagcctccccggatccctgacctctcccccatcccacagctcgcttgacacagaccctggccattgagcgccggggcgtagagattgaggaagggggtgtgaaagtgaagctgacccttgtggacacacctggctttggggactcagtggactgctctgactggtgaggaagaggaaaggggacagaggctcagcctttcacagtggcgactccctggagagttacaggactggtttgtgctggctccctatctcaaaaggtggtgtctgtttcagagggccactgggtccctgtgcttcttgatgactcacctaggcccccaccagttccccttaatgtctttggagggagccaaagaaatgacattctactcccacagtcctggctagccttgccccctgccctctggcctttgatctctgacctcacatcctctccccacacccagctggcttccggtggtgaaattcatcgaggagcaatttgagcagtaccttagggatgagagtggcctgaaccggaagaacatccaggactcccgagtccactgctgcctctacttcatctcacccttcggccgggggtctggtggggggatcctgggggctggcgcatttagggagggctggggggtctctgccccctgaggctgggcaatgaccaatccctgggtgcaggctccggcccctagatgtggccttcctccgggcagtacacgagaaagtcaacatcatcccagtcattggcaaagcggatgctctgatgccccaggaaacccaggccctcaagcagaaggtgtgagtgatgacctctgacctttgaccccatgtgaagccaaacctgatttcagcttagacttctttgatcttgaagtggcctttctggagcatggtgcatcaggctagattgtaggagaagcttctgaggaaggcgggtggtaagccgccagcatagccatgtctctgaaggctcaaaataggctacatatgcagcccccgggctagatgcctggctgaggcctatttgagggcaggagcatagacatgagaacatagtgacttccctctggcccccaccccgtgtcttcagagccctttcccactgtttctgcttatatctctctcggcctctctttctctctctttttttttttagatagagtctcactctgtggcccaggctgcagtacagtggcaagatcagagctcactgcagcctcgaacttgtaggc

SEQ ID NO: 82942 - DNA, 1212 bp, Homo sapiens
gctcccggcttggcgcggagcctgcatcccggagccgctggcggctcgggcgcctgcaccccgctgaggagctccggagggcgccggggtggcggagccggaggcggccggcaaggtgagagcggcggctgcgcgctgggaggagcagcaggtgcaggggcggccggcggcgcgggcagggggcaccgggagccgcgcccgtacctgggacccgacgccgcccggtgcccgcgctggccggcagagggcagcggcagggcgccgcgggccacacatggctgcgtgaccgcgggatgctgtctgtccccttgctcagggcggcgtgccggcgatggagcgcgcggtagagccttggggcccagatctccaccgcccggaggagagggagccacagagaggcgcccgcacaggtgagggcctcggccgtgcgccgccacggacaggtaacggccggtggggactgcgatgcttggctgtggccggccgagatcctggaagatcggacgtgagctgtgcctctggggagatagggggaggggagctttcggagcaccaactgtgcgccaggccgggaggggctcttcacggcctctgtcccctccctcacggccttcctcatccttactgcctctgccctacttcaggcttcattctgttttatcctggcaattgcagtagcctcctctctgcccctttctctccactgatgcattctctcgccagcttgatctaagtccagatataatcctgtgtctcttctggaaaaccttccctagcgtcccccagtctcctaattaaaagccttagctagtgtccaatccaaaccgtgcgtgctcaggttagtcccaacatcctttgacaccttatcttccattccactccattattttctcttcgctctgccgtaatgccggttcctatttccttatctcctatctctcttgtgacaacatagttattctagttattctgcacccacaattataaccattgatactttaatcttatctctcctaccaccctaagcttcttgaggaagggatgtgtgcctgggtcctctcaggtacacacaggataactgatgtaataaattaccgaatgggctaatataataagatacaataataatagcaaataccaagttttccaaatagacaatataatgtagggattaacacgggcttgagtgtcagagagaccttagttagacat

SEQ ID NO: 82943 - DNA, 1048 bp, Homo sapiens
tcaccagcgtagtcacttggggcccaagccctttggctgtgatgtgtgtggaaaggagtttgcccggggatccgacctggtgaagcacctgcgggtgcacacgggtgagaagccctacctctgcccagagtgcggcaaaggtttcgcggacagctccgcccgagtcaaacacctccgcacccacagtggcgagaggccccatgcctgcccggaatgcgaccgtaccttcagcctcagctccacccttcttcgccaccgcctcactcacatggagccccaggacttcagcttcccaggctatcccctacccgctctgatccccagcccacccccacctcctctgggcaccagccccccgctgacacctcgaagtccctcacactcgggtgagccttttggcctgcctggcttggagccagagcctgggggcccacaggctggggagccacccccaccactggcgggcgacaagccccacaagtgccctgagtgtggcaagggcttccgccgaagctctgacctggtgaaacaccatcgtgtgcacacaggggagaaaccctacctctgtcctgaatgcggcaagggttttgctgacagctcagcccgagtcaagcacctccgcacccaccgtggtgaacgggcccggccaccaccaccatccactctgctgcggccacataacccacctggcccagtacccatggcccctcgaccccgagttcgggcccagccttctggacccagccagccccacgtgtgtggcttctgtgggaaggagttcccccggagctcagatctggtcaaacacaggcgtacacacacgggggagaagccatacaagtgtgcagagtgtggcaagggttttggtgacagttctgcccgcatcaagcaccagcgtgggcacctggtcctgacgccctttgggataggggatggtagggcaaggcccctcaagcaggaggcagcaacaggactggaatgacgcggtccagggagggcggaggcccaggagaccaaagggaggggctctgccgcttagcagagaaga

SEQ ID NO: 82944 - DNA, 1019 bp, Homo sapiens
ctcttacaggtccctgtctcctttataataaaagccagagccaggcacagtggtatgtgcctgtaactccagctactcagaaggctgagtcaggagggactgcttgagccaggaggttcgggaccaagcctgggccacggcaagaccctgtctcttaaaaaaaaaaaaaaaaaaaaaagccaaatataacaaatacaaggccctatatgccaagagatctccaccactacatccgtgactccccccatcatgcattctgctttaaccaatttttcttgccatttctggaacagcaggcaactcccgcctctgcgccctgccgttccctctgcagtgctcctcagagggctatccacgtagcctgctctgtcacctcctttaagtctttgctcatgttatcatatcggtaaagtgtcttgacaaccctgtttaaatctgtagcatccccaataccagcattccttatccattatttctgaaagcaggaattttttaatgctttttatttaatgcggaatccccgtgcctagaacagtctaggacactgcatgccctcagtaaatattggttgaattaataaaaatagctagaacgccactgggctttgtgatgtgtgcgttacgcgcattatctcactggatgcgcacagccatcctgggaggcagcaccgtggcctttcctatttcatagatggggaactgaggctcacagagggagcagcctgtggagacccaggtctctggctccggggcctgccgctaagggctgacctatccccctctccccgcaggtcccgggcgaggcgcccgcgccgtccgccgacccggcgcgtccccacgcgtgccccgactgcggccgcgccttcgcgcgccgctccacgctggcgaagcacgcgcgcacgcacacgggcgaacggcccttcgggtgcaccgagtgcgggcggcgcttctcacagaagtcggcgctgaccaaacacggccgcacgcacacgggcgagcggccctacgagtgccccgagt

SEQ ID NO: 82945 - DNA, 1003 bp, Homo sapiens
ccgaggtttggtctgtggtggtgacggctagggctggagagaattagaattgggcctcaaagctttgtctcaacagatgaaacattcttttggccactccttggcccagggagagacacagacatcttggtatcatctgtcggggtctcttccccacctgactcttcccagggcccagattggttaggtcgtccttggaggtgggtgttattactgcaaggactggcagagcccattgccccaggttacatctgagtgtgtgtctgtctgtgttctgcccctagtcagtggaaaaccgatggggaacctggcccccaaggctggtcccccagggaacgggcagcccttcaagaggagcttagtgacgtcctcatctacctggtggcattagcagcccgctgccgtgtggatctgccgctagcagtgctctccaaaatggacatcaaccggcgacgctacccagcccatctggcccgcagctcttcccgcaagtatacagaattgccccatggggccatctctgaagaccaggctgtggggcctgcggacattccctgtgactccacaggccagacctcaacctagaaagatggccacaggacttgcaactcagggtggtgtctgaagagcagagagtggcctggccctggagcctttttctagtcttttcagaatagatcatgggcctgaggcctccacttcttgaggtctgaggcccagcagcctctagaaggtagcctcctggtgtttgttctcccagtaaaatggttttgggcgataacttctagattattcctggatggccagggaggctctctgtctcagcaggtgatgacgggggtaccaggggtgcctctgagacccattctcgtgtttccctgttgtaccttttgcctgcagggcagagagatctggtttctagcaaattcccagtaggatgtcatgtaagttccttccccctcttagagattgaaggctgtaagagtccagatggtggagccag

SEQ ID NO: 82946 - DNA, 1912 bp, Homo sapiens
ccccttcaatcccatccaaatagtgtgggggttggcctcgaggtttctcaacgtccttaagccctgatttaatacctatgcatagggcctttcatttatagggttttccacctgacgggccctcttccgctgccgtttcgctttggcgccctctggcgcccataaacgaagtgacgcgcctgcgcttcccccaccctctgcccttcgtctcttccccaggtcgaattggtacctctacctttagacacagggcctagcggaagaattccagggcctaagactagaaacgcgcgcttgaagctccctcagattggtccagtgagggaaggggagggctgtagcaaactccacaaaagtcattggtctctttcctcaggctccgccccgtgaggcaatagagaactcccgtaattggtcggagctctggaggcggggcttcgagcgtggctcgtgggttttccgtgaagtcgcggtgcagcggtgggcggcatgtctgtggccggtggggagattcgtggggacacggggggagaggacactgctgctcccggccggttcagcttcagcccggagcccacgctcgaggacatgtaagcaggcctggcccagctcggggtggggaagtcgcccctttctcccgcgttttggggagggttcctccacgtggtcgggaagcgggctggcagcggggctcgggtcctggctctgtgggctgtccctgggtgagccttcttacctcatctgcaaaatgggcgcagcggtgcacacctgaggcaagggaaattgggtggtgcctccgagtggtaactaggaacgcccttcagcctagccctgggaagataccggcaccagataccgcctctgctctccaggcgccgggggtacgagaggggcaaacgaagtgctgagaggtgggagacgttattttttgctggaggaggtcaagaaaggcttcttagaggaagggtctgtggaactaccttctgtaagagaaattgcattttgatgtgcggcgattccaggtggaggaaactgcagaagtagcagcaggagatggaataatgaagagggttttgttagttttggcgagatgttaagggcagttcaggggcacgcccattttatagatgagggaaccaagttccggaaagaggaaatgacctgcacaataccatccaatgaattagttgcagaatctcctggtcccaggccccattacatactacgggggtagctgcctctggcccctgcatcaccctctaacccggagacttggacttacactcctttgtcctatttcagccgccgcctccatgctgagtttgctgcggaacgagactgggaacagttccatcagcctcggaatctcctcctggccttggttggggaagtgggggagctggcagaactcttgtgagtagatggaaagcttcctggtagagtctgagttgtgggggaggggaggggagcatttatttggtcttcaaacattcatgggttcagtttcccctcctgattgctaggctctttgctgttgttgggatgcagagaggactcacgggtccctgccctctaggggcactcagcctcctggaagagagaggtgtgaggtgtgaaagcatcaggacaggtcccgtctaggaagaagcagtggcaacaacccttttcccttcttttgttttttgtttttttggcttttttttgagacggggtctcgctctgtcgcccaggctggagtgcagtggctcaatttcggctcactgcaacatccgcctcctgggtttaagcagttctgtctcagccccccgagtagctgggactacaggtgccccccaccacgcctggctaatttttgtatttttagtggagacggggtttcaccatattggtcaggctagtctcaaattcctga

SEQ ID NO: 82947 - DNA, 1075 bp, Homo sapiens
cgccaaaactaacaaaaccctcttcattattccatctcctgctgctacttctgcagtttcctccacctggaatcgccgcacatcaaaatgcaatttctcttacagaaggtagttccacagacccttcctctaagaagcctttcttgacctcctccagcaaaaaataacgtctcccacctctcagcacttcgtttgcccctctcgtacccccggcgcctggagagcagaggcggtatctggtgccggtatcttcccagggctaggctgaagggcgttcctagttaccactcggaggcaccacccaatttcccttgcctcaggtgtgcaccgctgcgcccattttgcagatgaggtaagaaggctcacccagggacagcccacagagccaggacccgagccccgctgccagcccgcttcccgaccacgtggaggaaccctccccaaaacgcgggagaaaggggcgacttccccaccccgagctgggccaggcctgcttacatgtcctcgagcgtgggctccgggctgaagctgaaccggccgggagcagcagtgtcctctccccccgtgtccccacgaatctccccaccggccacagacatgccgcccaccgctgcaccgcgacttcacggaaaacccacgagccacgctcgaagccccgcctccagagctccgaccaattacgggagttctctattgcctcacggggcggagcctgaggaaagagaccaatgacttttgtggagtttgctacagccctccccttccctcactggaccaatctgagggagcttcaagcgcgcgtttctagtcttaggccctggaattcttccgctaggccctgtgtctaaaggtagaggtaccaattcgacctggggaagagacgaagggcagagggtgggggaagcgcaggcgcgtcacttcgtttatgggcgccagagggcgccaaagcgaaacggcagcggaagagggcccgtcaggtggaaaaccctataaatgaaaggccctatgcataggtattaaatcagggcttaaggacgttgagaaacctcgaggccaacccccacactatttggat

SEQ ID NO: 82948 - DNA, 2245 bp, Homo sapiens
tcgggcccggcgggcttgactctgggccggagcttctcgaactaccggcccttcgagccccaggcgttgggcctcagcccgagctggcggctgacgggcttctccggcatgaagggctgaggctgcaaggtcccgcaggaggcgctgctcaaactcctggcgggactgacgcggccggacgtgcggcccccgctgggccggggcctggtgggtggccaggaagaggcgtcccaggaagccggcctgccggcaggagcgggccccagccccacctttccagccctgggcatcgggatggactcctgcgtcatccccctgaggcacgggggcctgtcactggtgcagaccacggacttcttttaccccttggtagaagatccctacatgatggggcgcatagcttgtgccaacgtgctgagtgacctctacgccatggggattactgagtgtgacaacatgttgatgttactcagcgtcagccagagtatgagtgaggaggaacgcgaaaaggtaacgccactcatggtcaaaggctttcgggatgcggctgaggaaggagggacggcagtgaccggtgggcaaacggtggtcaacccttggattataatcggtggagttgccactgtagtatgccaaccaaatgagttcataatgccggacagcgccgtcgttggggacgtgctggtgttaaccaaaccgttaggaacccaggttgctgtcaatgcccaccaatggctggataatcctgaaagatggaataaagtaaagatggtggtctccagagaagaggtggagctggcctatcaggaagccatgttcaatatggctaccctcaacagaactgctgcaggtttaatgcacacatttaatgcccatgcggccacagatatcacaggctttggcattctaggacactcccagaaccttgcaaaacaacaaagaaatgaagtgtcctttgttattcataatctgccaataattgccaagatggctgccgtcagcaaggccagtggacggtttgggcttcttcaaggaacctcagctgaaacctctgggggattactgatttgtctgccaagagaacaggcggctcgcttttgttctgaaatcaaatcctccaagtacggagagggtcaccaagcgtggatcgttggcattgtggaaaagggaaaccgaacggcccggatcattgacaagccgcgagttattgaagtcctgcctcgtggggccacagctgctgttcttgctcctgacagttcaaatgcctcctctgagcctagctcgtgagatgaaagaacagaagttgtttggaccttagagccattgtccacaatcacggatggttctcaagagttgattgtaagaaatttccaaagaaggctgcctgcatagtggttccggctgccctttctaggtgattggaatcagcccatctaaagcagtctttatatgcattccgaggccagagtaacattttgaactttggggggatatttgttcatcacttgggtagaagaggagcaaaaatacctctgttttctcttgccaaagtaagatgaagctattccaggttgagggatttttctttgcacggggttgattaatttctgcacagggagtgagattattaaagtaacacacacacaaagtaaattgcaaaatgaaaaaaattagaagcaaatgagttttggaccaatattgttgataaatctaaattgttaagagagatcttataatgcaacatcaaattctttattcaattttactgaagtactggctctttcctgctctggacaagaattgagcaacttgtctgatgactgggaaaggaggacctgcaaccatctgacttggtctctgttaatgacgtctctccctctaaaccccattaaggactgggagaggcagagcaagcctcagagcccaggcctcagtggtcattaagatgttaagtcttttgcggcagattcctggtgatttgatcaataaagagtaatttcttgctaaataaataaaagaaaccttgttgaaaaactattctggctaatgtttggtggtttgaaattcaatacagtcttataaaacgaaccagcttatacactgagtctggtatagcagagagagagtgttttccctgatgctggtgaattgggtaatttaacacccagatttagggttgcaccttccccctgaaatgacagaaaaggactcgaagcaggcatacgccccaagggttagagagtgg

SEQ ID NO: 82949 - DNA, 1048 bp, Homo sapiens
tagcattcttcactcagttgttctgtgacagcatgctgagtgacttgggtgtgacctgtctcttgctacttcctagttggggtttgaagaagtctcagagctgcagggggaccccggctacccactcgggcggtttggagaagccatcactgctctgacagacatcaacggcgatgggctggtagacgtggctgtgggggcccctctggaggagcagggggctgtgtacatcttcaatgggaggcacggggggcttagtccccagccaagtcaggtgacgtatgctgcctgccaatcacactccattctcaggtgccctaagcccccaagcccagaccccactccccagcccgatccttccctccctccaacctacctctcctcagcttagtggcaatttctttcttgctctcagcggatagaagggacccaagtgctctcaggaattcagtggtttggacgctccatccatggggtgaaggaccttgaaggggatggcttggcagatgtggctgtgggggctgagagccagatgatcgtgctgaggtgagatgggtctcccaggtcacacctgatgaccccagctcttatcctgttttgtttatattttattttatttatttattttggttttttttagagacagggtctctctttgttgctcaggctggagtgcagtggcatgatcataactcactgcagcctcgaactgctgggcttaagtgatcctcccacctcagcctctcgggtagctgagactacaggtgctcgccaccacacctggctaattttttttttttttttggtagcaatggggacttactttgttgccccagctggtctcaaactcctggtctcaaactatgctttctcctcagcctcccagagtgctggagttacaggcaggagccactatgcatggcctaatttttattttttttaatatatggtcttccaggccaggcacagtggctcacacctgtaatcccagagacagcttacatattggaaaacatataattaaaaattagcagggtgtggcagctgg

SEQ ID NO: 82950 - DNA, 1024 bp, Homo sapiens
ccatgcttgtgaccctgactgctggggtccagtcttcagcacaaaagcaagagccttgagcctgggacagctccctggggggctttagggtggaggcccgtggactgacgggcaggctggacttgggctgcgcctccacccccacctgtactagtcccccttctctccacagccgtacacggccttccctcccgcagtgcccgggctgcctccgggcctcccgccggccgtctcctttggctccctgcagggggccttccagcccaaggtgagctcccaatccagacaccaccaccgcctaccatcttgacaaacccagacacgccgggtccaagcacccttctcccattccccaaagtcgtgcccatcctcctgccctgccctgctgcacccagttttctccaaagccatgatccctccctgcccagtgtcccagcttggttctggatccctttgtgcttggtgccagctctcctgtctgatccctccactcccctttcccagagcacgaaccctgagctgccaccacgactggggccggtgccgagcgggctctcccagaaggggacacaggtgagggggccagggcaggtcctgggggagctggaaggtgtgttgcggggagaacagaactgacttgaggagagtgaactgctgattcctcccttgaattcacaatcgggtgttcctgggtgtctaatagagagggaatttctgtaaatagctggctttcccaggcatgaggaatgagagtttcatgagcttgtcccagaaataggatgattaggacaatggtttttgtagtggttttcaaactttttaataaagttacaaaacactttttttccaaatgacatcataccaggaagccctgttcggaaaacaaaagataagctgccccttggtgaagtgaggagagccagagcctccctccccttagcacttgcagcagtgtagaccccagggctgcgggaacgttgtgaaacgcacaggaccagtttcctacagggaagactaggccaga

SEQ ID NO: 82951 - DNA, 1481 bp, Homo sapiens
agggtcactgggagagcagaggtcacagcctctagagaagggagaggggcgtgtgcatgggagtgtggctcatctcgggggccatggggcctcctgaggtacacctttgcccctgtaagggcctctaggccctgggcctgcctccccaagggctcactaagccagaggccaaagtgccccctcccgttcacctaccacccaagtcctcatgccctccgagggctgggggaggaggggctcaaggaaggggggttccatgtacatatttatcacccctttcacatagccccaagaccttttgtacatttttacaggggtgcccctcccaacagttcccttcctggttaattaaaccctcagactggtgctgtgttcctagcctctggcctctctgtggggaaaggggactgcagggggaagagccgggaagggacagtcaggcttctccctgggaaggtggggccagcaggagatgaccaacagggggcaggacctggggacctgggctggagggaagggcagaagcttcctacttggctgacagccccggttcccccaacatgttcccgttcactctgcccccacccccaaaggctcagcctctaaatctcagactccaccacctcttaatggctcagtccccttcaccccatttccaagtgcccccaggactcctgggccctgcttccctgaaccctgttctccaaaaccctgccccaggctaagggtggccagagaaggtcaccatgtaccacacaccaaagaagggggtcggcccaggggtgggcgacacaggcagcttcttcggcagcctcacggcagcaaccccagccttcccaaagcagcaggcgcctccaggctggggcccaacctagaaggcaggggtcaatctaacaaaaccctaacgttgacttttttccctggtggggcttcttctgtaacatgacttgcgaatatttatataaaaacgagtgttacaatgagacccccggctcctctttgagtgtgtgtggggtgggttggaccagggtggggtgtgtgggtcctggggtaagggagggatgaggacagtactgtccgtatcccgccaaggttttcctccctgccatccactgggcaagttggtctgccatttctggagggatgggttcgagggttgggcactgaagtttttcacactgtttttctataatccaggaatacatagtatgtaggattcaagcaacccagtaagacactgagcaaaacattaaatttctccttcacctgccaaccttcccaagccccatccccttcccccaggtaaccgctgtaaatcattaggtgtatattcttcaggtcctttctatgtgttctcgcacatgtctgcacaggcagagtatgtttaaaaagatctgtaatttaaaatttttctggtttttgtggagtaatacatagtcattataaaaccattcaaacacacaaatacagaacacggaggg

SEQ ID NO: 82952 - DNA, 2457 bp, Homo sapiens
ctgcgcacgcgtgcctgagcgagcgagcgagcgagcgagccctgagaggacggacccaggtgcgctcctgcccgcccaccaacccagtcacccctcaggggcgcgcgggaagaggaaggggggcgtgggacgagtagtcggggcgcgcgcccaccacatctagccgggggaccaggacctggtggcacgaaccctcccttctctcagcctttcgcggtcgggtgatgggggggctccctgacgggcttggatgacgagcttcccagccccgcgacccttgtgtgcgtgggctcgggttctggcgggagcccctgggccgtgcgcgcagccggctcgctccgcctccagccgcgcacgcgcgggcccctcccccgcccggcgcgcacgttgggtggggtgggagtctggagggggcggggctatctcagggctagtggcaacttgggcagaggtcaggggtcacgcgaggtcagtccgtcgggagggctagggagatggtcacgaaacctgaagtcaagagttaaggcttgttggcttctggtgagctcgggtcttgggaacgtgtggcggagtagggagtgaatcaaagccggcactgtggtttaggaatttccttaaacactggggaagcatttccgggcctcctgcgggttcacactgcctgtttccggcgcgtggttcttggcagtgcggcctctcgcttttgactgctcctgagtctccttttgctgtggttcttgtatttggggaagtgtctcaaggcgcaggtatgggatatacagcgccctgccctgaatcctgggcggattttcctgtgaccagcctgtttgttgactcttcccgggagttccactctcacttctgcgttcagccctcactggaaaggcccgcaggcaggtagcacctttctgaggttctggatgtgacagcttttttttgctgtattttttttttgtcttccattctgtggttggagcctttacacttaaaatttttgaactttctttcttcactcctttcctgctcctgcccccaggcaggatcgtatgtccctccggaattcacaaaacatgatttgcatttccctgaaatgtgagattttcctactactgtagtttttctgtttctagtcttttaactgatttgggtatatttaaacgtctcaaaaaactggagtaaataatacgctttgatggatgtttcaggtgtgattcccttcagtacggcggcaccgtggaagtgcagactttcacagggggtgtggtctcagctcacacaggtgagggatctgctaccattttgtgtgctgatgctaatgggagaaatgtttgagataaagcaattataggtccgtattggggattttcactctagagaagcatgggaatgtttgcatgtgatttttctgtagagggtttgattatagtacaacaacagaactgaggctgtgggttgaggaaaacgtggtcaacctggctctaccaggaagagtagcaggttttccttggttttggcatcagactgtggattgaagccctcctatcacttttttactgtgtaaccttccgcaaatcataaggtcttaacttcgtaacttacaaaacagattatattagaatgtaagctacatttaggtcgggaatcctttctgcatggctatatccgttgtgtgtaggaggaagtcaatatttgttatgctgtgaaaagcacttggtttttaaggtaggtgtgaggattatagaacacatcaaacaggtactaaaagtatcttatacatagtaagtgctcaagaaatgtaacctgtaatttctgtgtttctctttattcagtgttatttctggttttttaaaaatactttttcatcccctttaactgcatttctgtctttttttttttttttaaccctactttaggtgctccagaggctggtggacctgagcggaggctgggacgccctggtgggccccgggccctggaaggcgggtcccggtggccggtggcccagaatgaggccagctcccagcatgccctgcagccggacgccagcccctcggccagcagtactggtgataacaacccagtcattcttcaggcatccaagggggagcctgggagtgggaccatgcagagcagcccctcccctgctcaccctcagctcccagtcctacagacacaggtttgaaagtgggaagagttccttctctgcttctgctttgtggattgttgagtgtgaggcagaagaaatgtggcaggggaatatttgtggagagttttggagaatctttggtgctcgggggctgggctgtagtatatcaggtctgttggatactcacattccatttaacattagtgtaatattatctccaagagtgtaaaagcgcctcgttacctgaaaaaggttgaattaggctaggctggaaatggaggtcgtggcaccatgcttctaataccatacgc

SEQ ID NO: 82953 - DNA, 1060 bp, Homo sapiens
tcagcctccaaaagtgctaggattacaggtgtgagccaccgtgcccagccctgttttccaccctccttccctccctccctcccttccctccctccctccctcccttccctgccttccctccctccctccctccctccttccttccttccttccttctctccctccttccttctgagtgcaatggcacaatcttggcttactacaacctctgcctcctggttcaagcaattctctgcctcagactcctgagtagctgggattacaggctcacgccaccacacgtggctaatttctgtatttttagtagagatggggtttcaccatgttggtcaggctggtctggaactcctgaccatgtgatccgcccgcctcggcctcccaaagtccaccgagcccagcttccatttcttaatgcttttgcagtaccttgtaaagtgacgtgttgggtgtttgagaacattggctatgcctgcagcccatgcctgtccagtgaagaggttaaggtggcctgggatttattggtggctgttgaatttagtggtagctcacatttattgcataagtgagtttgccacacttgttctgaaaatggagggtaaatagggagttgtttatgtgcatgaaatcactgaggctctgaaacgatcagaatttgaaatcatatgctatatatatatatatatatgtatgtatataaattttttttttccttttcctttccgagacagagtcaccctgtcatccaagctggaatgcagtggcgcgatctcggctcactgcaacctccgcctcccacgcctcccaggttcaagcgattctcgtgcctcaacctcctgagtagctgggattacaggctcccgccaccacgcccagctaatttttgtattttcagtagagacggggtttcaccatgttggccaggttggtctcaaactcctgacctcaggtgatccacccaccttagcctcccaaagtgctgggatcacaagcatgagccaccacccccggcctatatatatatatatttttaagtttgggaactgtgtaaatgtcaggacat

SEQ ID NO: 82954 - DNA, 1105 bp, Homo sapiens
cactcttttttacacctaatcagtgttaaacatttcacgtataacgtttcagtattttttacataaacatatgcatttttacaaaagtagtatttttaaaaacaacagtgtgtcagttgggcattatagcatatttctaagcttaatgcatcatgaaaatactctgagtaagtagaattctacaatgatgatgaccccttgtatctagaatcaagagggaagtatgtgttccctactcctctgggaagctcctcttgggatatgatttcccaagtctctcctatgtctatggggtgtggagattgtgttaaataatggaaagagcatgaaatttgctgtctggagtcctcagacctatttttgattcacattttctattactttctagctgtgtgatcttgggcaaatcacttaatctccctgatcttttttccttcttcatctccctgatcttttttcccttctctgaagagagtatgatacctgcctgtaagtttggtatgtggactaaacataagcataacacactcagcccacttagtgctcaggaattcagccgtggcagtgagatggagtgtgtgtttagaactgttgattgatctggctctccctgattaggaggccgagatcgagactcggattgctgagctgcggaaggagggtttctggtcactgaagaggctgcctaaggtgccagagccccctcgccccaaaggtcactgggactatttgtgcgaagagatgcagtggctctctgctgactttgctcaggagcgccgttggaaacggggtgtggcccggaaggtaggtcttccgctgggacttccttccttttccttttcaggtctgttccttcccggtttgttggaaggggaccagacagaatggtgtaggcattaagagcaaactcttgattttccagatttcttggccttgattattttctttgcctttgggtggggaagtctggctttgagtgttttcaccctgggtcttcattcccacaggtggtgcgcatggtgatccggcaccacgaggagcagcggcagaaagaggaacgggcccggagggaggagcaggccaagctgcgtcgaattgcttccac

SEQ ID NO: 82955 - DNA, 1067 bp, Homo sapiens
gctggtctcgaactcctgacctcacgtgatcctcccacttcagccttccaaagtgctgagaatacaggcatgagccactgtgcctggcccacctacctattttttgagacccagttccagctgggtgtggtgatgcatgcctgtagttccacctacgtgggagggtgaggcaggaggatcatttgagcccaggagtttgacactagtctggccaacatagtgagatctcatctctttaaaaaaaaaaaaaaatccagcttcagattgcaaaccttccctccacctgaggcgaagctggctcttcttcctgcatgctccctttgtgcttcctttagaccatagtgagcccctaaggttatttagttttactttcctaagaggccagcccaggatctggttaaagaaggtctccctaaacatcgggtaaaagtacataaataaaatggttatcttggtgagcagtccctttcacatctgtggcaggtggtgcaattcaagcaacagtcccggcttgaggaaaagcgcaaaaaagccctggacctgcatttggacttcattgtggggcaaactgaaaagtactcggaccttctgtctcagagcctcaaccagccattaacctccagcaaagcaggctcttccccttgcctcggctcttcctcagctgcctccagtcctccaccccctgcttctcgcctggatgatgaaggtgtgtgttctctttggtcctgttactcttcctcatgtaccctttccagagctgaaaaacccaccctgtggcttgcagggcccgtggactttgtgaccttgttctcctgctatagatggggactttcaaccccaagaggatgaggaagaggatgatgaggaaacgattgaagttgaagaacaacaggaaggcaatgatgcagaggcccagaggcgtgagattgagctgcttcgccgtgagggagaattgccactggaagagctgctccgttcccttccccctcagctgttggaagggccttccagcccctctcaaaccccctcatctcatgatagtgacacccgagatgggcctgaagaag

SEQ ID NO: 82956 - DNA, 2396 bp, Homo sapiens
ggtgcctttatttgttacctggcactttcacagttccttccccaggcagtggggccaggatttggtagctggtgctgagagaaaacccttgattgtattcttgccctgggattataccagtggcaactgtcactcaatgggacagtgattctcctgtgacacctttttcaagtttgtgccattcttctgctactgtaaccttagacccttcccttttttatcttttgccatacagataaagcccccaccctctgctgtcacacagcgcaacaaacagccttggcatccagatgaagatgatgaagagtttactgccaacgaagaggaaggtcagggctgttcggtttgtcctattgccccttaccccttgaatgaattgtctggacctaacctttcaggctttctcatctgtttcatttggactgtgtcctgtgcctctagcctctatccctattaatcttgcttctgtctctttcctagcggaggatgaagaggatactatagcagctgaggaacagttggaaggggaggtggatcatgccatggagctgagcgagttggctcgagaaggtgacatttaccagacattttactaagcatccacttggtgtctgcggtgtgcagtaccaaggataaagagatgaataaggcactttgtatccaccctggaggaattccatgtctaatgactaagacagacttgtaaaccagtaatgataagtagaaagtgatgagtgcttatgatagaagtttaaatggtgatgtgggagtgaaatggagggaagagctaatgtaggaagatactgacagcatttgacctggaccttgagaggctcaccaggttgataatgttcttcccaattcccatggtacttcccccaggttgtggggcttggctttgctagctgatgctgaaagtaagctcttttgcctcccctcagacctgggcctagcagtatctacagagacctaggtaaaattaactggtactactcagacctccccttctccctcccctcagagcaaccaaaagctttttgtttctcttccaggtgagctttccatggaggagctattgcagcagtatgcaggagcctatgccccaggctctgggagcagtgaagatgaggatgaagatgaggttgatgctaatagctctgactgtgaaccagaggggcccgtggaagcggaagagcctcctcaggaggatagtagcagtcagtcaggtgaatatgtggtcatgaagcaggagctggggagggtggccattggaagagcaggtatgatgagcagtaagccttggtcttaccctttagactctgtggaggaccggagtgaggatgaggaagatgaacattcagaggaggaagaaacaagtggaagttcagcatcagaggaatctgagtctgaagagtctgaggatgcccaatcacagagccaagcagatgaagaggaggaagatgatgattttggggtggagtacttgcttgccagggatgaagagcagagtgaggcagatgcaggcagtgggcctcctactccagggcccactactctaggtccaaagaaagaaattactgacattgctgcagcagctgaaagtctccagcccaagggttacacgctggccacgacccaggtatccccaggttctggcctctcctttctcatgtcttgactttctcatgtccccacaacaaatgcctcatttccattgtgttacctatatttcctctctgacaggtaaagacgcccattcccctgcttctgcggggccagctccgggagtaccagcacattgggctagactggctggttaccatgtatgagaagaagcttaatggcattcttgctgatgagatggggcttgggaagaccatccagaccatctctctgcttgcccacttggcttgtgagaaaggtaagtaggcaaggccccttcttttgttccccctagtctagctccctgggagcttgttcagtgatgactccagcttcattgacttttgctttattgactccggtcattaactgtatagagaggacagtgtaggtgctaggattcctaggaagggccaaagggtggccagggttataactgagaaatcagaaccacagaatttacatttccttaccatctctgatttttttgcctaacaggtaactggggtccccatttaatcattgttcccaccagcgtgatgttgaactgggagatggagttgaaacggtggtgccccagctttaaaatcctcacttactatggagcccagaaagagaggaagctcaagcggcaggttcgatgtttcatgtggtcactttcctcccattgatgcctcctttatttttaagccctttcctcaggtgaattcctttctctcctctttcttttttaa

SEQ ID NO: 82957 - DNA, 2099 bp, Homo sapiens
tggtctgcccacagtgcttccttatatcacttcctgtgtcatggtatcattttgtgtctgtctccttcagcagacagcagatcccttgagggcttgcagttgactcatctttgtgtggttggtgtctgatatggtgtgccgtatgactccattagtgtttgctgaggggcttaggctggggctcggtgcctgagttctcctgtttagcctccagcttaatttgcttttaggttttgaggccttttttactgcgccgagttaaggtggatgttgagaagcagatgcccaaaaagtacgagcatgttatccgctgcaggctctccaagcgtcaacgctgtctctatgatgacttcatggcacagaccacgtaagggaggaaggagggtgggccctgggactcgagattggagtgtaggtggctgttaggacgtctcatttatttttcctctttccccagaactaaggagacactagccacaggccatttcatgagcgtcatcaacattttgatgcagctgagaaaagtttgcaatcatccaaatctgttcgaccctcgaccggttacctcccctttcatcaccccaggcatctgcttcagcaccgcctctctggtgctaagggccacggatgtccatcccctccaggtaagtatgattccattaatatgaaatgtaaaggttatcggcattactccaaccatgtacctcttttcgttagactggggtctgacttttgcatcctcatgactcccctatcattcccttagttttattgtactctagccatgtgacttaacgatggttcaacttaatatttttttgacttcactgtgaatttatcaggatgtaaccccatcgtaaattgaggagcatctggacttagaatgattcagcttacaattttttactttttgatgggcttatcaagggtattaaagggtattaaattctttacttgctgagggtttgttggaatgtaacctcattgtaagtccaggagcgtctgcatcacattttgtttatccacttatctgtcagtgggcacttggattctttccaccttttgtctcttgtgaataaggctatgaacataggtgtacaaatatctctgctttttattttgggtatttacttaacagtgaaattgctgtaacatggtaattctatttctgcatgttgggaaaacctccactgttttccatagtagctgcatgttttacatttccaccctagcagggcacaagtgttctaatttctccacatccttgccattacctgttatttctttttttttaattacacccatattaatgagtgtgaattggtatttcattgtggttttggtttgcatttccttatttccttagtgatgagtgctgtcaaggatcttttcatgtgctcattggccacttgtctatatttttgaagaaatgtcttttgaagatttgttaattttgggtgtttgtgtggtggttgttgagctgtaggacttcattatatgctttggaaattaacccattatcagatgtatgacttgcaaatattttgtcacattccataagttgccttttcgctatgttgatagtgttttttgatgcacaaacacttgtttttggtggttttttttttcgagacaaggtctatctctgtcacccaggctagagttcagtggtatgatcatagcttactgcagccttgaactcctgggctcaaatagtcctcccgcctcagccttccaactagctgggaccacgggtatgcgctaccaagcctggctttttttttttttttttttttgaggcggagtctcgctctgtcctcaggctggagtgcagtggtgccatcttggcttactgcaacctccgcctcccaagttcaagcaattttccacagcctcccgagtagctggggatacaggcacgcaccaccacacccagctaacttttgtgtttttagtagagatggggtttcaccatgtttgccaggatggtcttcatctcttgaccttgtgatctgcccaccttggcctcccaaagtgctgggattacagatgtgagccactgcacccggccctgctgatttttttttttttttttagtt

SEQ ID NO: 82958 - DNA, 1073 bp, Homo sapiens
tgactgtgctttctttcttgtggcagcggatagacatgggtcgatttgaccttattggcctggaaggtcgtgtctctcgatatgaggcagacacatttctgccccggcaccgcctctctcgccgggtactgttagaagtggctactgctcctgaccccccaccccggcccaagccagtcaagatgaaggtcaacaggtacaaggactaaggaatgaggggatggttcctagaataagtggctgaaagctgcccagaggggcctggggtgggaagaaaagagttggatgcaaggctggaatatttatatgggatgggtgcaaacgtggagggaatcagggagagaataactagaagagggtactgggatgggcttctgtgttagtcactttttctccctttctctctgttcggtgctttctgattgtcttaaattcctattccttgttctcctttgggtctctttccttttctttgcttttataatctgtctctctgtttcattttcttcttttctttgatattgctaccccttattctccttctgtccctacccactctcttaattttttctcacaggatgctgcagccagtacctaagcaagaaggccggacagtggtggtggtgaacaacccacgggcgcccctgggccctgtcccagttcgacctcctccaggtcctgagctctcagcccagcccacccctggcccagtcccccaagtgctgccagcatcactgatggtttcagcctcacctgccgggcccccgcttattcctgcatctcggcctcctggccctgtcctcttgcctccactgcagcccaacagtggttctctcccccagggtgagttgaaagggagccaaggatgatgcgtggtgcttcagaaaggttgttcagactgaggaggaagtagtgaaattaaagggtttgaggagctgggctggggacacgggtctagtatttgatgggttggaagggagtatggaggcttctggcaccaggctaaggctttagtcagggtatatctgacaggtgtttgctttgtgtctgcagtgttgccatcccccctgggg

SEQ ID NO: 82959 - DNA, 3994 bp, Homo sapiens
agatgggaggaaagctcaggaccatgagagcatcaaattttaggcagctgggtcaggcatgatggctcatgcctataatcccggtgctttgggaggccaaggtgggaggtttgcttcagccaggagtttggagctgcagtgagccatggttacgccactgcaatcatgagcaagaccctgtgtcaaaaaaaattgaggcagctaacatatgttaggcattatgccagacattgtcagatcataattaagagcccttaagaaattgacatagggagatgacacatagatgaataaatagtggtaagcctagcagtagaaaagtattggggtaaaaggacagtgtagagcagatggtggtgattagctcagtctggtggcaggccatgttagaggatataaaagagattgctaagcaaatgggattggaaggagtagcacatgaaaagctcaaaggctgtaggtggaggctgagtttattgggacatggtaaattgtgggaagggcttagttgtttgaactggacactcgggggagaggtgtgcttcatggggtctgtgaagtggtgttgagcaggatgagccttgtgtacaataaggccttctctgtttttagcaggcgaagtggtcagcatcgggcagttagcctcactggcacaacgtccagtggctaatgcagggggaagcaaacctctcaccttccaaatccagggcaacaagctgactttgactggtgcccaggtgcgccagcttgctgtggggcagccccgcccgctgcaaagtaggtaaaacccaccccctgtcctgcctttttcctcctcttccctgtctctttgtttttgtgacttttttgaatgtcagcctttatgtttcttacccaagcttttggtgggtggggccaacgggcatggttggagggatcttggataaagatagggaagaggtcattctagagaatgtattccctctctgttcttttcttctcttcttgccttgcctctgccctcctcaggctgatagctgcttctctctctctttctctcttcccttaacccagggaatgtggtgcacctcgtgtcagcaggggggcagcaccatctcatcagccagcctgcccatgtggccctcatccaggccgtggccccgacccctggccctacccctgtctctgtgctgccttcttcgacccccagcaccacccctgcccctactggcctcagccttccgcttgctgctaaccagggtgaggctcctggccttcctacttagcccttgctggccttggtccttccaggcatgcgctgggctactgtctgtccagccttccctcagtgttgttttcccttgcgaatatctatgatacctgtctgccaccttctcctgcccctggacttcttccattctttgggtcttttgtttcttttctaccttcctctcagtgtagcttcctcttgcagtgccaccaaccatggtgaataatacaggcgtggtgaagattgtagtgagacaagcccctcgggatggactgactcctgttcctccattggccccagcaccccggcctccgagctctgggcttccagctgtgttgaatccacgccccacgttaacccctggccggctacccacacctactctgggtactgctcgagcccccatgcccacacccactctggtgaggcctcttctcaagctggtccacagtccttcacctgaagtcagtggtgagtccaggtggctgaggccagaaatccttgccaggaatggagacgagatggggtcgcctcaaggtttcttagttttagtacaggttttttcatatcagcgtactgccttgatttgtagtgggccccagaactgggctgcctgagccctgacctaatttcaagatctatttgctggaatcttggaggggaagaaaatctaaagttgtcagattacttggatgtttgacttcatgttgtgggagtgaatgccttctgggaaatgggaagcttgggggtatgggaaagatgggacagggagtagaaaggctcaggaaaagaattctggggctaactcatcctctctctccacagcttcagcccccggagctgcccccttgaccatctcttctcctctccacgtgccatcctccctccctgggccagcctcttctccaatgccaattcccaactcctctccccttgctagtcctgtgtcctctacagtctcagttccattgtcatcttcactccccatctctgtccccaccacacttcctgccccagcctcggctccactcaccatccccatctcagcccccttgactgtttctgcttcgggcccagctctgttgaccagtgtgactccaccattggcacctgttgtcccagcggctcctggacctccctccttggcaccatctggtgcttccccgtcagcatcagccttgactctaggtttggccacagctccatccctgtcttcatctcagacacctggtcaccctctgttgttggctcccacctcttcacatgttccagggttgaactcaaccgtggccccagcatgctcacctgtcctggtgccagcttcggctctggccagtccttttccgtcagcaccaaatccagctccagctcaggcttcccttctggctccagcatcttctgcatctcaggctctagccacccctctggctcctatggcggctccacagacagcaattctggctccttctccagctcctcctctggctcctcttccggtcctggcaccatcgccaggtgctgctcctgtcctggcttcatcacagactccggttccagttatggctccatcgtctactccaggaacctctttagcctcagcttcaccggtaccagctccaacccctgtgttggctccatcatcaactcaaactatgctaccagccccggttccgtcacctctcccgagcccggcttctacgcagacactggccctagccccagctttagcacccactcttggaggctcatctccatctcagacactctctttgggaacggggaacccccagggaccctttccaactcagacattgtcattaactccagcatcatccctggtaccaactccagcccagacactgtctttggcaccaggaccaccactgggtccaactcagacgctgtctctggctccagcaccccctctggctccagcttctccagtgggcccagccccagctcacacgctgactttggctccagcatcgtcatctgcttcactcctggccccagcttcagtgcagacactgaccttgagccctgccccagttcctaccctgggcccggccgcagctcagaccttggcgctggccccagcctccacacagtccccagcttcccaggcatcttcccttgtggtttcggcatctggtgccgctcccttgcctgtcaccatggtatcccggctgcctgtttccaaggatgagcctgacacactgacattgcgctctggtccccccagccctccctccactgctacctcgtttggtggcccccggcctcgacgccagccccccccaccacctcgttcccctttttatctggtaagttttacttcctcaagagggaacaggaagttgagtttctttggagtgttggtagggtggatggaacagtgatgtcacatttaacctggtgaattacaaagcttaatgttatggaccaagtacttgagtgacatttggacaagtcccttctcttccctgggcgtgtacctcatgatccgcctgcctcagcctcctgaagtgttaggattacaggggtgagccaccacgcccggcctcttttcccgttttttaacccgcacggtaataaatgggcagtaaaaggaactcttctctgtcccttttatgatttccggtagctgtttctttcctgtactatgtatataggcccatgtctgtgtagtacttgagttaaactcacagttcagcttaagtaaaccagaactaaggagaaggaagg

SEQ ID NO: 82960 - DNA, 2061 bp, Homo sapiens
aaatcgtccattctataaacttgttggaattgtagatcttaattttgaatattcagtcattctgctttggtagcatacaaggaaagatcagttttctctaggagagaagttacttaacataacttctgagaaagaatagttatttaacataaaaaagaaagttatttaacataacttctgagaaagaatagttctcattgataacttggaaaactacaaaaagcatagtgtatttttggatcccatggtttctatatatttatttccatctgggaagaacagtcaggttttgatgtggactctgagggtgctgattacttcctctttttctctcacccccaggactccctggaggaaaagcggaagcggcagcggtctgaacgcctggaacggattttccaacttagtgaggctcatggggccctggcacctgtgtatgggactgaagtcctggatttctgtaccctgccccaacctgttgccagccccatcggccctcgttctcctggccccagccaccccaccttttggacttataccgaggctgcccaccgggctgtactgtttccccagcagcgactagaccagctgtcagaaatcattgagaggttggcagggctaagtgctaatggggagtgggtcttggggcctcagagtggatgtagtgcttagggctggtgaaggtgttaacttctggggcatttcagagtcccatcttttacactgcctgcttcttcctttcacaggttcatctttgtcatgcctcctgtggaggcacctcccccttccctgcatgcctgccacccacctccttggctggccccacgtcaggcagccttccaggagcaattggcctctgagctctggccccgggctcgtcctttgcaccgtattgtgtgtaacatgcgcacccagttccctgacttaagactcatccagtatgattgcggtgagtttgttggccagtgtaggacccttgacttctcttcttttcttagtattaagactgttgtatcagagggatgctgcacttaagttctcttgcgatttctgtaaagctttagatggttttttaggttatgcttatgggcaagatagagaaatgtaagccttgttagattcttgacattcataaatatgactttcttctttttttttattttgagacaaagtctcgctcagtcgcccaggctggagtgcagtgcagtggtgcagtctcagctcactgcagcctcccaggttcaagtggttgtcccacctcagcctccagaatagctgtgattacagacatacgccaccatgcctggctaatttttgtatttttagtagagatgggatttcgccatgttggccaggttggtctcgaactactgacctcaagcgatcctcccgcctcagcctccaaagtgctgggatcacaggcatgagccaccatgcccggccatgaatttgactttcatgaaagttgaaaatgtgctgctaactccttcattcagtgatcattttgtgaacatgttacattttgctaatcatttgggatacaatagcaagtaagacagtgcagcatagagtttttatttagctgtatgggaaaagatgtctggtggtacaagactgcacagtaagtaaacagtaaattttggtcttggaaaagacaaggacctttttgtgttgactagaattatttggcggtaacagaaaaccaactaacagtcattgttttcttaatgagccaatctgagaatagtggtgtgtagctgtttcagtagcttaacgatattttcagggaccaggaccttttcttccttctttctttctttttttttcagatagagtctcactctgtcgcccaggctggagtgcagtggctcgatctcggctcactgcaacttccgcctcctgggttcaagcgattctcctgcttcagcctcctgagtagctgggattacaggtgcacaccaccacacccggctaatttttgtatttttagtagacacggggtttcaccatgttggtcaggctggtctcgatctcctgacctcgtgatctgcccaccttggc

SEQ ID NO: 82961 - DNA, 3007 bp, Homo sapiens
gagctgagatcgcaccactgcactccagcctgggtaatagagccagaccttgtctcaaaaaatgaaataataaagtgttcaggctgggcacggtggctcacgcctgtaatcccagcactttgggaggctgaggcaggtggatcacctgaggtctggatttggagaccagcctgaccaacatggagaaaccctgtctctactaaaaatacaaaattatccggacgtggtggcacatgcctgtaatcccagccactcgggaagctgaggcaggaaaattgcttgaatccaggaggtggaggttgccgtgagctgagattccaccattgcactccagcctgggcaacaagagcaaaactctgtctcaaaaaaaaaaaaaggaaaaggaaaaaaataaaagttcaaactgtgttaccagaaatgttgaagttatttctgtgtttgatggaaggttgaactagataaactttctaagagcctttactgttctgatctgtgaccttaaatccctgtctgtaagctgtgaccatggatttgttgatatctatcctgtgaatctgttctggatttcaggtggtatgactattgtaatacttaaggatctcttgctcataaagcattggggattctgtttttccctcgatgttatgtattcccctactcttttagactccaagaagttagattctaggctggagcagaccgaagaggtgaagcccttaaaggaagaacttgtatggagttaaacgtagatagatattttttgtgacagggtctcgctttgttgcccaggctgaagtgcattggtgggatctcagctcactgcaacctctgcctcctgggttcaagcccgagttctcatgcctcagcctcctgagtagctgggattacagtcacccgccatcacgcccagctaatttttgtgtttttagtagagacagggtctcatcatgttggccaggctggtcttgaactcccgacttaaagtgatccacctgcctcagcttctcagagtgcagggactacaggtgtgagccaccatgccctgccgtagttaaacatttttgatctgctaggctaattgaaactttggcttaaagcattgattatctttcaaccccagccttgcattgctaagcattctacccattgcggcttgtagctagctccctgtatcccttcatatctctttaggaaagttgcagacgttggcagtgctgttgcggcagctcaaggcagagggccaccgagtgctcatcttcacccagatgacccgaatgctggatgtattggagcagtttctcacctaccatggccatctctacctgcgcctggatggatctactagagttgaacagagacaggtaacccaggtttctgcagctcttagaggctcacctccgcttctctctccttttcccaggatttgggcttccagacggggtgccactaagcctttagacctgttttgggggataagtctcccagtatcatctttttttccctttccttctaggccttgatggaacggttcaatgcagacaaacgcatattctgcttcatcctttcaactcggagtgggggtgtgggcgtgaacctgacaggagcagacactgttgttttttatgacagcgactggaatcccaccatggatgctcaggcccaggaccgctgtcaccgaattggccagacccgggatgtccacatatataggtattgcctagtcttccctcaccttactttccgtttactgatggggtttcctggatatatttggctgcttacacacggccttcatcaccccctaggcttatcagtgaacggacagtggaggagaacatcctaaaaaaggcaaatcagaagagaatgttgggggacatggccattgagggaggcaacttcaccacagcctatttcaaacaggtactaagtaagatcttttagcctatgcaggagaaaactgctgcgccttcaggagttcctcctgtttattaaagaagactgctttggactttgggaggctgaggcaggcggatcacttgaggccaggagttggagaccaggctggccaacatgatgaaaccctgtctctactaaaaatacaaaaattagccgggcatggtggtgggcgcctgtaatcccagctgcttggaaggctgaggcaggagaatcacttgaacctaagaggcggaggttgcagtgagttgagatggcgccattgcactttagcctgggtgacgagcaaaaccgtctcaaaaaagaaaaaacaaaaaggactgctttggccttcacagacgtgcgtcttcaaccagtggtacccctgacagttccaagaaccatcagccttacagcttagacctaagactagcattctgttgactctgacacttccctctgttctatccgatagcagaccatccgagagctgtttgatatgcccctggaggaaccttctagctcatccgtgccctctgcccctgaagaggaggaagagactgtggccagcaagcagactcatattctggagcaggtaaaaaaagagtgggcagttcgtaaagttgagctgattcttacagaatatcttgtcttttgttagtctgttgagcttgtccaggggaaagagatgtttcttctgcttcccagattacagtcagcctttgatagttgtaagcacattgcttattggttcacatgattaagtaggaaaaaaaaacaggattttggagtctttagttttaggtttgaattccagtaatgcttcttaattgtgttaagacaagttacaatcgtcactcttctgaacctcactttctattaaaagtaatgtgggcagggcatggtgggtagctcatgcctgtaatcccagcactttgggaggctgaggctcccagctggagagctctgaaaacacacaaatgctcagacccaacaccccaaaattatgatagattttgagacagggtcaaggaataaatcttttaagaacctttccaaatgtgattttattatg

SEQ ID NO: 82962 - DNA, 4856 bp, Homo sapiens
gaggaggtgagccgagaggagctcaaacaggcagaagtgagtatttccaggggtggggctggcagttggaagctgctaatttctttttcttttctcttttttttgagacagtctcgctctgtcgcccaggctggagtgcagtggcacaatctcgggtcactgcagtctccgcctcccgggttcaagcagttctcctgcatcagcctcccgagaagctgggattacaggcgtgcaccaccacgcccggctaatttttgtatttttagtagagacgggggtttcaccatgttggccaggctggtcttgaactcctgacctcaggtgacctgctggccttaacttccccaagtgctggaattacaggcgtgagccaccgcgcctgacctggaagctgctaatttctactcactctctactctgcttgcctcctcctgaccacttttggaccctgttgttgtaggagcaagtggaagctgcccgcaaagacctggaccaagccaaggaggaggtgttccgcctaccccaagaggaggaggaggggccgggggctggggatgagagttcctgtgggactggtggaggcacccaccggcgcagtaaaaaggccaaagcccctgagaggccggggactcgtgtcagtgagcgtcttcgtggagcccgggctgagactcaaggggcaaaccacactcctgtcatatccgcccatcaaactcgcagcaccaccacaccaccccgctgcagtcctgccagggagcgagttcccaggccagcacctaggcctcgacccactccagcttcagctccggctgcaattcctgcccttgttcctgtcccagtttctgccccagtacccatttcagccccaaatccaataaccattctccctgtccatatcttgccttctcctccccctccttcacagattcctccttgttcttctcctgcctgcacccctcctcctgcctgtacccctccaccagctcatacaccgcctccagcccaaacctgtcttgtaactccttcctctcctctcttgcttggtccaccttctgtgcccatctctgcctcagtcactaatctccccttgggcttgaggcctgaggcagagctgtgtgcccaggcattggcatctccagagtccctggagctggcttctgtggccagttcagaaacctcctcactttctcttgtgccccctaaagatctgttgccagttgctgtggagatcctgcctgtgtcagagaagaacctttctctcaccccttctgcacccagcctgaccttggaggctggcagcatccccaatggtcaagagcaggaggcaccagattctgctgaggggaccacccttacagtgctgcctgaaggtgaggagttgcccctgtgtgtgagtgagagcaatggcctggagctcccaccctcagcagcatctgatgagccacttcaggagccactggaggctgacaggacctcggaagagctgacagaggccaagaccccaacctccagcccagagaagccacaggaactcgttacagctgaggttgcagctccatccacctcatcttcagccacttcctcgcctgagggtccttcacctgcccgacctcctcggcgtcgcaccagtgctgatgtggaaattaggggtcaagggactggtcggccaggacaaccaccaggccccaaagtgcttcgaaagctgccaggacggctggtaactgtggtagaggaaaaggaactggtgcggcggcggcggcagcagcggggagctgccagcaccctagtgcctggggtctctgagactagtgccagcccgggaagcccgtctgtccgcagcatgtcagggccagaatcctcccctcccattggtgggccctgtgaagctgctccttcatcctcactgcccactccaccccagcagcccttcattgctcgccgtcacattgagctgggggtgactggtggtggcagccccgagaatggagacggagcactgctcgccatcaccccacctgctgtgaaacgtcggagggggaggccccccaagaagaacaggtctccagcagatgctgggagaggtgtggatgaggcaccctcatccaccttgaagggaaaaaccaatggggctgacccagtccctgggcctgagaccctaattgttgcagatcctgtcctggaaccacagcttattcctgggccccagcctcttggaccccagccagttcacagacccaatcccctcctgtcacctgtggagaaaagaaggcgaggacgaccccctaaagcacgagatttgcccatccctgggaccatttcctctgcaggggatggcaactccgaaagtcggacacagccacccccacacccatcacccctaaccccactcccaccactgctagtttgtcccactgctactgttgccaacactgtcaccactgtcaccatttcaacgtccccacccaaacggaagaggggccgacctcccaagaatcctccatcacctcggcccagccagctccccgtcttggaccgtgacagcacttctgttctcgagagctgtggattggggaggcgacggcaaccccagggccaaggggagagtgagggtagttcctctgatgaggatggaagccgccccctcacccgcctggcccgccttcggcttgaagcagaaggaatgcgaggacggaagagtggagggtccatggtggtggctgtaattcaggatgacctggacttagcagatagcgggccaggcgggttggaattgacaccacctgtggtctcactaaccccaaaactgcgctcgacccggctgcgtccagggtctctagtccccccactagagactgagaagttgcctcgcaaacgagcaggggccccagttggtgggagtcctgggctggcaaagcggggccgcctacagcccccaagtcccctggggcctgagggttcagtagaggagtctgaggctgaagcctcaggtgaggaggaggaaggggatgggaccccacgccgacgtcctggcccccgccggcttgttgggaccaccaaccaaggggaccagcgcatcctgcgcagcagcgcccctccctccctggctggccctgctgttagtcacagaggccgcaaggccaagacgtgagtgggctgcccctccacctaggctttccaccgtggccactccctccatgaccaggcctgactctgttaaccactacttgaagtcttgagggggaaagcctccagggagacataggggccttctcccttcttcccaccaaagtagggggtaggcaactggttgtcatggaaatggggatcatcacagtccccttccccttcaccccacgtggctgggcagtgttaagggtggcaagatagtctctgtccccacccccttgtacttgattccccagctgtctttcacacagccccccacccttaggggaagggggaggggcttctctacaatgaggtttttttcttttttttttttttttaagaagaaaaaataataaacttagtttctgtatgagcatccgcgtaaggaggcttctgattttctggtctggtggagggttgggtgggaacttgggcatcgtttttctcctccctcttgttcttgcaaagatcctagcacctgatctctagcccaggactatatgttccaggcagaaatctacccaagaagagggaagattggtgaatttgatgtggtagggtgcctttccccagtcagtttgaagtcacagatatccttttcctctcatttcttttccctcggttcctagacgttcctcggagctctttgatgcctcagacctttcccttttatccctcttgctcaggtgcttcctttcacaactttttccagagggcaggcgtcctagctccagttgctccatcccttgggccctcccctgctcttcatctagccaaactggtttgagtcagccacaccccttcccagctccctgggctcttcacgtggtggctggccactcaaccccacccctgggcttggcttggagccctgagtcagctccatcaccacccaagccaaaccaaagctgaggcaggagccgaaactcagagtccttcaaggcctatagccaggtaagagccctgttcatttttacattctctgttcactccctgggccctccttgtgtcctcctgttgactctgtgcttacctcatctgagttatttctttgtatctacttccctgcagcttcttggcacacatcattctttgctctctacttgtctcgcccctttcacctttcctatccttcgttacttgggttcagggagccaaggtggtttcattttgtctgggttgtaggggaatggttggagataagggtagaaaggtggtttgatgccagggcctagaggacctgagaagtagggagacaagaaatgattaagtagggcatcattttgcaggtttctgtgtggtaatgaggtcatttagactcagtgtactagtctgattgtgttatgtggcctgggttaaattggagagaggaggtggcagggaggcagcatagcagaggaagccctgacttagggaagtaaagtctttctgatgtttggttttagtggtaataaagggcttacttgggtacattttccttacctttctccattcccataactgttttcatgtaaaatggctgctttgcttgaaacgggttgcagtacctagggtcctgctctctgacatctataatactcagggggcagcctcttgggaatttgggggaattgtagagtcctttgaaatacagattaaaataacagattcatagcagctttcaagagtttgtatttttcctccttctcggt

SEQ ID NO: 82963 - DNA, 1358 bp, Homo sapiens
gtgagtcactagaggaattccccagtaaggcaacattcctgagtgccaggctaggccatgagaacagaatgctctgagaggggtggagtctgagcaagcaaggccaagggctctgttgttgggctcacaagtaccttgactatcgcccacaggtgatggaggacgaggagaaggcagtggagatcttgggcaacacggaagctgctcatcctccatcccccatccgctgctgctggctccgcctccgctgcttggcagctactagcattatctgtggctgctcttgcctgggagtcatggctctggtgtttgccatcaaggtgaggagtgcaattcccatgggaatgggggtgggtataaggcaatggtttcatgtatctgatctatctacattgaccagtcactgaatacctatcagtgctctgggcctagtgccagaaataagaataagacagggttccttgtcgtcagaggacccataatctaatgaaagaggtgacagtgaaaatgggtaattaatagaatgcagttcatcagtaccgtaatacaggaagcacaggacagtgtgggagccagggaagatctatgtatgtaattatatatgtgtatatggtagaataggtgactggaaaggcatcctaggagaggtgacaggattaatcttaaagggtgagtgagtaagtgtggaagggcattccagataaaaggagcagtgtgtacaaaggcctgtggagcatgactggaccagtgaggaatagtgagagatgaagctagaggacccagattcccaagggcctccagttctgtgcttaagagttttgactttatcttgaaagtactggggaggcattgaatggctcctgcaggggaaagtgacatggtcagatttgagttttaggaagatccactctcaaggcctacatcgagggtgaattggagggggcaaggctggaggccgctgaacggtgatgagcgcaatctctaggagtctgaaagacacttgggtttttgagagggcttcaccatttcaaaaagcctattagaaacagcacatgtccgccgggcgtggtgacttaggcctgtaatcccagcactttgggaggccgaggtgggcagatcacgaggttaggagatcgagaccatctaggccaacatggtaaaaccccgtctctactaaaaatacaaaaattagctgggcgtgatggtgcgtgcctgtaatcccagctactggggaggctgaggcaggatcattgcttgaaccacggagtcggaggttgcattgagctgagatcatgccactgcactccagcctggtgacaaagcaagactctgtctcaaaaaaaaaaaaaaacaaaaaa

SEQ ID NO: 82964 - DNA, 1015 bp, Homo sapiens
acatattttaacagtcagaaactgtaagaactcctgggttccattagggcaaaatcctaaaaagggcccttaatgataacaaagaggctgggcgcagtggctcacgcctgtaatcccagcactttgggaggccgaggtgggcagatcacttgaggtcaggagttcgagaccagcctgaccaacatggtgaaaccccgtctctactaaaaatacaaaattagctgggcgtggtggcacgtacctgttatcccatctatttgggaggctgagacacgagaattgcttgaacctgggaggaggaggttgcagtgagattgcaccactgcactccagcctgggtgacaggagtgaaactgtctcaaaaaaagaaaaaaaaaagatggaaaagatgaggcccattgggctatgagaatgaggtggtgtttgggcatgagtgaagttactctagcctcactgtttcttgccaatagttacaaattctgaatcaatcttggatagttggaaagaatggggaataacagaattggaaagtactttcccataggcgatcttgtgagctatggccaccctgagaagtaggcagggcccagagatgggtaccttattttgcagatgagaggttagaatcagaaactggaaagggaggtagagggtttggatgtgagattttgatccgtgacagggaagggggagcggagtggggaaatgggcaccttggggcagaagcagggggagaacctaaccaagaacctgcccccacaggcggaagagcggcataaagcaggccggtccgaggaggcagtgcgctggggggcccgggcccggaaactcatcctggccagctttgctgtctggcttgctgtcctcattctgggtcccctgctgctgtggttgctctcctacgccatcgctcaggctgagtgaccctggatggcctctgctgagagccagccgagacctcctggatcctgcaatgcggcattgctaaggtcctgtgacagcagtggttggaagg

SEQ ID NO: 82965 - DNA, 1156 bp, Homo sapiens
gctttcccatggaggaagtggcagagcctggatttgaacccaggccctacctgccttccctgtgagctttgtgttgtgccttgctgggtactcaggtttctgaggctgctgtgaagccagggtgagctcctaagcttgttgccctgtgatccagatgggtcttcagagtctggcacagcgggcatgaggatgctgaggccccagcctgtgcggaaatgtgagcacagaggccctgacttgtgctattttccggctcttgcagaggagtgagctctgtggtccgccgttgtgttcatcgagctactggccacgagtttgcggtgaagattatggaagtgacagctgagcggctgagtcctgagcagctggaggaggtgcgggaagccacacggcgagagacacacatccttcgccaggtcgccggccacccccacatcagtgaggctgtcttccttgctcctgttagcagacgaccccccacctcctgctggccctgcccatagcccacttccgccaacattgcctccacacctctcctcccttcattccactaaagagtggccatccgttgggcgcccactgcctcctctggttctcctttcttcccagtaacagcccgctgctgtcccagggtggccaagccccgttaatgtgcatccactcctttccatctctgtctctctgcctctcttcctctctccctagtcaccctcatcgattcctacgagtcttctagcttcatgttcctggtgtttgacctgtgagtatctccctgccaccatctgagaagcctcctccccacctccatgtatggcccagcatttgtggtgcagtgggctggacccatcctgctcacaccttcctgttccagctggggctctctatcacctgggcctgcctgctagcgcatggctctggccttctcccttggtgccatgattgaggcaaattctttaatagtgactagtggctgggtgcagtggctcacgcctgtaatcccagcactttgggaggccgaggcgggtggatcatgaggtcaggagatcgagaccatcctggctaacacagtgaaaccccatctctactaaaaatacaaaaaatcagccgggcgtggtggtgggcgcctgtagtcccagctactcgggaggctgaggca

SEQ ID NO: 82966 - DNA, 1053 bp, Homo sapiens
ctgaggcaggtggatcacctgaggttagtagtttcaagaccagcctggacaacatggcgaaaccccgtctctactaaaatacaaaaaattggccaggcatggtggtcggtgcctgtaatcccagctaatcgggaggcaggagaattgcttgaacccgggaggcggaggttgcagtgagctgagttcgtgccattgcactccagcctgggtgacagagcgagactctatctccaaaaaaaaagagagtgttcagcagtggactgaccacttagaaaatagatcctcactcaccagcctctcgcgctgcttaacacgctaactattctggtgtctgtctctgcccatcagttctttttctggtcagaatctgaatgtccgatgcaattggtataatgcaaaccaactgcaaaggtattttgaaagagaatgatttgaattccaaagatttaaaagaggcccttggaaaaaattcatgaaggcttcgatatatttacagaaatggccctctgcaaaagtcagaggggacgtaaggatgtctattatgccatcctgcagccatgcagagtgcctacactccccaaaacagcacctgataatgttactttgaggactgatgcagagtgcaagtataacctcaattttgaaagtattatttttaattgacacataattataacctcagcttttaaagacgaaacttcaaaataaggtcctattcaacctttgtgccacaaaaaactgaaattttggtccattttctttatagattcactttgagaggcctttttcaggcatagttactctcaacaagaacctcctataaattatattgtcacaagaagtctcttatttttgccataattgccccatcatggcataatgcaggtatttcagctgccaacacaccaggccaaactgccttgttggagtgctgtgtttctagaccctttggtttgtctgcagagatctatctttagtggcctcttccacaatattttgtatgagcactggtctgttttctcagcccccactgtgggatgcagctgcctccta

SEQ ID NO: 82967 - DNA, 1132 bp, Homo sapiens
tactgcaaatgggaaacttcaaataaaattcacctgtgggattcttcagagcctttagtctgccactgactctctccctcaatggtttgtactagacttatgaaaagctaccgtttactgggcattcacctgtgaggcaggcaccagtctttttttttcttttttctttttttttttttgagacagagtctcactctgtcacccaggctgggatgcagtggcatgatcttcactcaccgaaatctccacctcctgggttcaagctattcttctgcctcagcctcccaagtagttgggattacaggtgcccaccactacgcctggctcatttttgtatttttagtagagatggaatttcacaatgttggccaggctggtcttgaactcctgacctcaagtgatcctcctgtcccagcctccagaagtgctgggattacaggtgtgagcactgtgccttgtcggcaccagtctttatatggcttattcccctaaatcctctccacagccctgtgtgacagacagtatttgtgtctctttttttatagattggctcaaagaggtgagatgactgctctagggtcctaatgctaggatttgaacttggacagtctgactccagagttaatactcttaacctgtggacccacatgtctggtggatgttgtactttaaaaccctttggcttccacatgtacttttcccgtttgtggaatcatctttgcctctgcccactgcatcctctccttggcttgggtaattcaggcttcactttaaacctccagggcagcttaggtccccttgctttctgttctcccatcttcttcattcacaacacgtcttactgtattgttatttctcacttgccttcaggtagacagtgagctcggtaagggctcatctcatttgccacttggcaaatcagtgcaacttggcattcaagaaatacttggtgtaggaatgaatttcccaacaaagtcagtttcaattcggggctgttaaaatctcctggaagtgtgccatggaacaaggttcagaaagtactggaagaattggtgcccgagtggtagaacaaactaaaaatacagacttgagccaagcgtggtggcacgcatctgtcaccccagctactcgg

SEQ ID NO: 82968 - DNA, 1059 bp, Homo sapiens
gttattgtgcactatgcatatatttgcatatattatttctcagaacagtcctgtaaaatgtgtgctgtatccttaatttctagataaggaagcagtggattggaaagctgatggcttgtgtatgatgatgctactaataatgacatattccaggcagaaatcccctgcttctgcttcccatggtcacttgtgccaggcccggttcctcttctccctggggctcaaacctggtagctgccccctctcaccaatacaagccttgtgaagatcctggagcagggcacaagccgctgacgtctgctccagtgagaagccctgctggcggcagaaaatgagcgcgtggcagaagaggtccagggtgatggcgtccctcaggctctgctcaggacaccctagctccagcagctcagccagcacccttgggagggagagaggagtgagtgacaactgggcctcctttcatcaccctacacccaccacatgctttggagtcagccattcctcatgttttcccaacctgacccctcagcctttgccaagagctcttcccacgcccccctcagtccctactccctcatctcagcattggtggtcttctccagctggtgcatggaatggacgtccaggtacttcctgttatagtaaaagaaaaagagtattggtggccgttacctatcatgacaaggctgtgacagctagtgcgtgagactgggagttggccaccggcgtgaagctgggctcttttgccagcttgctgtgtgactatgcaaatcgttaactctctgggcctaaatgaactcttatgagcctctccatttctaaagcctagggttaggaatcttgaattcttttttctgctctgccactaccttgtatgaccttggtcaagtactccctgtggccctcagtgtccccctctgtacaatactccttagcggccatgagactccatttacattctgtctttggctctttttttctcacactgcctcctctttggactggagaggctggaaagccaacttccagtcacctggagtaattgcatctccaggcctc

SEQ ID NO: 82969 - DNA, 1029 bp, Homo sapiens
gactcttatcgagcccattcgtcttggaggcatctcttccacggttcgtgggctcttgccttaaccctcagaacttcccagagccctccctctgttctctggccaaactgtgcggaatcttacacccacttccccaagtttagcaaggtccgcgttacaggaccttgaaagaaaggttagaaagaagctcagaacacgacgcctgtcttccctttacagataggaaaacaggtttccagggggcgtgtgacttgtcaaagactaaggatttacaaggggacaggcagaaacaacgtgagcctcctcacaacaaagacactttcgctgtgtgttgtctgagcctccttagattctgttagcggttagtgtgggaatacctccatctcccatgcattgcagatgctctgctcctctttctctctctgtgattggtttgtgggccctgcttgacgctctcgtcggcccctttgtttcctttggtaggaggagatggacctgaaggtactacagttcaagaacaagaaactggcagagcggctggaacaacggcaggcttgtgaagatgaactccgagaacgaattgagaagttggagaagcggcaggccacagatgatgccacactcctcatcgtcaatcgctactgggcccaggtggataccttctgctttcaaagaccaggccttgattcagctgccaatccccagattcccctgctaggaaaggagtatcatgttggaaagcactaagggattcataacatttttgatgttttctccttccagctggatgaaactgtggaagcccttctccgatgccatgagagccagggggagctgtcttcagcgcctgaggcacctgggacccaggaggggccaacatgtgatgggactcctctcccagagccggggacatcagagctgagaggtaggaccagagtgctgggatctggggagcttaagttctgggagaagtcctggggaggaggggactttggtgttgggcccctgaattgcctatcttactacttc

SEQ ID NO: 82970 - DNA, 1222 bp, Homo sapiens
gtcagaatcgatcattgccctgcacggggtgcttggggtggagtgtatgctggggatgtaagggaggcctgctgccacgtctggccctgcctcccatggccctgcctcccactccttagtttgagatgctgaatgcagagttagaggaaaaccaggaactggccaacagccgtatggcagagctggagaaactgcaggccgaacttcagggggctgtgcggaccaatgagcgcctcaaggtgggctgctgtaggggctgagaggtcctgggcctgtaagggagggactgagccctgaatcctgttgctgatcccatttgggcatccctgccccaggtggccctgcggagccttcctgaggaggtagtgcgggagacgggggagtaccgcatgctgcaggcccaattctcactgctctacaacgagtctctgcaagtgaagacccagctagacgaggctcggggcctgctgctggccacaaagaactcccacctgcgacacatcgagcacatggaggtatggccctggaacaggcgttagggctgggctaagggccaaaccgttagtgttgacgtgtttgtgccttccgaggccctgtgtgccagccaggggtccctggggaatagattcttcctaagatactgagtcctgaggtgggaccgaggggctgtgtgggtccttaacacatcaacccacagagcgacgagctggggctgcagaagaagctacgcacagaggtcattcagctggaggacacgctggcccaggtacgcaaggagtatgagatgctgcgcatcgagtttgagcagaatctggcggccaacgagcaggcgggtatgtggtgaggatagggcggaggtggggccttatctgggagtgctgggccctggtgtggggctgctgcttatccagatgcaagaggctaaggccttttttttcacagagcctcggcttcctatgcaaaacagggcctgcactgcttggctcccaggcacagtgagggtccgccagctggggtggctgatggagcaggcacatgcagagtctgagctgtcagccctgtcctcattcttctggtctgatgacgtctctgtctctcagatacttgtgttacaaagatttatcaaatgccacctctgagccaggctctgttctagggtttggggttatgccagtgaacaaaacagaattcctgccatgtggagcaacattctggtagaaga

SEQ ID NO: 82971 - DNA, 1093 bp, Homo sapiens
gcatcacacgggaggaactggagagggagaacaggaggggagggcttagggctcaggaggcaggagcagctccagggcaggtgtcactggggccctggacagaagcattggtgggccgtgactccacatgcctgagtcaccaggctcagaccagtgcctccttcctgttccaccctactcaggctgtagaagccgcccagctggccgaggacctgaaggtgcagctggagcacgtgcagactcggctgcgggagatccagccctgcctggcagagagccgggctgctcgtgagaaagagagcttcaacctcaagagggctcaggtgtgtgcaggggtgaggggccaggccagggtggtccacggtcacggacctatcctgggggcaagcggctcaaggttgaggacccttgcccttagccaggcctctcctgccccaggaggacatctcacggctgcggcgcaagctggaaaagcagaggaaggtggaggtctacgcagatgccgacgaaatcctccaggaggagatcaaggagtacaaggtggggctgtgggccaagttgtgccctatccacctgagaattgtagatgcaggattgctgagactagtggagagtctggggaccctggaagtaatgtagggcagcagaaagtgggcagcacagtggtcacagagtcaaatgctgtttgctgtacatgtactgtgagccaggcacagtgcttggctgggtgtgggttgggaggctaggaactggccctggtctctgacttcttgaaactgacagtcaggggaggaggcagccaagtaattctctcatcccagatgtgtaatatgatggcagaggccagaggggctgaggggactcaggggaggcccttcccctggccctggggtcagcaggcttcctggagtgaatgtcaccacagcagacctgaagaataggccagacgtggctgtgaggaacgggagtgagtagctttaggcaaagggaacagcagatgtggacgcttgagcggaggggttgctgggacagcaccggaggttgtaatcagaggagccaatgtggagaggttgggccgtgtcacctcctgaag

SEQ ID NO: 82972 - DNA, 1009 bp, Homo sapiens
agctggggaagagctcttccgtcctcctggagcatctcaggagccccctgggggccagaccctaccgctgctcagattgcagggcctccttcctcgaccgcgtggccctcacccggcaccaagaaacccacacccaggaaaaaccccccaatcccgaggacccccctccagaggcagtcaccctgtccacagatcaggaaggtgagggcgagacccctacccccacagagagcagcagccatggggaagggcaaaaccccaaaaccctagtggaagaaaagccctatctgtgccccgagtgtggagccggcttcacagaagtcgcagccctcctgctccataggagctgccacccaggtgtctccctgtgaaatgggtctggagaccaggggcctcgctctctccagagaggaacactggattttttcccccaaaaaaattacatggggaagggaggataaccctatcagatggtagtggagtggaggagaaagaaccctgggaaaaaatagtgcttttacatcagtgatgagaaaccctataaaattgttggtgggaagcacttataaggcagtagagaaaaactgttgggttagaaaccctataaatatgtaggaaaaaaaaaagccctttaagtctgtagcagaaaaaccctataaaccatagtggataaaagccctattaattgtaggaagaggtcccaatatgtctctgaacaaccctataaaattgtatcaaaatccttaggaaaatcctatagggtcggggaagtaccgcaatggcactgacccgggagtaacgaccctcagatgatgcagaaaacacctctccctcactgttccacaatgttctctcccagcagccctggacagttctcatggaggaagatgctcagctgggggagtggtgtgggaactgggtggaactgaaaaggaagaaaataggagaaaaataagtgaccaggagctctggagcccccagaggagataagacagagactaggaagaaa

SEQ ID NO: 82973 - DNA, 1036 bp, Homo sapiens
ctgtcccgagcaaacacagcagggcatccttcccggaccggacatcaggcagcccccagtgtggcagaggtctccgcttccaccaccccaaagacacttacaggcggggaggggggattctcggagcttaagtagctgcagagatgaagaaattaatttacttcctaaacgctaacttctgtctctcctaccgctctttggcagggtgcagccagtcttgcttcaccttggtcacctctcagcgcctcctgccatgtctcccttgccccactgcccctgtgcacacagcgcccacctcacacagccatccaaagtttccaggccccacccagggattctctgcagggtgtaaatggtgtgggacctccttcaagcgctttgttcctgtggccccattccctcatcctgaactcatctcaccatttttggagtgacagctggctgtttttatttatttatttatttatttatttatttattttaccagggggccacttggaactcctgctcctttgctgccatccccttgcaaactgatctttaaaggcattagaccaaacaggtgttccaggggctagggacatctcactcattcattcattcaacaaagtttctggagcacctattcagtgccaggctaggcttgggaaacagcctcaagaaagcaggacaaaaggagtagaaggagggtccgggcaggagtggggataggagggctttggtggggagtatggttccagctcatgggtgcagaccagcaggcctagtccctgggtccaactcctccttttctagcctgggaaacctctgggtcccaggaatttctccagcctattctcactgccagcaggctccccatgagctgtcctcatcacctgtctcctgccagcctcccatgagcatgagtctcacatgactcccaaggtcacctcgtgctctcagagacaggggtgagccagatatggagccctgcttttatcatcttagctctgccacttcccagccttgaccttggagaggtttccccaggcattga

SEQ ID NO: 82974 - DNA, 1087 bp, Homo sapiens
agactggtctcgaactcttgacctcaagtgatccaccctcctctgcttcccaaagtgcttacaaatccccaaagggattacaggcatgagccaccatgcccttcctggtttaactttttatttggaaataatttcaaagttacagaaaagtctcaagaatagtacaatggacatctgcatagcctttgtcccaaattcacctggtgttcacattttaccccatttctctgtcactggccatctctctatttaaggtatatacagatgactttgattccaatctagttgagaataagttgcagacctcatgttcctctacccctaaatagtgtgtttcctcccacagtacagttatccactgcattaaatttcacactgatccaatgtggtatcaaagttactttgtcacttgtctcagtaacaccctttagatgccatttctcctctagcacaggatcaagtctaagaatgctgtattgcattcggttgttgtttctctctagtatcccttaatcgggaatggttagcctttctttgtctgcatggtgttgatattattgaagaattcaatcttcccctttatcttaatagaacattcttcatttggggtttgtctacttgtttcttcattataatatatggattatgcattcctggctggaagactgtgtaagtgatactgtgtccttctcagtgtaacagctaaagccacacatgtctgtctgttcctccgtggtgattttttttaaaacagagtcttgctctgttgcccaggctggagtgcagtgcagtggtgtgatctcagctcactgcaacctccgcctcctgggttcaagcaattctccctgcttcagcctccctagtagctgggattacaggtacccaccaccatgcccagctaatttttgtattttttagtagagactgggtttcgccatgttggccaggctagtcttgaactcctgccctcaggtgatccgcctgcctcggcctcccaaagtgctgggattacaggcgtgagccaccacacccagcccctccttggtgattttaattttgatcaccaagtcaaggttatttgatttct

SEQ ID NO: 82975 - DNA, 1052 bp, Homo sapiens
aattttttgtatttttagtacagagagggtttcatcatgttggccaggctggtctcaaactcctgaccttaggtgatccacccacctcagcctcccaaagtgcggggattacaggcgtgagccaccatgcccggccactttctgtattttttaataaataagaaatacacatttagtagtagttacaaagatctgtaggccgtagcaaatattcagtaactggaagatgccaatgaacattgttgggtagtatttaaataacaaaatgttcaaatatttgacaagattaacaacactacacagaatcacgagttgaaattgccagtttaggctgagtgtggtggcacatgcctgtaattccagcactttcggagggcaaggcaggaggatcacttgagcccagagtttgaggctatagtgagctatgattgcaccactgcactccagcctgggcaacagagcaagaccgtgtctcttaaaaaaagagagagggagagaattgccaatttaaggacttatgtgtttccaaaacttgttatttattagaacatcatttgtaggatttgtataaaacacagtgcacgtcaacattaatatttgtgggaatgactcgctcttaacaacaggtacagccacaaatatacttttagtgtgtcaacagctacaaaaagtattttgactacttatctcctaggtactcttatcccatattctggaaatgtctaccttaactttatttatttattttttgagacagtcttgctgcagctcccaggctcaggtgcagtggtgcgatctcgactccacctcccgggttcaagcaattcttgtgcctcagccgcccgagtagctgggattagaggcatatgccaccatgcccggctaagttttgtattttttgtagagacacggttttgccatgttggccaggctggtctcgaactcctgacctcaaatgatccaaccgcctcagcctcccagagcaccgggattacagtaccttaactttagactctgtgtgtcaacgttgccttctcttgctttcaatttgg

SEQ ID NO: 82976 - DNA, 1046 bp, Homo sapiens
cccggggttcaagtgatcctctcatctcagcctctcaattagctgggactaccggcatgtgccactatgcctggcttatatttgtattttttgtaaagatggggtttcaccatatcgcccaggctggtcccaaactcctgggctcaaacaatccacctgccttggcctcccgaaatgctaagattacagacatcagcaatctcacctggcccttttctatgtttagatacacaaataccactgtgttccagttgcctgctgtactgtaacatgctgtccaggtctgcagcctaggaacaattgactaacaccacatagcctgggcgtgtagcaggctgtaccacctaggtttgtgtaaatacactctacgatgtatttacgtactctacgatgaaatcgcctaaggatgcatttctcagaatgtatccatgttgttaagcaaggcatgactgtctttgaatttgactttaataggatttcaacagtgatttggggacaggcaatacatttcaggtagaccacctgcttgacaaagttctggtgcctcattttccttcagttggaatgggacagaccctgatggggtcaggaacaaagagccagcgtgggagaggtgatcaatgagcaggaggttggccatcctcattcctcccccctttcccaccagaagacccccagactgattcctcagtctcacttcttccccacttggaggccaagatccgtcagacacacagccttgcgcacctcctcaccaaatacgctgagcagctgctccaggaatatgtgagtgggaatgggggtgggggtgccgggggcctggggaatgggagcagacatcacagaggtcctcgatcacccattctctcaacctcattttccaactgtggaaatcagggctcctgagagggacagcaacttgcccctggccacacagcaaattggaagaggaccctgtctgtgacccagatgccactctgtcctctccagcttagaggcaccctcctcagtgctttgtttttgagaggaggcctcgctctgtcgcc

SEQ ID NO: 82977 - DNA, 1066 bp, Homo sapiens
ctctctctaccttccccgcccccagcctcaccctctctctactccaaactcatctccagccctccttcctatgacctctccaccctggggaactggccctccttcctagaccctgcttccccttgaaagcccccacccccgcctgcagtcgccgccctccaggcccctcccctggagcgctggagggccccttagccccatggatgggtatgaaagtccccggaaagggggaatctggggtaagactgactgggaagagaccctccaggcttctaattccacatgggatcttggaggatctggtttccatgggagggggagcccaagggattctagatgattagggatgaaagcagcccgggaagctgggggtcctaggactgagcccatcctcagttctgggaagatgtcaggctggattctagaatcccaaggaatttgggagattgcccaggtggacctgagggatccaagaggagggtgtcctggaggagggaaccctgtggggaacaagaggggctgagatcttgggctgagaagggtctctgaagaagcatctccagggctgtcagagctctggggagttagtgggcagaggagatcgttagggacttgggggcaaggatctcgctggatctggtgaggataactgggttgaggggaagagagattggatggctgctgtggatgaaaaggttggtggggcgggggggaggaaaagtccggagcttccgtctaggaatctctgggtatctgggaggtgaatctgggcagtttaccccagattgaggttggggagagcctgggatattctacactcggataacaggggaagagttgggatctctccaagctaacaccacggacaaggagtgcctggcctttccaaggagctccggtgtggggatggcagaggagagggcctcggtgtcccctcctgctccctgggctagggaagggaccctgaggaggcggtagaggagcgaggccaggaagcagttcttgggctcctcttgagctgctgcagggagacaggccttgagtagaggattggcccccagataca

SEQ ID NO: 82978 - DNA, 1050 bp, Homo sapiens
gatggaagctgacagaggagccaccgcttccaccgcccccgcccaggcgcaagggccccctgcctgccgggccccccccggaggacgtgcctgggccccccaaacgaaaggaaagggaggcagggaatgagcctcccaccccaaggaaaaaggtgagccacggagcacgctcactaggcttgtcctgaggaattctgggagctgtagtcctggctggttctgtggggctgtgtgggcctgggagcgtgctctgtgggttccccaaggactgttgggagatgtagttcaggagttgggtggggggaggatagagcatgctcagtgtggaggaggggggggacaggtgaggtgagctggcactgcaggaagctttgggagccctgggtgggttagggaggcaggagagagcatgctcagatcatccctgcatgagaggagggaggggctggagagggcctgaggggaggaaagaggagatggagcatgctcagtgggctaggacgctgggtgcaaggtgagcatgctcagagttatccctgggacgggggcttctgggacttgtagtctaagaggagggcatggaccttagatttctggcccatgagggcctaatggggtctctcccttcctccatatctccctctcaccctggtaggtgaaaggaggccgagagaggcacctgaagaaggtgggtggagacgcctgcctcctccgaggatcggacccaggcggcccgggcctgctgccccccagggttctgaatccgagccaggctttctcatcctgccaccctgggctccctcccgagaactgggaggtgtgccggggacctcctccctccccttcccaccttcccttgccccacccttcaccctggagcccaagacctgtcccttcctgctcaccttgttctgccccagccccacttggccacggtgggtgtccggacacctgggatgagttgggtgggagggtgggttgagtccaggccacaggagcccctgacttcccaaaaacccttagggctcatctgacctacttgcctcatct

SEQ ID NO: 82979 - DNA, 1105 bp, Homo sapiens
ccggaatgggcgacggccagcccggggcagctctggcgagaaggagaaccgtggggggcggcgggctgtgcgccctggcagtggggggcccctactcagctggcccctgggcccagccccaccaccccggcctccacagctggagcggcacgtggtgcggcccccgcctcgaagccctgagcccgacacactccccttggctgctggatccgaccaccccctgccccgggccgcctggcttcgcgtcttccagcacctcgggccgcgggagctgtgtatctgcatgcgagtctgccgaacttggagccgctggtgagtggcctggacaggcctgcgttccgtggccagcaggcttcccgcttgctgggtgacctgcggtaggtctctggccctctctgggccttgcttttatattggggatacttctctagtatgcacagattacagtgcatccttccgtatttcccgtgtgcaggctactttccacttatgggctcatttaaccccctagacaactttgaggtagaggttattttcccctttttcagatgaagctgaggcccaaggtcatgtggaagagaagtggtggtagaactaggcattggaacctaggccctttggctccagtgcctttcctcctaatagtagcgactatattgagtgtctagtgtgtgtcagccatagcactgagtgctgtactgcattgtcacttctcatactgccacttccgaaaacagtctgacgattggttccattcacttaggagaacgccatgtgctgggctgcccctgccctcgaaagacagccaggcttgaacctcctgactcggttcctgctttccttctgccctggagccaccactaatgccctctgcccatcccccagccccccagcctctattagaaatgtcggtcatcctcccgagcctcttgtcttcctctctgatctcgcccccaacaaaattcctcctcctctctatgaaactcccacagcactctgttcccctcatagagcaagcagaggccttcggcgtgttgacaagccttcattcatttactcatttcatgttcccatcagttgctggggtgggagcagataactgtgt

SEQ ID NO: 82980 - DNA, 1056 bp, Homo sapiens
ccaggctcaggaggagcagtttccaggaaggtaaagagctcagatgactgacgtgtgtggtgtgctcaggacgtgtgggtctgatgctcaggagaaagatacacgtttgggagttctcagcctgtaggtagcaagccaagcagctttgatgaagagggcaaaagatcatacatcagtacttgtgagttagagcaagagcctagccagataattggaggagctcatggccagaggtgtgcccccgagtagagaacgaggcaggagggaatgtggtaagccaaggaggatgctggtgagaggccgtgggagatcaaggaccaggaagtggtggttggattttgctaccaggaggccttagtgtcctcagctgtgctctgggggttgggggtccaaagccagattgaatggagtcgagaacatcagcttccaggcagggacttgattcgtttgttcctgttgtgttcctggtgtctaatggcacctggcggacagtgggcagtgagatcatcttcgctgaatgagtgaaggacaagagagcaggatgcagtgtggaaggatgtacagagggtggcgctggagaggcgtgtgtaggggacagcaggaggctgcaggctttcctgtctggtggcttccatcttttcttggaactgaaagggaagtgatcccttaagagtgaagagtgaagagtggagagagggcagcagggaaggcgtgcaggggttattgagatgcaaggaagagggttggggcttttgaggacatggacagagagaaggcagcaaggaagggactggaatacaaggtgatcatggtcgggtagggtctggaggtggacagattggagggcagtggtagcatcggggcccagagagctacaagaggtcggaactggcagtgcttggagccctaggggccgtgagccttcagagggcagtaagggctggtccagctccctgttcccgggggcttctgcaagagggagggttaggattggaattgagggtttgcaggtcggcctagtaggagaggactcattgcggggtggctggagtccag

SEQ ID NO: 82981 - DNA, 1046 bp, Homo sapiens
tggatgatggctggttagtagtgctgaagtcactgtgatcagcgtgactctggttatgatgatgagttcctgtggcctggggtttccagagctctccgtcttgtctcttgtgggcctggacacaggttcttgcccatctggaacacacaccctcctccccctccccttgctgaaataactactgctttcctcggagtctcaggtcaggcattgtccccccaggaggctcccccacccagtccttgaggtgactcttaccatgccccttgtcacctcagttactgcggactgtccatgtctccctgactgtatggcaggaacctgtcatctttgcctcctccgtgcccagtggaagccagatacttgggatcagtagggccctcagtgactgttggttgtccctctgaggtttaaccccagtgtcctggttgtacaagagcagggggactgatgagctgtagccaaggaaggtgtgggagacttcctggaagaggaggcactggagccgagccacgaaggctctgggttggcatttctggcagaggcacagcatgtgccacaacgtgttggcatcagacagcactgtgtctataggtgggcaggtgtgtggcctggctgttgtggagtatgatacagaaacacaactggggtcctgtgggtgcccccagggaaaggggcttccttccagctgtggaccgtggaagggaagtggcttcaaggaagtggtgacagttaagctgggaggcagtcgtggcagggtcacagtgggcagagagaggttttggatagagcagatgtcaccgattttcttgctcacagaaagagcaaaggggcaggacctaggggtagaagctgggtcgggcatgagttggtttttttccttttcatgttttgaattggagagatttgcagatgtttattagttgagaggaaggaatcaggagagggagaggctagaatgccagaaaagcaggatgagggtaggagggaacaggagagcgagtggcagaggggtgaaggtgttcggactgaagccttggtgtctg

SEQ ID NO: 82982 - DNA, 1080 bp, Homo sapiens
cagagtgggggggctattgccttcaatcataaacgaggcttctgaggctcagggagaggaacagacttgcccagggtctcatttccagttagtgatggagttgggttccaatcccagtgctcttggctgaggtcaggtgcttcttgctaccctgttgtctgtgtggccagaagagagctggggtgcacccttggagctggggagcctgggaactgtgggctgctgagagctgagggctgaggtctctgtctcccccctatggccgccaggtgctatgacaagcgtctgtggcctcgaatggacctgagccggcggaagtcactgaccccgcccatgctcagtggtgtggttcgccgccagccccgtgccctggacctcagctggacaggtgtctccaagaagcagctcatgtggcttctgaaccgactacaaggtagggtgtgtggtacggaggacagggtggggacagggacaggcctgggatggagtcctcacagcacctgcttcctgactgccccctctccgcaggcctgcaggagctggtgctctctggctgctcctggctctctgtctctgccctgggctcagccccactgccagccctgcggctcctggacctccgctggatcgaggatgttaaagactcccagctccgggagttgctgctgcctccaccagacaccaaaccaggtgcaacctctgtttgcttttctggagaatgggctgggcaagggtagggtaggaggcctctcaggtctcttctgactcatgctggatggtaaagtatttgaagaaaggaaagaatacatgagtttgaataggaaggccctggttgggcattattcattcattcacccacctgctgtgtactttgaactgagtcttgaaaggaacagggttttcccagggagtgtgagactcagcagtttggtggggcaggaggcccatattggcagagggggatgctgggagcagaggccatctctcttcatctacttaaatctcatcatcctttaggcctgggtataaatgccacttcctccaagaagctctccctgatcccaccccacattgagctca

SEQ ID NO: 82983 - DNA, 1903 bp, Homo sapiens
gtcactcacttatgtgggaagcaggtggagggcagatggtctggatacctgggcgcagggatgggagtggccaggagtgctgacctctcatctggctgcccagggcaaacagagagccgtggtcggctgcagggggtggcagaactgcgtctggcaggtttggagctgacagatgcctccctgcgtctcctgctgcgtcacgcaccccagctgagcgccctggacctgagccactgcgcccacgtcggggaccccagtgttcacctcctcacggcccccacgtccccactccgcgagaccctggtgcacctcaatcttgctggtaagcacggtcccccatccgtcctgccagcctgtggatccccacggccagtgccaaccccttgctcacctgcctggtctcagctccactgccccatccccaggttgccaccgcctaacggaccactgcctcccgctgttccgccgctgccctcgtctacgccgcctagacctgcgctcctgccgccagctctcacccgaagcttgtgcccggctggcagctgccgggccccctggccccttccgctgccctgaggagaagctgcttctcaaggacagctagttgggcgccccccaccctcccccggactcgacaggagcctggacctccggcttcatttcacccctgctgggaggccaggttcccacctcaccaccctgggattcctgagtgtcagtgacttgggattcccacccagggactcaagccagccacccccttctttcccccctgcactgatatctctgggggtttctccttcctatgtcctgcccctgctacctgcttcattgtccatcccctgggggagtgggtcagaggtactggagggtgctgagccgaagggacggtgggaggggggttatggtgcaagtgttgggggggagaatggggaaaggacacacacaggatatgggagccaggggctgggggaggtggaaggggcggggggcggggcagacagcagaccaccaagggttcagggaacaaagaccagttacttggagtggggggtgggggtggggccacaaaaggaaaaccggaggagcaattggggatccaggtgtcagaggtaggggaaccaggggcaagctggggctgagctggaggtggggatgagagcaggtgtggggacagcaatacccccttgggggtcacctctctgcttcccccctccccaggcttcagttccttccccctgaccctgactccttgaacgtcactgaaaacggcagctattgcaaggagtgggggccgcgggcagccgctcttcagctcgcggcccaggggagtggcgaggggcgccccaaccccctgcccgcctctccgcacaatacttgaacattcatctgtactgaagtgttacttgaaccgggggaatctcggacctgggggagccggggtgtgaggggactggaccagcttggactgagacctgagaccgggccggtgggcgcccatttgggactgcgccacccccaggcttgttcttgttttactgtattgagcggcggcacccgccggacccgcattatggctgggggcgccagcccaagaatggggaccatgggactcctccagcctggctcttcccactctttcatcgtcatggaaacttgtatcccatttgcccagggaactgccactcctggttgccatggaaatagcagccaacggacacctcccgatgccagtgctaaggctggaaatggccccctcttagttgccatgggaacctagtaacagactctgctggccctccttccctgccccttcctcgagcgcggggtggggcttcgggaccccggggatgagccgggccaggtcccgcccctccgcgcaggcctccggggggccggggct

SEQ ID NO: 82984 - DNA, 1050 bp, Homo sapiens
gcggagttcgtgtgtgtatctgcggggtccctacctacagatgagtgggctcacctctcctggactcattttgggagggatttggaagtgtggacacctggggtgtccagctgtaccttggagggggctggggttggcgtgcacctcggtggggtccgggcgcttggataacgttcttggtgggtaggggtcgcggggaatctctgcgggcccgggactgcggggacttggtccccggctccaccccatcatgtggctagccccggctccgcctctgtcccagttcctgttttggcctccgctgtcccgctccggctcctggggctccccgcagacgctgcttttcttgctccactgggggtgcctcttcctgggcgcccgccgcctgcatcctgctcgtcctgtctgggaatggggccgcccccgggcttgggccggcccggctggggcccccgaggcgcttccgccccgtagtgaccgcctggtgccgccccccccccaggatgaagggcggcgagggggacgcgggcgagcaggccccgctgaaccctgagggcgagagccctgcaggctcggccacgtaccgggagttcgtgcaccgcggctacctggacctcatgggggccagtcagcactcgctgcgggcgctcagctggcgccgcctctacctcagccgggccaagctcaaagcttccagccgcacgtctgccttgctctcgggcttcgccatggtgaggggccgggaggggtcacacccggtggggcagagcaagtggggggcacaggtcggggggggggcgaagtaaacaggtcccaagggagacaggttaaagggggctttcgtcaaagggggaaggaacaaggtcccgcgggactgagcaagtcccttcttacggatgtgtgtgtacaggggaccccaggagacggggccaccggaggacacgaaagtcctaaaggtgtcgtagtgggagtggggtgaacaaatcgctggtggggttgactgcaacagtgaggcagagtggtccagatggagcctgtacctggcagaag

SEQ ID NO: 82985 - DNA, 1033 bp, Homo sapiens
aggcagcccagctccagaatctgctgtttgatccctatgcagtaaacctgttagaagcatgtcatccagcccttttttttatttttatttttaatttttttttgagacagagtcttgctctgttgcccaggctggagtgcagtcacatgatctcggctcactcaaacttctgcctcctgggttcaagcagttctcctgcctcagcctctcaagtagcagggattacaggcatgtgccacgatgcccggctaatttttgtacttttagtagagacggggtttcgccatgttggccaggttggtctcaaactcctgacctcaggtgatccacacactttggcctcccaaagtgctgggattataggcatgaaccgccgcgcccggccatccagccctcttgatagggaggtggggaaaccagaacagaacagagcctttgcaaagctgtccattcgtttactcaacagagactgaatgtctctggtttctgccaggcacagttctaggtcctagggatatgtatcagtgatgtatcccgataggcggaaaaaatctctacagttgaggttatggggagatcagtacatcccctcttgtccctgcaggtggccatggtggaggtgcagctggagagtgaccacgagtacccaccaggcctgctggtggccttcagtgcctgcaccaccgtgctggtggctgtgcacctctttgcactcatggtctccacgtgtctgctgccccacattgaagctgtgagcaacatccacaacctcaactctgtccaccagtcgccacaccagagactgcaccgctacgtggagctggcctggggcttctccactgccctgggcacctttctcttccttgctgaagttgtcctggttggttgggtcaagtttgtgcccattggggctcccttggacacaccgacccccatggtgcccacatcccgggtgcccgggactctggcaccagtggctacctcccttagtccagcttccaatctcccacggtcctctgcgtctgcagcaccg

SEQ ID NO: 82986 - DNA, 1031 bp, Homo sapiens
gacagagcgagactcggtctcaaaaaaaaaaaaaaaaaaagagtgcttatactaaacactcagggagggctgggtgtggtggctcatgcctgtaatcccagcacttcgggaggccagacaggtggatcacctgaggtcagaagtttgagaccagcttggccaacatggcgaaaccccgtctctaataaaaatataaaaattagccgggtgtggcggcacacacttgtaatcccagctactctggtggctgaggcaggagaattgcttgaacttgggagacggaggttacagtgagctgagatcgcaccactgcactccagcctgggcaacacaagactccgtctctaaataaataaatactcagtggaagagatagagactctgaactcagggacaagagttcaaagcctgtagccttggaataactctccccattcagaagctgttggcccttgttagcatctgacagggttacacctgaaacccactcccctcccaggtcctgtccacccaaacttgccaccacccggctcttgggaacaagtaaagttatcctaagaaggcctgccctgcatccccttcacagcaacagggacatctgtgaaacacgatttattatataaaacaaggtgcatccaaattcagtgtcagaagagctttgtatttcaagggctaaggactggaccttctcccttaaaacctccttacccaacccttgctaaggactcaggcctggggcagaggctgtcagtctctaaagaccccagccctggaccaggacggggagaacaagtttggtgcatagcgtggggctagggcagtgggtcaggcaccatcccttctgcaagtggccacaggtcaccacagtgggggaaggtggggagcttgaacctccaaagataggttcattgtaggaaaagctagaccaatgccttgggtagaaacacccaaatccctctacaacaactaaagcaagaatgtggaacccatcgaaatcttcccccaaaatgccaaccataaaatagattcta

SEQ ID NO: 82987 - DNA, 1045 bp, Homo sapiens
gcatagggcgccatagccaaagaagcgggcagtgggaccatgacgccaggaggacacaccagtccagtcccgttcctgtaggacctcgtttattattacaaggcccatttaagggcacttaggccccactaggctcatcagaaaaccttgaggcggtccctggatttaaccactaatggtgggtttgagtacggcaaagtagggcaccttctacaggcctcactctccccatctggcaaatgggcatcctaagcagccagacacccaagggcaataacgggaaggaaaggtaccctgcatttatgtgcgaggcggggcaaaccgcctgagtcaccgctcacggttgtgtttttccacctcccggccgtccctcccatccgggtgagtcctcgtgggtcctcccggaggcgccccctagtcccaggctctgcacgccctggccccgccccttgactcggccccgcccacagcggaatccgcagattcgccaggtcggatcctcagaattcctcgggtccctcgatactcggctgaaaattctcatcggactctgagaggagcgctgggctggaggcattttccccagggacagaagcgggctattctctcacttgggccagtaagaaaaatccaaaaaaagttgtcgactctgccagcagggattggctaacgggccgttattttcttgactccaccaaggcggatgaaggggaggctacggctgaggccgggaacagtggcgaatctgcagcctctcagaatttggcagtgcaaggaagggacggggaagagaagcaaagcggcgcgcatcctgtccagcgattcgccccgcccgcccggtgaatctgcgtctgcagaacgcgccactgaaggttccccagcgctggctggcctcctcccctccgccccgccccttttcctcagggactagtcgcagctttcgtcgccgccgattcgtcaaggtcccgggccgcagcatctagatcgtcgtggcgaagccgactctccgggggatgcggccaatctccaagctccctgggccgca

SEQ ID NO: 82988 - DNA, 2521 bp, Homo sapiens
ccccgttgccatgtcaggtccaaaaacagagacttttccctcccagtccctaagtttaaggtaagtgtctgctgggctcctggtgtggtagtcctaagagggtgtggaggatgcgtcttggcactatagctgaataaaagggtttccaatgaaaggatctcagccagatctagcaacctctgaggctgtgagactcagttgttttggataggaggtacacttaatcttccagaaaggtgcaggtcaggtgtcctaagtgtatccctggtggctggggtgtcgacttcttgaagggtgaggtaaagactctttagctgctatacctatcactgtatattcgtagacagtgcatcatagcacacaagagtgggatctcccagttccttgacagtcaaggggagtgacaaggccactgcctacctgggtagcactattccccgcctctcatttggcgatgtcatttccctcttgtttccttcgaggactcctattctccaccctagacaagatattcttcaggccttgaactgggcctggaacactggtggttcttcatttccttctctgattctttattcttcctttctaaataaattgtttgtggggtcccttcattcttcttcttcttttttttttttttactttgtacacttcacttggacaatctctttcacacccacagcttcaactattacctaaatgttgatgacttccaagtatctgtttccagccaacatctctaggcttgtatgcctggtagggggacagtttcatttggaggccacacatgtttcagatttaagggatttaaaacaaattatctacctccttaacctacctttttcattttccctctactcatatgtggcagtaccatcgactcagctgtacagcctggcagcctgtgattctctccttttctctctcagttggtcaccgaatcctcctggctcttttcttttttattcttcatctttctattctcattgccacttaatgtagaccttggtattcatttcacctggtctccttgccttcgttcttgcctcagtttctcctctgccttgctgtcatttgtctctttggcttcactacgctgctgttttccttttgttgccaagtccatgttttgggacactgacatgtatggttattgacctggccaagccttatcctccgccttgacaccacacccctgtgttacatccacaccataacgctttgcggtttttcaaaaacaccaagttgttttatatttccatgttccaggggtccttgtcatttgatgaattgttaatccccaaatctcagtaagaatgacaccatctttatgaattcttccctgatcatactctgtacaaaagtttccttccctgggctccagaacaccatgtatgcgtcagctgccactgggtcgtgttgtgtttgtatgtgcatgtcatgctgcttttctgtatgggaatctcttcctttctatctctgtatttccagtgcctcgttcatggtagttacctagtaaaggctgagctaggaaatcatcgccctgtagctcgttctctccacgtatatttattcctcagtgtgtacatttctttctttctttctttttttttttttttttttttttgagacggagtctcgctgtgttgcccaggctggagtgcagtggtgtgatctcggcttagtgcaacctctgcctgccaggttcaagtgattctcctgcctcaccctcctgagtagctgggattacaggtgcccaccatcacatccagctaaatttttttttttgtatttttagtagagacagggttttatcatgttggacaggctggtcttgaactcctgacttctggtgatccgtccacctcatcctcccaaagtgttgggattataagtgtgagctgccacacccggcctagtttgcacatttctgttcttaattcttgctgttattctgtggtgagaagaattcagggaaaaggggtcaggtctgatggatcccttattttgggccccttcccttgcccctcactttcccggatctctctcttgacttcatggagcttgctaaagtttcccgaaggacaaaggaacagtggtcagtgttgagaccccataccaactcctgttctttccccagctggacgagttctatattggacagattccactgaaggaagtgacttttgcaaggctgaatgacaacgtgcgggagaccttcctgaaggatatgtgccgtaagtacggtgaggtggaagaggtagagatcctccttcacccccgtacgcgcaagcacctgggcctggcccgtgtgctcttcaccagcactcggggcgccaaggaaacggtcaaaaacctccaccttacctccgtcatgggcaacatcatccatgcccagcttgacatcaaaggtgaggactcctctgcctgccactcaggcttggcctccagcggaggttgtacatgcaaatgcctgtcagggtcaggcaggcgcccagggtcatgatctgaaactgctggg

SEQ ID NO: 82989 - DNA, 2980 bp, Homo sapiens
cttcttttggagggcagcatagaggggctttgggccctgggacccagtacgctgtggtttggtcatagagagctgagtccagctaactcccctgcttcttctccagcaccacttcaacctccttcaagccccggcggtcagagaacagctaccaagatgccttttcccgccgccacttctctgcatcttcagcctccacaaccgcctccacggccatcgccgccaccactgcagccactgcctcatcctccgcctcttcctcctcattgtcctcgtcctcctcgtcatcctcttcctcctcgtcctctcagtttcgtagttctgatgcaaactacccagcgtattatgaaagctggaatcgctaccagcgccatacttcctacccaccacgccgggccacacgggaggaaccccctggagccccttttgctgaaaatacagctgagcgcttcccaccttcttacacctcctacctgccccccgagcccagccggcccaccgaccaggactaccggcctcctgcctcagaggctccacccccggagcctccagaacctggtggaggcgggggtggaggagggcccagccctgagagagaagaagttcggacttccccccgcccagcctcccctgcccgctctggctccccagccccggagaccaccaatgagagtgtgcccttcgcccagcacagcagcctggattcccgcatcgagatgctgctgaaggagcagcgctccaagttttccttcttggcctctgacacagaggaggaggaagagaacagcagcatggtccttggggccagagatacagggagtgaggtgccttctgggtcagggcatgggccctgcacaccccctccggccccagctaattttgaggatgtggcacctacagggagcggggagccaggggctacccgggagtctcccaaggcaaatggacagaaccaggtgaggttggggtcagccagaggaggcacctgggctctgggagtcagggttgggcctaggggagagggaagggaaccagatgagaaagtagggcttgggtcaggcagaagccttctgtgaccctcttctgcccccgcaggcttctccatgctcttctggagacgacatggagatctccgacgacgaccggggtggctcaccccctccggccccgacgccccctcagcagcctccgccacctccccctcccccgccgcctcctcctccctacctggcgtcccttcctcttggttatcctccccaccaacctgcctacctcctcccacccagacctgatgggccgccgccccctgagtaccccccacctcctccaccacccccgcacatctatgactttgtgaactccttggagctcatggaccgacttggggctcagtggggagggatgcccatgtccttccagatgcagacccagatgttaactcggctccatcagctgcggcagggcaagggattgattgccgcctcagctggcccccccggtggggcctttggggaggccttcctcccgtttccacccccgcaggaggcagcctacggcttgccgtatgctctatatgcacaggggcaggagggcagaggggcatactcacgggaggcctaccacctgcccatgccaatggcagccgagcccctgccctcctcctcagtctcgggagaggaggcccggctgccacccagggaagaagcagagctggcagagggcaagaccctcccgacagcaggcaccgtgggccgtgtgctcgccatgctggtccaggagatgaagagcatcatgcagcgagacctcaaccgcaagatggtggagaacgtggccttcggagcctttgaccagtggtgggagagcaaggaggagaaggccaaggtgaggccagcgcctgggaccggggagccctgggctttgcaggaggaaatgggcctctggctcctccaggctgcacagctcagaggagacaggtgatggaggcgagtggagagaggccgcaggccctgcaggccaccctgggtgggcaggggagttgaggggacagagaagcaggcacagatgggcctgggaggcagcagagctttgtcctggctccattccttgctggcttgcagtggacaaggcccttagctctcttcaagctttggtcttccattttgccacttgtgaagtgggaatggtggctatttcttaagactggtgggcgaaatgacagacttttgagaaaatgccgtgcgggggctgggacaggtgtgaccaagatatggagcagcaagtagatgcgttctgtattcctggggtccgggagtaggtctcaggcaggagggaatgcctgggttctgggcgctggggctcagccccactgctgcctgcagccattccagaacgcggccaagcagcaagccaaggaggaggataaagagaagacgaagctgaaggagcctggcctgctgtccctcgtggactgggccaagagcgggggcactacgggcatcgaggctttcgcctttgggtcagggctgagaggggccctgcggctgccttcattcaaggtactcagaactgtcgttttgtggggtagggtggggagagggagagggggcccccttccttggggtaggggtggtcaggaaccatgagtgtttgagttttttcttttttttgagatggagtcttactctgttgcccaggctggagtgcagtggcctgatctcagctcactgcaacctccgcctcccgggttcaagcgattctcctgcctcagcctcccgagtagctggggttacaggcacccgccaccacgcctggctaatttttgtatttttagtagagctggggtttcactgtgttggccaggctggtcttgaactcctaacctcaggtgatctacctgccttggcctcccaaagtgctgggattacaggagtgagccaccgtgctctgcctgagtgtttgagctctaaacaggccccatctt

SEQ ID NO: 82990 - DNA, 1055 bp, Homo sapiens
cgggtgcctatagtcccagctacttgggagactgaggcaggagaattgcttgaacccgggaggcagaggctgctgtgagctgagattgtgccactgcactccagcctggcgacaaagcgagactccgtctcaaaaaaaaaaatatatatatatatgccaggcacgatggctcacgcctataatcccagcactccaggaggctgaggcaggaggatcacttgaacccaggagttcaataccagcctgagcaacataggtagaccctgtctctacaaaaatttttaaaaattagctgggtatgattgcatgcccctgtatagtcccagttactcaggagaccgaggcaggaggatcgcttgagcccagcaggttgaggctgcagtgagctgtggtcatgccactgcaccccagcctgagtgacagagcaagaccccgtcccaaaaacaaaaacaaatacaaaactatgaaacatgaggtaactgaggtgtttgagttcctctggtgagcttccaaattctcatctgtgaaatgaagaccatcaggaagattggtaatagtatatgtaaagccccttgcacagggcaagtatcttgtggttgatggtaaatttccccaactaccactctgctggcctagaccctgaacaagagaaggaggctggagagccaggacgtccggggaccaagcccccgaagcgggacgaagagcgaggcaagacccagggcaagcaccgcaagtcctttgctctggacagcgaaggggaggaggcatcccaggagtcctcctcggagaaggtgagggcccgggcgccggctcctggccgaagcctacttcccatagccagcatctttgtggttggagcccaggcagctgtgcctggtgtaggaccagttgtccccttcctgttagtcctcatttgtcttttttcttaaggatgaggaggatgacgaggaagatgaggaagatgaagatcgagaggaagctgtggataccacaaagaaggagacagaggtgtcggatggtgagcacaagacagtgaaatcgactttgggctc

SEQ ID NO: 82991 - DNA, 1139 bp, Homo sapiens
tctctctttctgtccttctccctctgttccagtccattttccaaactgcttatagaatctctttcctaaaatgcactcctgaccctgtgacttccctccataaggtccttcctggcaacttgttctccacagggtgtccccccaggccaacaccatgggccgtttatctcctggccctgctctgttcagctccatctcgccctcctccagtccgctccccagctgccaccaccttctagtctaacttatccaattctgttcctcaaaaactgtgaaattcttcagttttttcgagtccttcccgtacatgagcagtctcagaatatagagcctgtcgtgttttttaaccttttcagcccagaatcctttttcacccaatccttcgtccagactgggtcctgagacccactttaggaaggtttgagtgccagagcagcctgcttcccagtctccaagcctccacttcctcttgcttccgacatccctgtgcagtccccatgtctgtgtggtggactccttgtccttgagttcagcttgtcccctgggatgctttccttttcgggcctcttcagacagagtctggggcttcctttgccatcctccccgcatgctgatgtttatctcacagtgaaaatggtttgcttatgcagctccttggtctgttggacttccccgtccctagcccagagcccagcatccacagcagggagtgagtgaggagcccacggctggccaagtgaggtctgcccacctctcctgactgccccttctggatttccaggcgaggacgaggaaagcgattcgtcttccaaatgttctctgtatgctgactcagatggcgaaaatgacagcacatcagactccgagagcagcagctcttccagctcctcatcctcctcctcctcctcgtcctcatcctcctcgtcctcttcatcctctgagtcctcctctgaagatgaagaggaagaggagcggccagcagcccttccctcagcctccccgccccccagagaagtcccagtgcccacgccagcacctgtggaggtgccagtgccggaaagggttgcaggctccccagtcacacccctgcccgaacaggaggcgtctccagcaaggcctgcaggtaggtgccacagggc

SEQ ID NO: 82992 - DNA, 1045 bp, Homo sapiens
gccacagagacatcggacgaggccgagcgccctaggcccctgctcagccacatcctcctggagcacaactatgccctggccgtcaagcccacgccccctgcgccagccctgcggcccccggagccagtgcccgcacccgccgccctcttcagttccccagctgatgaggtcctggaggcccccgaggtggtggtggctgaggcggaggagcccaagccgcagcaactgcagcagcagcgggaggagggcgaagaggagggggaggaagagggggaggaagaggaggaggagtcctctgacagcagcagcagcagcgatggggagggcgccctccggaggcgcagcctccgctcccacgcccggcgccgccgccctccgcccccacccccgccgccaccgccccgcgcctacgagccacgcagtgagtttgaacagatgaccatcctgtatgacatttggaactcgggcctggactcagaggacatgagttacctgcggcttacgtacgagcggctgctgcagcagacaagcggggctgactggctcaacgacactcactgggtccatcacacaaatatcctgagtgtgggcggccttccccgggcttgggtcctcccccgacccctccaggcacctgcatctgtgccccactctgtctgcctcccctctggctccaagccatcttttctctcctcctggtgcctcttttctgccttccaaagcatttctggcaggaacgatggggctggggcttcctcccctgtccctcacctgggtatgctcagcggcgtgggccccgccctctcctttggctgggacgcaggtggccagagaggagccgttctcttccttaacaccctgcactcaccaacctgaccaccccaaaacgcaagcggcggccccaggatgggccccgggagcaccagacaggctcagcccgcagcgaaggctactaccccatcagcaagaaggagaaggacaagtacctggacgtgtgcccagtctcggcccggcagctggagggcgtggacactcaggtgggcct

SEQ ID NO: 82993 - DNA, 1021 bp, Homo sapiens
gagccaagatcgcgccattgcactccagcctgggcgacagagcaagactccgtctcaaaaaaaaaaaaaagaaaagaaaaaacagggtcagtggcagcgacgtgtggctggagggaacagagagcccagaccgcacgggcttgggagcctgtgaatccacttgggcctgtggtgagagaggaggaaagtcccggagctttcttcaggagagggtccttccgcaggagagggtccttccgcaggagagggccccatggctagtgagctccatgtctaggctgacaccagtatccaggcaaaggcaagggtggcccgacccaagcagtggcagcagaggtgacagagaggaggctttgggtgcaaggtggttggctgggctcagcagtgagagggtgagggggacgggaggccctctctcggtgctgctcttagctgctgggagtatgatgggagggccagtgagatgggtgtgaggaggaagaacaaatatatggtcaagatgagctccagtctggacatgtggggttgcaatgccccagggacatctaggggatgacgcccagcagctccactgaggtggcttttggctggaaatggaagtttgggaggagtccccaccacatagctggcggctgaggctctggaagggagtgaggtcacccgaggagggcgtgcagaggctcctcactgtcttctgggaagtaagggttgctcctcacacggaggtgcggggcctgacatgggcggcctgccatttgcattagccggtggcagccaacaggtgcctgttttggagagaggtccagggaggagagatgagcagggtgccgttggtgacatggccagtcatttcaggagctgccccaaccccagacttgccccagcagtccgggaccccactgtgaccaggcagatgctcgaaggagtcagtggctctcttacccagtgcagatttccctggagttccctgcgggtgacttagaatggccaccagaggcttaggatgctgccccaaagaggg

SEQ ID NO: 82994 - DNA, 2056 bp, Homo sapiens
tgcccaggctggagtgcagtggcgtgatctcagctcactgcaacctctgcccccccgggttcaagcaattctcctgcctcagcctcctgagtagctatgattacaggtgcccaccaccacaccaggctaatttttatatttttagtagagacgaggtttcgccatgttggccaggctggtctcaaacttctgacctcaggtgatctacacacctcccaaagtgctgggattacaggtgtgagccatcgtgcctgaccaatgtgtacatattaactcactcagtcttcacaaccaccctgtgaggtgggcagtgttatgatccacattttctaggtggggaaactgaggccaagagcaggtgaataatgtgcctaaggtttcagctagtaaatgacaccggatttgaccctggccactccactgcggtggaggcgctcatggcggagaagggtgattgtagctctctccctcgtcaccctagatcaaaatggactcacagatgacgaagcaggcgctgaatgagattgagacgaggcacaatgagatcatcaagctggagaccagcatccgcgagctgcacgatatgtttgtggacatggccatgctcgtagagagccaggtactggctctgccacccatgccactctgggagcctccctgggcctgaggtcccctcttccagcccagcccccatccctccctgtgcatgtctcctctgtctgcagggagagatgattgaccgcatcgagtacaacgtggaacattctgtggactacgtggagcgagctgtgtctgacaccaagaaagcagtgaaatatcagagcaaggcccggagggtgagcggggcaggcggcctgggggtaggcgggggagcccaaggctgagcccgggctgaggtgagtgatggcagcgggcgggaggccttatctctggctctgacctcttcctgtttctgttttctctcccctcttctccctgccaccctctgccctgtctgtccctgcatctgtccgtgtgtcgatctctctcactgtctgcctgtctcactcctctttctgctgcagaagaaaatcatgatcatcatttgctgtgtggtgctgggggtggtcttggcgtcatccattggggggacgctgggcttgtaggccccccccacccttctctctcccagacccttcccccaccacatcgggagcaatacccccaccacccctttcactccatcccctgctccaggctcactcccaaaacagacccaggcagccccacccccacggcagaccctggtgtccctggacctcaccgggccatggaccccccccccgtccccgcacgtagatcgcagcaggcgtgattacacatgcacaccaacatgcatgccgccggcacatgctcgagacgtgtggacaccccagcgtgcgtgtgcgtgtgatgtgtgtgatgcaccagagcaccccctccacccccaccttgggtgtgtgtgcgtggtctgagcttcccccttcaccggggctgttgtgtagactgcagccaagtgtaacacagcagtccatcacgccctctctgtcctctgtgaacagtgtgtgtgcgtgcgtgagaccacagatctgtggacacaccatttgtgtacgtggaattttgtgtttcagtgtttgaacctaatgcaacagcaacaaagccactgatacctgagccctttgtgtctgctacaaaccaggcaggtggtgtgtgtggactcacactcacattctcagaggatccagggaggcccaggtacacacaggccatggcagacaccccatgtctttgttaccccaggggctgtggcatgtcccaggagggtgtgcatgtgtgtgtgtgtgtgtgtgtgtgtgtccaggatgtgcctgaagtattgataggtcttctcagatagagccctccacactgtggactggacacctgttttgggagggcacagaaatgtgtatttcttgctacctagaatgcagctgtgtgtgtgtggcgtgcgtgtgtatgcacgtgtgtgtgtgtgttaggggctctctacatggtg

SEQ ID NO: 82995 - DNA, 1078 bp, Homo sapiens
cctcagtttgcagagcaggctttcatccgtgatgtcattagagccccactgacctcctggcaagtggacggggaggctctttcattttagagttggggaaactgaggcccagagtggttgaataactttccaaaggtcacacagctagcaggtgagggatccggacttgaacccagttcccctgctaccaggactattccatgactccaaaacccagggaaatggaagtgggttgggatcaggtggtgtggaattggggtacaattcgagaaagagggagggaaaaggctaagcggggtaagggggaggcaggggagggggaggcctcatgaatgagtcaggggcccctgctcagaggtaaggaatcctgttggctgtggctgccggaggtggtgtggaagggtgaaggggctgagtggatgtggtggctttggtattagtcacagctcagggaaactggagattcaagagggggcgggcggggtgggaaaagctgacagattcaggtagcgtaagggtctccctgctacagttgaaagcaaggagcctgggatgcaggagacacctggcagggtgtgggggacctggaaacggggtctctgagacactgggagggatgaggcaggggcggtggtgggaggggacattagcccaggggactgattgtctttccaacagtaccttggcattcccaaggggttctcaagtccgtttgtcacacagtggtttcgggagccagactgtctgggttcaaattctaattttgctacttcctgtgagaccttgggcaagttgcttaacctctctggtcctcaatttcttcgcgtatgagttgggagaagtaagagtgcctgtttcacagggttgtcctgaggactggaagtagttaatatgcatcaggtgcctaggagggggcctggcgcccagcagtgctgtgtgtctgttacccagcagatggcttgtttatttctcttcaacaccacacaagccccctgcgatgggcaggacatggcccctattttattttggagtacattgagggccagagggggtaaaaaaaacctgacttgtccaaggt

SEQ ID NO: 82996 - DNA, 1064 bp, Homo sapiens
cctaccacccactgcctcgaaaggcctctgggggtggtcggcgcgcccctccccacctcgcgggggccgtgtgggcgtcgctcggtcgttggggtgccggggacgtcgtgatgagaacggcgtcccagagacggcggtgacagagccgggacacgtgacagtcacagggtcacattctgcggtccacgagtttgggaccgggctggtcacgtgacgcggtgggggcaccatggggtgatgtgagatgcgggtgtctcggattacgtacaaatgacgtattcctaccccttttggcaaccagatttccgttggaagatgcaacggttccggtgacggtagcaagttctcgcgtccaggcatctccgcttccgctcggggcgcaacaacttccgactccaccttcccagcctcgggcaaggaagagacgcgaccatgtgcgcatgccccgaatttatcacggaggggcggggctgaggctgcgggagctggagcggggaagaaaagggaattccaacctgtggaaccttggggggtccccggggtcggcgccttcccattgactgtgggcggtgcaagggacggagcctctggcggctcgtgggggtgttggggtccgcagggggagggaggggagtgtcagagtgtgagcggggtacgggaattccaaatttgagggcctcccggctctggcgccggggagggagagctcaggccgccatgcgggacaggacccacgagctgagacaggtgagacgccagggcagcggggatggggacgggcggacgaactggaacgcaggacttctggtcttcgggatagggaggggtggctgatggccaggaaggaaagtcccggaagcctgtgggtcctgcggggtaagagccgcagcgaaacggtggtgccaatgactccgggcctggcagggggatgacagctcggacgaagaggacaaggagcgggtcgcgctggtggtgcacccgggcacggcacggctggggagcccggacgaggagttcttccacaaggtaaggggctggggtctccgcctggattcgcgagggtg

SEQ ID NO: 82997 - DNA, 1112 bp, Homo sapiens
gttgggatcaggttgtgaactggcccggtaggaggcctaggatatgattagcgctcacttctgcagggttcatccgctcactacgtcactcctggccgtgaggcctgtgtggtgactgcttgtttagagatgggaagattgaggtgcctcctttttctcctcatccctgccccagggtcctagcctaggatttttggaaattgaatctttgcttgcctagtgagacagcagaacttcatccccttcctaagccagtagtgaggcaaagcaaggcttcatcgccacgacagggagcccactgtgggatattggggcaatagttgagccttgtggagttggaaaggtggaggaatttagttaataaacagttattggtggacattctcacaaactcctactgtggaggaggcagaggctacagacctgggttcaaatttcatctgaggttggttctttccatttgttttgggtcaccacacagggttctgggtgtagaggaggcagatgatcggtttcctagccctttgccagcctggactctggtgctggtgatgaagaattaacagccaaaccataagatgtgtaatgctagcaaagcaatagtcagggctcagagagcaggtgtttgggatttgaacactggctgggaccgtgactagtaagcttgtttctttgtggtgtcacttctcataagaacgctaatcctactggaccagggccatacccttatgacgtcattcagccttaattacttccataaaggccttgtctccaaatacagtcacaatgagagttagaatttcaatatatgaatggacagggaacacaaacattcactcataatgaactgctaggcagctgtgcagttggcttgagtagttgagtattatgcacaaaatgcttagaatgataccttgcccatggtaagcttgcaaggagtattgtccagatgacaccataaaggaaattagagaggaggggtgctggtcactgtggctcatgcctgtaatcacagcactttaggaagccatagtggaggagcatctgaagccaggagttcttgagaccactgtcggcagcgtagtgagacctccatctctatatacaaagaa

SEQ ID NO: 82998 - DNA, 1034 bp, Homo sapiens
cactcagccagggttcccgggaggtgggagggaagggaaagagggaaaggagaaggggggaagaggaaggaggtagagaaaagagggcgcagctggcatgagccaggagtctactcccagctctacggacacttcctattgttactaggaaacaggaagtgtccttaggtgcaaaagcttccccgcgaaacttccgcttcgggagcactgcctgtcccgcctccgagccgcagttttacgcagacacacttccggcgctaagttctaggtctgcacggctgactccgcccacgtaggtcacaacgcggcgtctttgcacgctaagctagccacacttccggcaagagcagctagaatcgttccggtgcatattgaataggcgcagaaagggagaaaaagattctacagccctggccacagtactttggtgacacttttcgtggggctctctggaggacttttcccaaggcagatggagaaaacttcgtgaaacccactccttgctattaaaggaaatgttgtggaatataattggacttaggttttgcagagcttgagcatggcctttttgtcctcccaccttctggttcttgaagacattgccggtgacctggccccagactaacacaaggcgggcgtataccgtcagcctgcctggcgtccccttgcctcagcacacacagagacctcttgcaagatgcttctctgccgccataggctggaggttccccgggaactttcccttccttcctagctgaggaagatccctcacttccgctcgccgcgccaccggtcccacctccccgccccccgctgggtcctagcgccggcccctgtttggcagggtccgggctccgtcggtgcgaggagccgacgccgacgccacggagtcagcacaagtctcatcaggtaggaaacgtcggcgggaagccgcgagggccccgggcagctcccacgcggccacgatccgagctggcctcagtttccctgcgggcgccgagggcgggccgggttggcccagcgcgagcagcgcg

SEQ ID NO: 82999 - DNA, 1033 bp, Homo sapiens
gcggaagtgagggatcttcctcagctaggaaggaagggaaagttcccggggaacctccagcctatggcggcagagaagcatcttgcaagaggtctctgtgtgtgctgaggcaaggggacgccaggcaggctgacggtatacgcccgccttgtgttagtctggggccaggtcaccggcaatgtcttcaagaaccagaaggtgggaggacaaaaaggccatgctcaagctctgcaaaacctaagtccaattatattccacaacatttcctttaatagcaaggagtgggtttcacgaagttttctccatctgccttgggaaaagtcctccagagagccccacgaaaagtgtcaccaaagtactgtggccagggctgtagaatctttttctccctttctgcgcctattcaatatgcaccggaacgattctagctgctcttgccggaagtgtggctagcttagcgtgcaaagacgccgcgttgtgacctacgtgggcggagtcagccgtgcagacctagaacttagcgccggaagtgtgtctgcgtaaaactgcggctcggaggcgggacaggcagtgctcccgaagcggaagtttcgcggggaagcttttgcacctaaggacacttcctgtttcctagtaacaataggaagtgtccgtagagctgggagtagactcctggctcatgccagctgcgccctcttttctctacctccttcctcttccccccttctcctttccctctttcccttccctcccacctcccgggaaccctggctgagtgtgcgtgtgtgggagcgcgagagccccccgacagccaccccttggggcgcgcggctgcagttagggtaagggtcccagtgcgcaggcgcgctcttgttcgcggtccccaactgacgcgcccgcggcgggaaggagagggggccgccggtgcgaggtaggcgtcctgagaggaaattggcagacgagatgagtgaggtcagaggacttcattggtggttgactaggggaggggacttttgatcaaaggggctttgtg

SEQ ID NO: 83000 - DNA, 1004 bp, Homo sapiens
taggccttggcccctccaccagaggaaggtgctgccacgtgtctgctccttctgaacctccaggtttctgctacgttgccccatggaggacacacccccctcactcagctgctccgactgtcagcgccactttcccagcctcccagagctctctcggcaccgagaactgctccatccatctcccaaccaggacagtgaggaggctgacagcatccctcggccctaccgttgtcagcagtgtgggcggggctaccgtcaccccgggagcctggttaaccatcgtcggacccacgagactggccttttcccctgtaccacctgtggcaaggacttctccaatcccatggctctcaagagccatatgaggacacatgctcctgagggccgccgcaggcacaggcccccacgccccaaggaagccactccacacctccagggtgagacggtgtccactgactcctggggccaaaggcttggctctagtgaaggctgggaaaaccagacaaaacatacagaagagacacctgactgtgaatctgtacctgaccccagggcagcttcgggtacgtgggaagatctgcccaccagacaaagagaaggcttggcaagccacccaggtcctgaggatggtgcagacggctggggaccctccactaactctgccagagcccctcctctccccatcccagccagcagccttcttagcaacttggaacagtatctggctgaatcagtagtgaacttcacagggggccaggagcccacccagtcccctcctgctgaggaggagcggcggtacaaatgtagtcagtgtggcaagacctacaagcacgccgggagcctcaccaaccaccgccagagccacacgctgggcatctacccctgtgccatctgtttcaaggagttctctaacctcatggctctgaagaaccactctcgactgcatgcccagtatcggccttaccactgtccccactgcccccgtgtcttccggctcccccggg

SEQ ID NO: 83001 - DNA, 1684 bp, Homo sapiens
gtgcacagatgctgaatggctctgcggagctcagcacctctggggagctggaggacagtggcctggaggaataccggcctttccgctgtggggactgtggccgtacttaccgccatgctgggagcctcatcaaccatcgaaagagccaccagacaggtgtctacccctgctcactctgttctaagcagctgttcaatgcggctgccctcaaaaaccatgtgcgggctcatcacaggcccaggcaaggagttggggaaaatgggcagccatcagtcccaccagctcccctgctgctggctgagaccacccacaaagaggaagaggaccccaccaccaccctggaccatcggccctataagtgcagtgagtgtggtcgtgcttaccgccaccgggggagcctggtgaaccatcgccacagccatcggactggagagtaccagtgctcactctgtccccgcaagtaccccaatctcatggccctgcgcaaccacgtgcgggtacattgcaaggctgctcgccgaagtgcagacatcggggctgagggtgcccccagccacctcaaggtagaactcccgcctgacccagtggaggcagaggcagccccgcacacagatcaggaccatgtgtgcaaacatgaagaagaggccacggacatcaccccagcagcagacaagacagcagcacatatctgtagcatctgtgggctgctctttgaagacgctgagagccttgaacgtcatggcctgactcatggggcaggggaaaaggaaaatagcagaacagagaccacaatgtcacctcctagggcctttgcctgccgagactgtggaaagagctatcgccactcaggcagccttatcaaccacaggcagacccaccagacaggagacttcagttgtggggcctgtgccaagcacttccacaccatggctgccatgaagaaccacttgcgccggcacagtcggcggcggagcaggcggcatcggaagcgggctggcggtgccagcggtgggagagaagccaaactcctggcagcggagagctggacccgggagctagaagacaatgaaggcctggagtctccccaagacccttcaggggaaagtcctcatggggctgaaggcaacctggaaagtgatggggactgtttgcaggctgaatctgaaggggacaaatgtgggcttgagagggatgagacccatttccagggtgataaagagagcggaggcactggggaaggactggaaaggaaggatgccagtttacttgacaacttggacatcccaggtgaggaaggtggtggcactcacttctgcgatagcctcactggggtggatgaagaccagaagccagccactggccaacccaactcctcttcccactctgccaatgctgtcactggctggcaggctggggccgctcacacatgctctgactgtgggcattctttcccccatgccactggcctgctgagccacaggccctgccacccaccaggcatctatcagtgctccctctgcccgaaggagtttgactctctgcctgccctccgcagccacttccagaaccataggcctggggaggcgacctcagcacagcctttcctctgctgcctctgtggcatgatcttccctgggcgggctggctacaggcttcaccggcgccaggcccacagctcctctgg

SEQ ID NO: 83002 - DNA, 1033 bp, Homo sapiens
cctcagttcctaactaggtcagaggagccagaggacagtgtccacaggagtccttgccacgctggtgactgccagctcaatggacctactctgagtcacatggatagctgggacaacagagacaacagctctcagctgcagccagggagccactcctcttgcagccagtgtggcaagacttactgccagtcaggcagcctcttgaaccacaacaccaacaagacagaccgacactattgcctgctctgctccaaggagttcttaaatcctgtggccacaaagagccacagccacaaccacatagacgcccagacctttgcctgtcctgactgtggcaaagcctttgagtcccaccaggaactggccagccacctgcaggctcatgcccggggccacagccaggtgccagcccagatggaggaggccagagatcccaaagccgggactggggaggaccaggtggttctccctggtcaagggaaagcccaggaggccccatcagaaacccccagaggcccaggagagagtgtggagagagccaggggaggacaagcggtgacgtccatggcggctgaggacaaggagcggcccttccgctgcacccagtgcgggcgctcctaccgccatgctggcagcctgctgaaccaccagaaggcccacaccacagggttgtacccgtgctccctctgtcccaaacttctccctaacctgctgtctcttaagaaccacagcaggacccacacggaccccaagcgccactgctgcagcatctgtggcaaggcctttcggacagctgcccggctggagggccacgggcgggtccatgcaccccgggaggggcctttcacctgcccccattgtccccgccacttccgccgccgaatcagcttcgtgcagcaccagcagcagcaccaggaggagtggacggtggccggctccggtagggggcatgaagggtcccaggaggaggtgggcacacagtggagggggaagtccagccccaaagtcggtgggggagcaaggagtgagagga

SEQ ID NO: 83003 - DNA, 1032 bp, Homo sapiens
ctctccacctcccctagtagaggcggacccattccatctagtggccaccgagggtgggtggccctgagatggtgggcccttgacaggccttgtcagagcagagggcaggtgggagtcacctgaaagctgaaggaatggctttaaggatagaagatttctcatgacctcaagggatatgagggaggagccagtttgccagggctgggaaaataattaggaggcctagaatccctgttctcatctgggcctccggggccaggggcaggggaatggcctgcagggctgggagggggtacacgctgtgcggggtctgcccctcagttggtgacctcctctctctctccccccaggagccccagtggcaccagtgacgggcagaggggacttgccattgccccctccacccacccccacgaccccactcctggatccttcaccccagtggcctgcagacctcagcttctccctctgaacttcaagtctccaaagatcagaatctgggggagggagcgcgtgcagggaggggcttgatctccacattttctcaggagtagttcgggcatccccatatcttctcctctccccttgtgaagaggacccagatctggcttctttcccaaggagggggtggggtgttcctcgcgtccctgtccttgaaggacctccttcccccagcctcatcaccgtgctcttctcagcgccaccctcagcagccagattgcaacaccagggagaggcggatgcagagccccaccggtgggaaagttgcctgtggaagggagccttttgctacaatttgtaacttattttctaaagtctattttgtaacaatttatttaagtttaaaaaaaggaaaactgctgccccccaaaaaaagaaattttcaaaacaacgtggctggcgtgattgtatctgaaagggtaaaggaggaggaaagctgagacgcctgcttggtagcagagttgggtgtgggagtgtccacagacacccctgtcctgcagggtggggagtgggcacctgtggccccaggca

SEQ ID NO: 83004 - DNA, 1039 bp, Homo sapiens
aacagggtctgtcttggccgccatgacagatgagaatactgaggctcaaagcggttgagcagcctgctccaagtcacacgatgacaaagaaccagaatctgaatcaaatgggtctgcctgttgctccaccctacccaaggcagctggagtgggttagaacggcacgttctcactggagagagaagggtcctggagaggcagggtttggcaggaggccccggggccacatacttatgttggccaggcagcttccaggctcagcctcgggctctggttcctcggcgaagtagacctgccagtccaaactgctgacccagtcctcataggcagggagcgcggtgaagaccgccggcctggcggggccttggcaagcatctccgaagctgtgcagcccggccaggaaccatgtgcccctcacctcatgcaccagtggtgccccagacaggccctgtcaggggtcaggtgacactgggtgactttttataggcagctgtgcaggacggtagagcaggctagggaacctctggctgtttgggggctaattggcaaaaaggcttagtttcaggtgggaggtgggtccagaggccaagcctggaaggtccgttcttgagctattgggtgaggggatgccaggggcctgttaggtaaggtgtgggggcctggggctcacctcacagctgggcagctcacccacagcactggtacacaccatccccggcagaatagggctgccatcacccccaggagctgcatgcagccggctgcaggccctaggccccaggagggtcacgggcactgtctggagggagctgatgcctgtggagcaagggaaagctggctgccccggcctgcaggttggatggacagcagccctggccctgtgcccacctacctgctcctgggcgggcccgtcccagaacccagccacgctccccatcaggcaggtggtggtcaggatagggcaggcagaggggccgcaggctggctcccagtgtcacaggctgggccagcagcaggagggccatgtcgtagcccccct

SEQ ID NO: 83005 - DNA, 1031 bp, Homo sapiens
ggaaggggaaggacaaggtccaggctgctgagtgcaagggtagacagtgacaccatgggagaccccacaggtaggtggaagatagcagagagcactccacggctttttctttttgaggtagggtctcgtcctgtcgcccaggctgcagtgcagtggcatgaccatgactcactacaagccttgacctcccaggctcaagcgatcctcccacctcagcctcgtgagtagctgggactacaggcgtgcaccaccatgcctggctaattttacagtttttgtagagacatggtcttgctatgttgcacaggctagtcttgaactcttgggctcaagcgatcctccctccgtggcctcccaaagggctgggattacaagcgtgagctactgtgcccggcctcagtctgtgactttaagcgaggtcattcccttgcaacctgagttttctgatttgtaaatcttctaccatgaaaggtggttgttacaattaacttgacaatatgtacccagtacatggcagattctcagtaaatggttctttattattactctagaggcagggactagccttgtggggcttgagacaaattgtccactccccagagccggagaccctgcctgaccccagccatgacttacttttcaaagcagtgggcagcagtgaggacccaggtgtctgccaccagggagccgctgcagatgtgggctccttgcctcctcacactggcctgccagggccactcgccagggactgtgttgccctcctgaggcttgggggggccggggccacgctgtccacaggctgtggaaaggagttagtcacactgacagcagatacctgtcctgacctcaccccagtcccaacccagacccaagtaagacctaggccccgtgtccccagaccttaccacgctgagcggcttgaagacctgggaagagagagacacaggtaagatgcagggactccaggcctgcctagctttggggaggagaggggatgggctggggggcgggcccagggtccttgcctgtga

SEQ ID NO: 83006 - DNA, 1169 bp, Homo sapiens
cgctcccagggcccgggtttgaaggcgctgggcaggcaggggcagccccgccccctgagaagggtacccgggaccccggggcgctggggcgaggttttcgggctggaagggtctgaggggctcctcccccgacagccctcccaccgccagtagagcctcgggttggggaatagaagcccccgggaggctaggtcctttgggcgcggcctgtgtgcatctggggagacggtgggagtggtggggagaggtcgcccgggtctggggagaccgatgcacaggtggagagatggtgcgggttctgtggattcggatccttacaacttcctcttccccgccccggtagatgggagctgctctccgcgggctgagcctgtcagcatcctcgacgcaccctggtccctgaagtcggagaagagcccctacccacccacacccccttgccccattttgggtcgcctgggtcctcagtcctagcggatcctcagtcctagcggccaccgggtctgaaaggagcaagacgatgatcctggcgtcggtgctgaggagcggtcccgggggcgggcttccgctccggcccctcctgggacccgcactcgcgctccgggcccgctcgacgtcggccaccgacacacaccacgtggagatggctcgggagcgctccaagaccgtcacctccttttacaaccagtcggccatcgacgcggcagcggagaaggtgcgcaagggggcagccagcccagggtccgggatgtaggcgggagggagagtgttgggggttctctgctcaaggcctctctccctctctagccctcagtccgcctaacgcccaccatgatgctctacgctggccgctctcaggacggcagccaccttctggtaagattcacgccctctattttcctcgtggatcctggagctctcccagacactcaggctccagccccgccttcccttctcattttctcccagaaaagtgctcggtacctgcagcaagaacttccagtgaggattgctcaccgcatcaagggcttccgctgccttcctttcatcattggctgcaaccccaccatactgcacgtggtaaggtagagaggaccttaggtcagcgggccaccctgccccgggggcaagtggggagtctggggcccagagtggcagacgattgcttg

SEQ ID NO: 83007 - DNA, 1050 bp, Homo sapiens
gagcccttgcccggggcatgatctgcggggagcagggtttctcaaccatggcactattgacatttccagccagataattctttgtcacaggggctgccccgtgcacgttaggaagttcagcagcatccctggcgccagcagtactgcctagttgtgacaaacaaaaatgtctctgcacattgccatatgttacttaggggggcagaattgtttccagttgcaaaccactggtggaggggcccctgactgaaccctcgctcctatccgcagacgcctgtgtgagcacaagtatggcaatgcgccccgtgtccgcatcaatggccatgtggctgcccggttccccttcatccctatgccactggactacatcctgccggagctgctcaagaatgccatgaggtggggtggcttgatgtgctggcttgggggcggacaggaaccggggtgcttgtacctactggtctttcccctctgcatagagccacaatggagagtcacctagacactccctacaatgtcccagatgtggtcatcaccatcgccaacaatgatgtcgatctgatcatcaggtttgccctgagtgggagttgagctgaggtggatgggatgggggtctaggcactgtttctgacttgatttaggaccttgagccccttcctgccccattctgggacttggtccctgaccagacaaactattctctgaatcctgagatggccatgagctgcttattaatggatctggggccagctgcaggcctaggtatcctgcctctgtcagcagctgaggagcttgaaattgagaaatagtcaggagtcggtctaggatgctgggccgaggataaatgtcacatcctgtgagaaggtataagcagtcagtggccctggcaggggtgaggatgatataaacaaggcccaagggtctaggtggaccacattccagctctgggtggaaggaacaggaaggcagactttgcactgtctgcttggggggtggtgagtaccccatcaaagctgagccaagcccattgttgttgccatcttgctagga

SEQ ID NO: 83008 - DNA, 1562 bp, Homo sapiens
ttttttttttcgtctttttggtacagatggggttttgccatgttgaccaggctggtctcaaactcctggcctcaagtgatctgcccatctcggcctccagaagtactgggattacaggtgtgagccacacacccagccagttattttctcattcgtaaaatgagaataacagcctcaacctgatccacctcacagttgtggcagtgattgagtagaatggcagaggtggaccagtgaggttagctgatgtgtggccctgaactctggaaactgcttctcagtgtgcaggattccttttgttccagccttaccttcctgatgaccctagcctttttccatcacagattctgctgaagtgatccagtctcgagtgaacgaccaggagggccgagaggaattctatgtacactacgtgggctgtgagtggcttggcacatctgggcgtgggtgcagggagttggctgccctggcagcactcttatggcccatacttacagttaaccggcggctggacgagtgggtagacaagaaccggctggcgctgaccaagacagtgaaggatgctgtacagaagaactcagagaagtacctgagcgagctcgcagagcagcctgagcgcaagatcactcgcaaccaaaagcgcaagcatgatgagatcaaccatgtgcagaaggtccggatcccttcccatccacgggcccaggaggcccagcttctctgccagttcccttgggtctctcgggccccagtgccaaaaccatagcaaatcccatttcttaagctcctgtagtgtgtcagggactttacctacttcctcttacttacttttcataggtaagaaaacagacagagggtaagggcttcgctgcagtctcacagcaaggaaatggcacagctgggactagaactcaggcctccggcactggtagcctcttttgtctcctagtagctgtgtcttagtagaaaaaatgacttgaagttcagtgggaaagacgagaatgttattcggcagttgctatagccaagcaccctgccaagtgctgtatatgtataagctcctcaaatccttcccaacaattcaacacacaggaatagttacttttttggtaggtgaggaagcaggctgagagagattaagtaacatgcccaaggtcacacagccagtaaaacggtgggctggaattagaataataatgccaaacacttgttagccggtgagcagaagtattcagctaaatggtttttgtgtgtgtgtgtgtgtgtgtgtgtgtgtgttttgttttttgtttttttttttgagacggagtcttgctctgtcgcccaggttggagtacagtggaatgatctcggctcactgtaaactccgccacctgggttcaagcaattttcctgtctcagcctcccaagtagctaggactacaggtacctgccaccacgcccggataatttttgtatttttagtagagacgaggtttcgccatattggtcaggctggtctcgaactcctgacctcaggtgatctgcccacctcggcctcccaaagtgctgggattacaggcgtg

SEQ ID NO: 83009 - DNA, 1046 bp, Homo sapiens
ctggaggccagagtgtacacaccaggcctgttgcgggccccacaggcatctccccagctcacaatgcccgtcaggtaccagagaccctccacagggcaggagagtgggcccccagagtcaccctgaggagagaagccacacagcagccatcaggaccgggccaggcctcctttccgaagttgcactggtcatctgccccccgggcctgtgcttacctggcaggcgtccttgcccccctccacatagccagcacacaccatgtcctcttggacaaagtgcggctcctcaggcttggcgtcgatgttgtacaggcagttacacgtctcacgactgatcagaggcacctcgagttgctgcagtggcttgggcgtcaggaggctcactgtgggggtaaaagaggcttaccctgggcccctccccaagtcaggtgcccctccacacctctaggcacccagcgtcccacctcacctgagggggccacatgaccccagccagtgacagtgcagtggaggccgttggggaaggaggcgttggctgcagggaggcagatgggccggatgtagcgggagaaggtgatgggtctgctgagttggaggagtgcaatgtcgccctgggagccctcctggaggtagctggggtgggggatgatgtccttcagggtgctgaccttggcgtcctcggagtaggagtctagctggtgggcccccagcttgacctcataggcttccttgtggtgctcgctgcaggcagggggcaaaggctgagacccaggagacctctccttgttccccaacccccactgccaacccctgattccgatcagccccttttaggtctcaaattgcaccttagttttatcatgtaacctctgacccctcaccttcactcctaactggtccttccagacttagaactgacactctcagacccaacccaagaaccccaacctctgacctggattgacccattaactttgacctccagcccacttttgactttcaccatttggtacctggggaagcagtgagcagctgacagcacccact

SEQ ID NO: 83010 - DNA, 1035 bp, Homo sapiens
atcccagcactttgggaggccgaggccggcggatcacgagatcagatcaagaccatcctggctcacacagtgaaaccccgtctctactaaaaatacaaaaaattagccgggcgtagtagcgggtgcctgtagtcccagctactcgggaggctgaggcaggagaatggcatgaaccagggaggtggagcttgcagtgagccgagatcgcgccactgcactccagctgggggacagagtgagactctgtctcaaaaaaaaaaaaaaaaaaaaattccaattctgctatctctctagggtacagtagtccaacactgcctctcccctgcctactccaggacgcccaggcccctgtacctcacacctgttctcctgcccctctgcatacaggacacagagggttccagggggcaggatgccctgatagaggcagtcacagattcgttgtgtcaagatggagacagcagcagccacagggactggggagaggagacaaagttgttccagggctctggcctccagctactcctcgttcccgtgacccaggggtctcacctcggtcctggggttctttccagcccaacacccagcagctggcccccggggggatacccgccgggtggagacagatgggcagggctgatggggagggctccacccgggagctcagctccaggagggccagggggggcctgagtcccaggtgctggggcagccggatgctgatgaccaagcgggatacctggtggccctgtgggagggagctggcccctgcccggcccagatacacttcaatgtaaggcactgttgtagagcctggcctgttggaacaaggtccaatgtcaccttctgctcctcccattgctggcaaagtccttcccagcccaggggaaggatgactctctggggtcatgccactcactccttcatcatccctccttccaaatctcccttctaggtcaaaacatctcccagtgctgtaagattcttccctcatgccccaccccagacagagtcttgctctgtcgctccgactgg

SEQ ID NO: 83011 - DNA, 1060 bp, Homo sapiens
tggagccgcggggacgaggcgccccatacagcggcaagagggtggagggcaggagctcgccatcctgggtgaaagcggggcccagcgaaggggcccggccacaggaatctcggttccaccccgctactcccggctgtgactccagtttcgtccccagccgccgggaccgccccctcgccccgcccccagcgggcactcaggccgtaccactgtgccttcatgggggtggagatagatcgtgggctagtcctgccgaggagagaggggttcttcctcaaaaaatatgattatgtatagtattcgcatgattctagttaacttgtttcccttctgcctgctcggaccctctacctgccctacgaagggggcggagtgcgttcctgcctccccctgctcttccgcgtttggtgcgcgcctgcgcggtgcgtaggcggcggagcgtacttaagcttcgacgcaggaggcggggctgctcagtcctccaggcgtcggtactcagcggtgttggaacttcgttgcttgcttgcctgtgcgcgcgtgcgcggacatggcctcaaacggtaggtaagggcgcgaggcgacggcggcggcgcacccggccgaggcctcccagctgggcttttcgttttcagtgggaccggggcggcgatcccgtgtgggattttttggcgcccctgtggcgggaagccgcggagaagagtaactggaggaggctggtgtcgccattttgtttcgctcctctggccctcgcgcgcggggcgggaagtcttttctttgcagtccgtttgcttggggtgggcgttgggagggacgcttcttaggggtttgaagcgtcaggtgagggtggaaaacgcccattctccgtggcctcgcctcccccaactcccggccccgcgctcgagcccgctttgtcgcagtgctgcatccgggcactcgcggcgcgcacgcgctctgcgggcccctcccccttcgcggcgcgggtaccccttccccgcctcgtgttggttcagctttctgtcgcgagacccttcgcggaagactcggcggcgcgcgtccggtg

SEQ ID NO: 83012 - DNA, 1586 bp, Homo sapiens
gcttttcaaaagcgcttttgttgctttttgttcgctgggggaaggcagggtaggtgagaaaacggaaccatctggagtcccagggctggggactcgagtacctgttgactttcgcctcctaaggcgagcagttgcatgatctctgtcatttggggtccaagggctcttttgattctctggctttgcactaaaaagcccacttcatctccgggattggtcaaagagtgaagaatggccttttttgagactttcttattctgtgggtctgggctgagagagcagaggccacaatctgaacactgttcgaattcaaacctgtgccactttggtagttctgcgacgttgggagagttagtctcttgactcctggcgataatggctttctcatagagtggatgaaacgaatgcgcgatgttttagagcaatcactgacatgaattgggcttgcagaaaattgtggatgtccaccaagaccttggtttttccaatggttaaggcttctgggactctgtagaaacttgcattttcttcactttttctttattgtaagaacacttggctgataacgccagtttgttcctcttctcaaccagtgtctcatggaggaattttatgccctttgttgcaacatggtcctatttttatttttttttttgagatggagtcttgctctgttgccaggctggagtgcaatggctcactgcaacctctgcctcccgggttcaagcgattctcctgcttcacctcccgagtagctgggattacaggcgtgcgccaccatgcccggctaattttttgtatttttattagagatggggcttcaccatgttggtcaggccagtctcgaattcctgacctcaagtgatccacccacctcggcctcccaaactgctgggattacaggcatgatccaccgtgcctggcctacgtggtcctttttattcatcagtgcttgagttaaggaatttagctttaattcaactctttcagagtggcagctgaagataatgtgattgtatttttcttttgcagattatacccaacaagcaacccaaaggtgagtgctatttttgggcttccagagtttgtagagggcaagggtggtcacgccatgttttctgatcacgctggttttccttttatttagctatggggcctaccccacccagcccgggcagggctattcccagcagagcagtcagccctacggacagcagagttacagtggttatagccagtccacggacacttcaggctatggccagagcagctattcttcttatggccagagccagaacagtgagtctttctcagcgggtcacctcttcctactctttctgaatattgcttttctttttcttgttttttggagacggagtctggtcctgttgcccaggctggagtgcagtggtgctgtctcagctcactgcaacatcagcctaccgggttcaaacgattctcctgcctcagcctcctgagtagctgggattacaggtacctgctaccacgcctggctaattttgtgtttttagtagagatggggtttcaccgtgttggacaggctggtctggaactcctgacctcct

SEQ ID NO: 83013 - DNA, 8498 bp, Homo sapiens
ttttgactcttcttattttccatcagcatgaaagagagcatattttctaaaggaagaaccagttttaggccaattctgaaatggagaaaatggttttgtttgaaaatgtatgaaatcatgtgatacataaggaggtgggatttgccccaaggtcctgaagtgtaactaagaaaggtggttgtcctgtagatactgcacgcacagctgcatattacagtgctgttaacagggatccttgggcctgggtttagagggtggtgctggagatggtgttgggattggcggggtgaaattggaactgtactaaagagttggtagaagttgaagcattaaatttaggctttgaaaggagggtaactatctttgcctatgagttgcaacatcactaacagcttctgagaggctggctttatgagtataggtattatgttttctttaacccattccttacattttctctttcctggtggcttttgtgactccctttttcttatcctggtagcaggctatggaactcagtcaactccccagggatatggctcgactggcggctatggcagtagccagagctcccaatcgtcttacgggcagcagtcctcctaccctggctatggccagcagccagctcccagcagcacctcgggaaggtacggtggtgttgatgtcggggaaggcttgaaaagaggggtgaattgatgaggaatgataaagggaccagcagtaggagcagttcagaggtgtaattggggtaggggagcctgtgttgggtacagagaatggactccactaaaagtgaaaggaaattgggggctatgctgggattgtgattgtgttttttgtttgttttccctagttacggtagcagttctcagagcagcagctatgggcagccccagagtgggagctacagccagcagcctagctatggtggacagcagcaaagctatggacagcagcaaagctataatccccctcagggctatggacagcagaaccagtacaacagcagcagtggtggtggaggtggaggtggaggtggaggtgagatgtcttcagctttgtctgcagcccattttctttttctttttttttttttttttgagacggagtcttgctctgtctctgttgctgaggctggagtgcagtggcacaatctcggctcactgcaagctccgccttccgggttcgcgccagtctcctgcctcagcctcccgagtagctgggactacaggcatccgccaccacgcccggctaattttttgtatttttagtagagacggggtttcaccatgttagccaggatggtttcgatctcctgaccttgtgatccgcccgccttggcctcccaaagtgctgggattacaggcgtgagccactgtgcctggtgtctgcagcccattttctataaggatttgtattctcctgttttagcttaaaagagggttcctgtcttgtttcctagctgtctttttactttcttttgtccttcattgcctggcacttgtcaaaccttttcaaaccttttagtgctactttacaatctttttgttttttttttttaatcattctttcttttctcacaggtaactatggccaagatcaatcctccatgagtagtggtggtggcagtggtggcggttatggcaatcaagaccagagtggtggaggtggcagcggtggctatggacagcaggaccgtggaggccgcggcaggggtggcagtggtggcggcggcggcggcggcggtggtggttacaaccgcagcagtggtggctatgaacccagaggtcgtggaggtggccgtggaggcagaggtggcatggggtaggtgtctcatgagccagggagtatctttggtggggagtgtggaggattgcatgaatctccctgaagccagtccctagtgcatggtttagtattcttgttgtctagggatctgtgagggctttgatttgggggcagtgactttctttttacatccccattttatttttgtgagaacttgggagcctgaactcccatccataccactgaatagagattttgagtaatgatacttgtttccaaaaaaaaagaaaccatacatagatacgtatggattggagtcattaatatcctaggcaagaaacatggaagtgaagacttctttctctgcaagggaaaccgatgatcccactcctgggaaatagtagggaaacttggtatgtgtattcccatgtgtcctctagggagttggtaatggttaacctgacttcagcttccaggaattggctactcttcccgttttctatagtcatttgaatccacgagcttgatttgcactaatttgaccgacattgattttgtgtgtgacttggtttatggggccagctgactgaagtaagcagaccttttgggcaaaaatatgctttgacagtggtctcccacctatttgttccactgtctgccttcccctggttacttaaaattcatcagcttgtccaactggaccttctttccttcctgctgaagttgatttgaagtaaaaccttagatttgatgttaaaacagttgtcaaatctgttggtaaataagatttgaaggaccctactctgtctcccttgaaaaaggggaggaatgtcagtgttactgtttttggaaaaagtagatttttaaaccgagtttggaaatggtaagtatgcagaggtgggtgggggcaatctcaaaaacgtgcaaaaatgaggaaaacaaaaatgaggaaatgtgtgcgtgtgtttaatgcaaaactttaaaaagaaaaacaactgttatgtgactgttaacttgctctgcattttatgtgccacaggtatgaaaggtgacattgcaaaatactccgctcttctcgcagtgtagaaggggtgaccccgggggttgggggagatcaaaaacagctcagtagttaggacagagcttagctaagtttgtcttgctttaaggggaagttgcctttggttttgactttttatggaatggggttgggtctgcttgctgctttcaaagcaaaaaccacaaaaatgtgttcaaggctaccccagcctggtgtgaaatgtcttctgggtaaattggggtagggtttttaaaccaactacttggttgtcaaccacttgcgacaagaggaaaaaaaaacatctgctccatcggaagaacgaccaaggaaaatgggttattttttttccagaggaaatagataacgtaaccttttaaagcaaaatctttataaactgtgtctgagaaattgcacacgtgtgtgtgacatgctcaaaggtcagacaaggggtggtcaggaagggatgtattttagtagccacttgtatctttttccaaaaacacctacccatgtttggggaatgttaaacaaaatcaaaaaacaaccttttgtagccgttggaagcttcatgtcctttcttctaacttgtcttctccagcggaagtgaccgtggtggcttcaataaatttggtggtaagtgaacagagtttccaaaattcccaactcccagcaatgctttgtctgattgttcatttgcagatgtcttagcgtgttaatttaaatgtcaaaggttttgaggtgtccagaaccacctccagaaaggggtagggtagaatgccacctgttgcctggtgtgtgctaacctggagcaggtaggggtaagactcaatagtcatcttttaccaaatgggtttgccccaggttaataagaggggtctagtaggccttggactgggccgttgccacacctggcacttagtgaccatcatcatgagaaactggagagtgcgtgctggaacacgtggtgccatcttggctttaggatccttttgatcgttgtgtccaaggcttgtgtgtgtgtgagtgtgtgggagacaactccgaatgtttaattctggaagagggatgtaacattgccctgaggatggtgaagttggtatacatttataaagtacggaatggtgtcaatgaatgcaattctatgtatatggacttaactgagatgggcaaatagaaactagctctgggaaggaacatgtgcactacttcaagaaagattggaagcatgtgtggctcatgggaaataaccaggtcttaaacagcacaaactgaattcgtggaccaggaaggtcttaaacagcacaaactgaattcatggaaaaatgacaaatttgagaagtctcccagtaagctggaacttttctggtttggttaacaaaaggtttcttgatttgtttcaagatttaaagccaaaggtgtgggttcatgacttaggtgtcattgcgtgtgggtacaatatttatatatggcgaattcagataaacattggtcaaagatggtctctggaaaaacaaaatagaggctgcattacggaaataagatttctggtctgttccctgggacatgcttaaaaaatacaatagctattatgtatggtttttattttcatgtggtttcggggaaacaacacggttttaaggatggtttctaaagatgaaattaaaaattgttccacaagggttaagtgtctggtggtaaagttgggagaaactggatggatgcacatcgcatggctggtggcgagcccatctctcttctctcgggtgagagaaccgggccaagctgagttggtttgttcactttaatgggtctccgtttcccctgccacctgtgctgaggacatttcccagcctgagctgggggaggcagcatttgctgaagtgtggagttgtctctgtggagactcaagttacagatcttaaggggcctgcctagaattttctcctctgggcaggcgacccaggaaagggtttggagtgaggctgtgagcacttacttgatattttacaagtttggatttggtgttaatttttttccttgtccgttttttcctgttgactaacggctcatcttttccttgtttttgttttttttttgttctttttttccatgtcactaaaggccctcgggaccaaggatcacgtcatgactccggtgagttcacacgtggtggcatgaaaagagtggctaaagtggtatcaagactgcctggatgttctttgaaactattataaaaaggaaactgaaaaaaatggggatagagaaggaagggagttaggtgtgtccttagttagcagtgagaagtatttgttacgaagtatttctcagaaatacctggcttgtgggttccacccccagtgatttaggtctgagaggaccctgaaaatctacctttctaacaagtccccagtgatgctgatgcgtctggaccacactcagatggtttacagcagtggttctttcaaaatgtggatcatgtccaagttggtgaacaaaactagtgaaagacctgaccacatgaagtaaagcattgaactcctgtttaggttgtattgatgtttgtgtactagatttgaatgtaaaatgggtttcttatttaattcggggaccttcaactgaaagttgataaatactgatggacttttctgtgtggtcttgttgggcatttcactcctgagccctggtttccatactgtatactgggtgttaacatgtttcaaaggataattgtcaaactgaatctgaaatttatcagcatggctggcatatagggactcaaaagggatgtggatttctttttagttgtcttccataaaccaaatgataccagttgcttgatggatactaggtgctttaggttttttcctgtgttttttattttaccttttcacatttgcattttctctgttcaacaagcagaacaggataattcagacaacaacaccatctttgtgcaaggcctgggtgagaatgttacaattgagtctgtggctgattacttcaagcagattggtattattaaggtacttgtggagaggagtgggagctttctgtcagtgttgtaggcttgtggatttcacacattagtaaaagcaagtctttaatggttgccagcagtaaaaacaagtcttagtggttgttgccagcttaatttgttgaggaaagagccttagttactgttttctaaaagagaagttctatcttaacacaaaaagtataacttatcagagtaccctaaactcttgagatttgtactctatagtaacttttagttttatctttcaatattggagtgagagacagttttctttaatggaggtttacatgtgaggtaggaagaagtaactgggaagaggggagctgaagtttgggaattataaacctcatgttctagaggaagaagatggaaagggagtactgtagcctttaaaattgatgttacctcattttgctttcttcagacaaacaagaaaacgggacagcccatgattaatttgtacacagacagggaaactggcaagctgaagggagaggcaacggtctcttttgatgacccaccttcagctaaagcagctattgactggtttgatggtatgtatgagaaggctggcagaggtggggctggggatatagggcagcaagccttaggaaacaagccatagtttgagggttcttttgagtcttccaacacttactttagctgcggtttcaggtagtctcatttttgcttatgtgtcagcagattataaaccatttgagaaaggcacgcttctcttgtattttcggattaatgtgtcttgcatttaaagtctgttgatgattttttgtttctctaggtaaagaattctccggaaatcctatcaaggtctcatttgctactcgccgggcagactttaatcggggtggtggcaatggtcgtggaggccgagggcgaggaggtgaggagctacctgctagtggtgcagaggggtaatggggagagtgcagaagatggtaaaggcttgcatggaatgggttagatttaccaaacttggagagggagcagacccatacttggtctatctgcattaggacccatgggccgtggaggctatggaggtggtggcagtggtggtggtggccgaggaggatttcccagtggaggtggtggcggtggaggacagcagcgagctggtgactggaagtgtcctaatccgtgagtgaaacttaatttttttcttagttctcttgcatgcgtgctctttgatatattggtactgaggtatgtgcgtgttttccaaagaagtaaatgtcaaggccacactgttggggtcagatttagccaaaagcttacctaggtaaggttgatgtaatgggaaaggtaatggattgggttcagtaatactgatttttgttcctgactctgagaagcaagccgttttgtctttctgaagcttcagtttcctcactgtatctctaaagtcaccgtagtttcttcctagttctaggtcttgcctattccccatcgctccagactgattgtcttcctttctccttagcacctgtgagaatatgaacttctcttggaggaatgaatgcaaccagtgtaaggcccctaaaccagatggcccaggagggggaccaggtggctctcacatgggtaagaaaggcagacctggtgctagggagctgggaccaaagaatccttaatttttcagcggggaggctcggggaacataggggaatgggaatatgatagatcttgtttcttttgtcctagggggtaactacggggatgatcgtcgtggtggcagaggaggctatgatcgaggcggctaccggggccgcggcggggaccgtggaggcttccgagggggccggggtggtggggacagaggtggctttggccctggcaagatggattccaggtaagactttaaatcagaataaaaaagtagagcagttgaacagaggccataggataacagggttttgttgagaaagtggtttcattttgagggctaggtggaaagacctgaggttgtaaccagtagtggagagggaaggaaaattaactcagggggagtgaatctgtagacccacttgagataagatactcgctgggttaggtaggaggggcagataggatatctaggcttggagaggctggtaactcaaatataatggatacttaatttttttttttttttttgcaggggtgagcacagacaggatcgcagggagaggccgtattaattagcctggctccccaggttctggaacagctttttgtcctgtacccagtgttaccctcgttattttgtaaccttccaattcctgatcacccaagggtttttttgtgtcggactatgtaattgtaactatacctctggttcccattaaaagtgaccattttagttaaattttgttcctcttcccccttttcactttcctggaagatcgatgtcccgatcaggaaggtagagagttttcctgttcagattaccctgcccagcaggaactggaatacagtgttcggggagaaggccaaatgatatccttgagagcagagattaaacttttctgtcatggggaaagttggtgtataaatgagaaatgaagaacatgggatgtcatgagtgttggcctaaatttgcccagctatggggaa

SEQ ID NO: 83014 - DNA, 1349 bp, Homo sapiens
ccctaagtgctaggattatatttctatataaaatgctggctaggagctaaggaaaaggaagacagggccctgcgtgtgggtttttgtaattagcagaggcccagtcaacactggcttctgttctgtttttttttttttaagtcttgtgaagcttaaatgggaggtttgagcaaaaaagaggatgctgtcctctttgtgggatttttgctggtgtggggagatctggaccatcatggagggagttctcagcacagggatgggatttggttcctgcagggcctcagagaagcatgggaaagcccttcaggtgttaggggaaggtgattttgagttgttccttcactttgttgaatgtctctgaaatccagttctggggcttggcaggaatgttgccgcttgcagtggctgccgttcagcttatctgggatgtgtcccaagatgctggagttgtctggggccatccagactggggctgggatttccacacccatggagccacgactaggactgggagtgacagaacgagtttgggggtgctgccagaggggcactctagattgttcttgggatagcacaggttcccagatacagttctaagccattgaggggctaggagcagaatcgtcttagtggaggtgattgctaactctgaggtgtacttgccatgagccagttgctgttaggggatgagctgattcctgtcactcccactttagaggggatgctgacacagctagtgagaggtggggcagggacttgaacctctattctttagctatagaacttctgtccttaaccactatgctatgcctaaaatctgaggagacttctggtaggactctttctcccacagcccaaaggaaaaaggaagccccaagaaatgttttatcttagggaaactttcttggaaccacttccttccctcaggcctgcactggtttttgtagtgactctaaggatgtctgtcatgcaaggatgtgttacctatggccccatgtcaggagaatgattaggttcctgtgaagtttaaaaaaaatcctgttagatactagagatacacagtaactgccatatattactttctacatgcaaggcacttgtacagaggttgaaaagatgtctccatttaagcgtccatttaagcaggggagtggtggagtcttctgtgaaggtagaccagcacatggtttgcattgccacagagacactgggaagagcctctgaaacccagaggaacgcatgcgtatgggcagtctggggcaggtagaagatgtcaaggtgtccagagataaaggggtcagcatgtgcaagggcacctggtatgagcagatagtggtgggatcgtgggt

SEQ ID NO: 83015 - DNA, 1220 bp, Homo sapiens
agttcaagctggcttttcgtatattgtgtataaaaagatcagattcaggatgatttggtgggattgccaggggctgaccggagtgttgctgggaaggagcctcagctccgctccaggtcctccaccaggtaggactgggactcccttagggcctggaggagcaagtccttgcaggtccagttccaggctggtgtgaaactgaagagcttccgcatcttgcttgggttggtgggctcggcccgcactgcctggtactgctcatccgtcaggaccttcccgtacagagcatccagcagccactcaacgtttgtgaccctcgcgataagcgcagcccggtgctggtctataaagtgcaggcctgggggtgggaggagaacatgagccagcagccagggtgtggggcctgtccctgctgaacttgagttcttcaggaattcctctgcaagcctaggggcagggctccagggggcggccaccaggaccccacatgcagtgggatgagggtaatattgtctcccttcccccgcagggtgtgggttggtgggtggggtgcgcagggttgccaagccgtgcctgccctgccctgccctgccctggttgcgggagcacagatgcaggctgtgcaggagtgcggtggggccgggctgggtgtggaggcctcacctggcttggctgccgactgaggaggggcctggatcccagctggcgcggctccagagcctggaaggatatgggccaagtgatccccttcccttcccttcccgccgtggggccggggtcccgttggtcggtaggccaagcgtggggagcctcctttccggtagagcagctttgtttaggggtaggaggaacagaaagcggaagagcccgcggggtaagcgctggtgtgggtggaggggaaagacggggtggaggggaacgggggcggctcaccctggtgcgtggccgcctgcagctgcccggccatctcctgcaggcccatgtcgcgcagcacgttagcggtgagctcggcgccgtaggtctccaggtagaagctgaccagcttgtcggtgaggtccaaggcgtccatggacagcagcgcgccccgcgggatgcgcccgtagccctcgcgcagcggcaccgacagcagcttcagcttgaacttcttgagctcctcggcggtcaggttctccagcgcatccaggatggcgtcgcgcgcgcgccccatggctccaggatcc

SEQ ID NO: 83016 - DNA, 1046 bp, Homo sapiens
cactgcactccagcctaggcaatcctgtctccaaaaaaaaaaaaaaaaaaaaaaaaaatggctttggcaggagtattgggagctctcctatatttgcatatttgcatttgaggtcttgggtaagatctagaccacagaatggttggtctgtgcaggggacatttttttttttttttttgaaatgcagtcttgctctgtcgcccaggctagagtgcagtggcacattcttggctcactgcaacctccgcctccctggttcaagtgattctcctgcctcagcctcccgagtagctgggattacaggcacttgccacagcgcccaggtaatttttgtatttttagtagaaatggggtttcactatcttggtctggctggccttgaactcctgacctcgtgatccacccgccctggcctcccaaagtgctgggattacaggtgtgagccaccacgcccggccagcaggggacattttaattaaatttcctgccccctactccaagcccatgtgtgtacaggcaggctgacttggtggtcaggctgacaggctgactgaggctgatgttctgcttttaagtaagagaggaagcccaggagtaggggtaggttgcctttcttctttcatatatccttcatgtaccccctgaggtctgttgtgtgccaagctctgtgcctgcctgtctggtgggagagaccaaaccacactgatgtttgtcatcctcgcaaagacctgtgctatggggctgactgctgagcagaggggatcagggaaggcaaggccagggaggggtcaacaaaacagacaaggggctgggggtgtggcggttcatgcctgtaatcccagcatgctgggaggctgaggtgggaggattgcttgaggccaggagttggagaccagtctgggcaatatagtgagattgtctctacaaaaatattttaaaaaatcatggccaggagtggtggctcatgtctaatcccagcacttcgggaggctgacgtgggtggatcacctgaggtcagaagtttgagaccagcctggccaacatgg

SEQ ID NO: 83017 - DNA, 1241 bp, Homo sapiens
aaaaaaagactgtcgggcacagtggctcacacctgtaatcccagcactttgggaggccaaggcgggcagatacttgagctcaggagttcaaggccagcctgggcaacatggtgaaaccctgtctctaccaaaaatataaaaaaattagctgtgcatggtgatgcacgcctgtgggactgtcaggaggctgagatgggaggatcacttgagcctaggaggcagaggttgcagtgagtccagattgtgtcactgtaccccagcctgggtgacagagaccccatctcaaaaaaaaaaaaaagatggattctctctgcaatcctaagtttgggactcagttactcagtttccctgtttataggacggagagcttagaatggtctttgaagtggtatcagtgtagacagtctgtgtaatcccagttggcatgtaggaaatgggaggatggagcagggaggccctcacattggctgatgaggacgttttgtctggcgcctgttccatcccagcgctcttctgtgtgccatttcaacgaattcttgctgcagccaggtgtggtttcagcctcattttatgccatactcacccagcagaggcagtgggagccccagtagtgcacaaagcctgcacccagcctgtgcctctccttacccttgtccccagcattcccggcagcaccccatgatctctccccaggactgcaggatgccggctggaagaccgagaagcaccagctagaggtggatgagtggagggccacatggcttctgtctcccgaaaagaaggtcttgtgagcagcccagacggaggcccaagcccagggcaggaacctggagcaaggacactttggccacagcaggacaggggaaaggcagctttatttttccttagggcaactgcagcgggtgggccaggccctcatgggaagtgactgccaatcagatgcagtgggccccaggcagaggaaggccgggagaaggggagccaggaccttctcaccccactgccccttccccttttctggggagcaccgcaggctcctcacccccacttcctgtgaggctgtggcttatggtgtccaacgcagttggtcttaggcatagaagccccagaggaacacggccactgccatcatgagcagggcattgaggttgaccacacgggcccagctcgggtcctcgctgatgtcctccagccgcctggctgctgccgctgcctcctcctgggtaaggggcggaggactg

SEQ ID NO: 83018 - DNA, 1836 bp, Homo sapiens
tgagacggaatttcgctcttgttgctcaggctggagttcagtggtgcaatcttggctcactgcaacctccacttcctggttcaagtgattctcctgcctcaggttcctgagtagctgggattacaggcatgtgccaccacgcccagctaattttttgtatttttagtagagatggggtttcatcatgttggccaggctagtctcgaacttaggtgatccacccatctcggcatcccaaagtgctgagattacaggtatgagctaccgcgcccggcctcgatgccttagttttatactttatattccatataggcatagtatctacactggttttgtggattttgtatcattctctttccacagagttagagaatacatagaaaatattattgtgtttaaaagtatcttattgaatatttcaggtcactcatataaatcagtcagttttcttagctctcttatttcatcttggtttgtcaagtgatgaactctgcccatggccacatggtcaatgtgctatttatttttatttcagggactgttgacattcagggatgtggccatagaattctctcgggaggagtgggaacacctggactcagatcagaagcttttatatggggatgtgatgttagagaactacggaaacctggtctctctgggtgaggataacttgcctttggaatatctaatatctaataactaagggttttatttctttcctttgtagaatgtcacttgggagcttatgctttatatgaatgaattcagattcctgtttccaggaaaaaaaaattgtgggtttgttgtagaaaagacttcctaatgtttgatcttgacatttgccttctttcttgaggtgatgtagaagcttcactctagtttagtagtgattctagaaaattgagtgacataaactatcattgcccacactttaaaatctaattccttctccttatttttgatttagtcatacttggaagtgaagctcaggattcctgtgtttaaaatgcttcctgaatattctaaagaagctgacaggaaacagtatttggggaagtaattttctaggatcctctataatgttccctctttactgagtatcctactgagctggcaattaaagaactcccagcaagagtcatgtgactttttctaataaaacaggtctcgctgtctctaagccggacctgatcacctttttggagcaaaggaaagagccctggaatgtgaagagtgcagagacagtagccatccagccaggtaggtgggagtgaatgaagtagatgacatgggcgagaggtccagagattaagaaagaaccagaccttgaagtgtggattgggaagttctccagtggaaatgatttttgagacacctgggtttatttctttctcttgctgctgtcacagagggacatcttctgtctcatattcttaaattatctgattattctccttacccttctgtgatccaccatcaaattcacagtgacagccaaagtgctccccttggcctgtgagggcctgcgtgatctgactgttcttccattgatttgggggctctgggaaagtctgtgcatgtttctacctctatgtgaaaccacttctaaagttctggttttgcctcatgtcagaagtgtgtgaggcgagtgatggacagtaggatttttttcagaagtcccaggaattctgtggatagatgtcacatattttctggtatattaatttctaatcctatggtggtttcccagatgatcctacaaaaattgagactcagtaattcatcagagtgcaaaacatcttcctaaatataaaaaaaaatctgattctgtat

SEQ ID NO: 83019 - DNA, 1072 bp, Homo sapiens
actccagcctgggtggcagagcgagaccctgtgtcaaaattaaaaattaaaaaatatggaaatgcagaaactcaaaatctagatctcctgaatcagactctgcctttgaagaagatctccagtttattgttgtatactatacaatttgagaagtatgcctctaagtcaccatgacttttgcacctgagaattatacacagctgattctggatgatgtaaatatagcacccaaaaatgtatattcctgtgttgatgccttagttttatattttacatttgatataaatatctacactagttttgtggattttatgttattttctttccacagagtttgagactacattagaaaatattactgtgttaaaaatgatcttactgaataattcaggtcactcatatatgtcagaaccaataactgtcatttcatcttgggacaaatgaagaactctgccatggccacatggtcagtgtattctttatttttatttcagggactgttgacattcagggatgtggccgtagaattctctttggaggagtgggaacacctggaaccagctcagaagaatttgtatcaggatgtgatgttagaaaactacagaaacctggtctctctgggtgaggataacttgccttcggaatatctaataactaagagttttattttcttttcagaatgtcccttgggatcttgtgctttgtatgagttagttttagattcttgttttcaggaaaaaaataggggttttgttgaagtagaaaaaatttcataatgtttgattttgacattcgcctttttatttgaggtgatgtacaagtttcactctagtcgtgattctagaaattggttgacataaactattgttgcttacactttaaaatccaattttttttgtttgtttttgattcagtcagatttgcagaagctcaggatccccagatttaaaatgcttcctaaatattctaaagaagctggtaggaaacaatattttgagaaatacttttcaagaatcttctataatgtcttattttttctactgagcacagtactaagttagaaattaatcct

SEQ ID NO: 83020 - DNA, 1027 bp, Homo sapiens
accagttactggtctgtggcctgttagaaactgagctgcaccagtaggacatgagtggtgggtgagcaagcattaccacctgagctctgcctcctctcagatgagtggtggcattagattttcataaaccctattgtgaactatgcatgtgagggatctaggttgtgtgctccttaggagactccaactaatgcctgatgacctgaggcagaacattttcatcccaaaaccatctctctccttgccagtttgtagaaaaattgtcttccatgaaaccaatccctggtgccaaaaaggttaggaccactgagttgaagtactaacatatctttaaaacagaataaagtaggagtctttagtattatttgatgtgatagaatacatagtgaaaaagttgagtatttgatgtgatgagaataacatcttcacctgtatcagggaaatgtgaagataattcctatcaacattcactaaataattagcctcactttaaaaaaacgtagaaaacagaactgcaagattagtatattggaaaaaaagaatgcttcttgagtacttgtaactgtattttgaccaggaagaatatagtggattttaaaatgctgtagactatgggtgaacttaatttcttttaataaaatgagttggtttttcatgttttaacactgatgtacaatgaatgaaatgttgtactgacaccagtgttaaactattccatcttatctaagattgtggttaacagatggaaataatatactatgggttaacagtgaaatgtcttccctaatattccttttgctggaggacttaaactttcaataatttggagaatagttttctcatagtgactatcttaataatgattagataaggcaggtaagattgaaaggccacaacttagcagcaaatgttttacattcatttgagagccagtttgtaagtagttcaccaaaagatgttgggttaaagcagtggtttgaattaattgcatagcattcatataacagaatacaactcagcctaaagc

SEQ ID NO: 83021 - DNA, 1036 bp, Homo sapiens
gagtcagtgcaccctgagtgacaatgggatccatcactgcaaggaagggatcctcattaaggtgagcatcagccaaaacacccacttttcaatggatagaatggttttacctacaaattatgctttattaaattgttgggttctattttctggttttgaaaagcataaacagtgtacacattttgataatatcagtgattggaatctcttgtgagaatgctgttacctatagatctgcagaaatgacagaggaaagctgtgtcactaagggtgcagactgtgctacaacatgggactaaacatagctttttccttttatttttagaatagtgtgaataaagaagatttttaaggcaggaaatgttgaatatgacagttcctaaaacatttgttttcaatgtcacaggacttcttagatgaacattatgacattcccaagatatccatggtgaataatataatacataataatgaaggttatggtgttgtcttggtgaaacctacaatcttctctgacctgcaagaaaatgctgaagatggaactgaaggtatatttagtaatttttaatataaaaaccagacataatttatttcagcattaaatgctgattaaggatctgagtcttcctctcttccttaaaaaaggttgttgggatatgcttgggcatggagagagagaagcttggtaacattaagtcataacattacagactgtgaaagaaactttcaaggtcaactagttcaactgtcattcaaaatcttgatgttgtggtttctgtgcagttcccttcttatcatggttagctttcaatgagggtggatgtgtgatagcaacgatgggtgtgtgatagcaatggtgggtgtgtgatgctatggtgggtgtgtgacagcaacagtgggtgtgtgacagcaatggtggctcctactggcgtttgttaaggctggagacagtgaaatgaatgtgccaggctgaaggctgcatttcctggaggggatagtggagtttacctctgtttttattggtagaagtaaatgc

SEQ ID NO: 83022 - DNA, 1171 bp, Homo sapiens
tgcagccttaaaattctgggatcaagtgaccctcccaccttagcctccttgagtagtgagtaattggtgcatgccaccatgcctgactaatttttttggtttttgtagagatggaatctcactgtgttgcctaggctggtcttgaacattatttattttttatagcacttttgaaagtgaatttagtactgagctgatgtgggatagttgatagggtagtcttcctgatacgggactagtcagagagttgttattgttaaaaattggataccctgatttaaattaaacaggatatgtggggagatagattttatttaaatgcaacatggttgactggtctcattatcatctgcagtcatttaaactagagaaacttgttctacagtgttcacgtttagatgtttttcctcacccatcttgagtgttgttgctctctcttccttaggatatggcctaccagatgacattgtgatagaaaagaggggcaaaggcgacacttttgtggactgcactggtgctgatattaaaatctcaggcataaaatttgttcagcatgatgctgtagagggaatcttaagtaagtatctgaatgtttggtatatcatttgttctaagatttgaaggtaaacggttctctctatggaagatagaatttaatgaaatgccactcttgagtacaggcataccttgttttattgcacttcacgatgctgagtttttttttttttttttttttttacaaattgaaggttgtggcaaccctgtttcaagccagtctgtcggcaccattttcccaagagcatatgctcaccttgtgtttctgtgtcacattttggtaactctcacaatatagataatatgctgatctgtgaacagtgatcttgatgttactactgtaattgttttggggtgccatgaaccacatccataaaagatggtgaacttaactgataattgtgtgggttttgactgttccaccgatcagccattcccctatctctctccttctctttgggctaccctattccttgagacacagcaatattgaaattaggccagttaataaccctacaatggcatctatgtgttcaagtgaaaggaagagtcacatgtctctcatgttaaatttaaaaattagaaatgtttaacatagtgaggaaggcatgtcgaa

SEQ ID NO: 83023 - DNA, 1318 bp, Homo sapiens
gaaacaatttgagaaactgctctccctacccctactcccaaattgccccctgccaccttcttattaagcttttgaatctaatatatgagaagaaaataatttcttattaaataataaaattgtgtaacctgaactttcagtgtttctaaagcacaaatgcttggatccaagaaagaaagtaaaaactcctcaagagcagaaaaattagtgaccttaaggaagtggtgctttaaattttcaacagcttccacttattattattattattacagtgctattcagaaagacttaacatgcacctgagttatatactgtaaaactcttactgggtctttgagggctaagtgggctgttttaatgataggaaaatgtgcctgaaaggcagtggatttcactttgcttttaaactttcaggcattatgacattcttgaagaccgagttccatcaggacttattgttgactaccacaatctgttgtctcaatgtgaggagagttacaggaaatttttaaatctgagaagcagtttgtcaaattgtaactctgattccgagcaggaaaatatctccatggtggaagggttaaaattgtattcggagatggaacagttgaaacaaaagctgaaactcattgagaatcctttgttgaggtatgtgtgtctttgtaattcttagttagtcagcatcttttcttacttgctgtcttactgataggcctgtttcgtttctttaaggtatgtgtttggttatcagaagaattctaacatccaagcaaagggtgtccgttccagcggtcagaagatcactcatgtggtctcctccaccatgatggctggtctcctgcggtccctgcttacggacaggctttgccaggagcctggtgaggaagaaagagaaattcaggtaaacggagagtttctcactccaggtggctttttttccttctgattcaccacaggttttcacaaatcccacaaagtatttacaggagctttcccaagacggttttctgtgcatgggaagtagtgagagccctgcctttcatcagcagtagtcacttaccaggcatgtgttaggtcagtgcgctatcaaaggagatgcttcaatatgcagtttttggcttccattttcaaagtaagacatgaagtcacctagagtaatactcaaattacttttttgggagtgtatatttacaaatgtgttcttattgttttctagttccatagtgatccattgtctgctataaatgcctgcttcgaaggtgacactgttattgtttgtcctggccattatgtggtacatggcactttctccattgct

SEQ ID NO: 83024 - DNA, 1021 bp, Homo sapiens
agcactttgggagtccgaggcgggtgaatcatgaggtcaggagtttgagaccagcctggccaacatggtgaatccccatctctactaaaaatacaaaaaattagctgggtgtggtggtgggtgccatctcagctactcgggaggctgaggcaggagaatcacttgaacccaggaggcggaggttgcagtgagccaagatcacgccattgcactccagccccagagacagagtgagactgtgtctcaaaaaaaaaaaaaaaaaagtcctaacaaaaccagtgtggagaaacttctcttctttagctgatccaaaaaaggtctctatgttgtgtgactcatgactatcaaccatagcaaatatgcagcattctctaagatatgagaattgttttgatttactctttagctctcacccctccaaaatcctaatgttttgagccagtgatagaatttgaatgatactaagttccatttcagatttttctaccaaaacatttggaggagttgggatgaagaagaggaggatgaatacgattattttgtcagatgtgttgaacctcgattaagattgtaagtatttattgctgaccttgttgtacatgttggaaaaatagttacccatggtttaattttgcctgtgtgagatacacacacacacacacacccacactcactcactcactctctctctctgattttctttccaggatctcatagacagaaataaactgatgtacaaattgtaccaccccttgacaagtcattaaatgaaacttgtacaagtgcagagaaacttgcttttagtgtttataaattgagtctaaaagcaggaagttcaagaacatctaaattagtagctcactgttttgttaatttgaataaaattcaattgaacattgaactagtgggttaagaagccctttgttaaattcgattgtttgaaaaacagtgacattatttgaattatagaagactttttggctttaattttgtaaagaatactttaaaggtatatggcttt

SEQ ID NO: 83025 - DNA, 1044 bp, Homo sapiens
gcctctctttctcacctcatatcttgctgctccactgcacaccgcccccctcctccatttcctccctttggctccagcaagaaggactgcctttccgctcctccagctgccaagcctgtctctgccacaggccttctgtgctttcccagctcttcagatggccgcttccttctcatcctcctcagcctggctcagagctgacttccttgcccatctcagcagaacaagatccccacccctgctagttattctctgtcacctactggttatcattgtgtttgttgatctccctgattacagtgtaagctccatgagggtaagaggcagcctgtcttgttcatcctttatattatgggtaaagcctccccacccatgttgtatgcttttaaaaaaatcaggttgtcagtagtgtcttataggtgtatcttcattttgatttccatgtgttaagtcacattattttaaatttcagatcacagatgtggactttgcagccttgaaggcagtggtgaggcttgctgaaccatacctctgtgactctcaagtgagcacttttaccatggagtgcatgaaggagctccttgatctgaaggagcatcggttgcccctgcaggagctgtgggtggtgtttgatgattcaggagtgtttgaccagacagcccttgcaattgagcatgtcaggtaggaaaagaagttgagaaaaataaccttgtggccagaaactttggatgaaatgaagtaattctggtctgtgttagacccagatttaaaactcaactgtaaacttggtcattgcaatatttaaaaatatccaaagataggataatcttttttaaattaaaaaaaattaaaaatgttttaaatctttttttttattttttaattttgagacatagtcttgctctgttgtccaggctggagtgcagtggcatgatctcggctcactgcaacctccgcctcctgggttcaagcaattctcctgcctcagcctctcgagtagctgggattacaggtgtgcaccaccatgtcctgctaatttttgta

SEQ ID NO: 83026 - DNA, 1049 bp, Homo sapiens
gtgcatgtctgtagtcctagttactcaggaggctgagacaggagggtagcttgagtccaggagtttgaggttgcggtgagctatgatcgcaccactgcactccagcctaggtgacagagtgagaccgtttctaaaacaaaaacaaaaacagccttctacttctccccaaaacctcacagaacaacaacaaaaatctaactgtgaaagatcttaagcgcttattgttttgaagtagaatttggattttgaaatatttttaagtttggaaaactagtttcttctcacaatggtagaggtaagtagactattcatattcaaattcttgtttgtattttgtttgggatttctatgcaaggatatgaaaatagaagcattcaaataaggcactggagcttgcttatttttgctttttttttttaggtttgttccaagatgaagattcatgcagtgattgtagctaccgtgataaaccaggttctagtttacaaagttttatgccagaaggaaaaacctttttcccagaaattttccaaacaaatcaacttttgttctatgagcgattcagagcctatcaagattacattttaggtgagtaggttttttgctttttttttttgagatggagtttcgctcttgttgtccaggctggagtgcgatggtgcgatctcggctcaccgcaacctccgcctcccaggttcaggtgattctcctgcctcagcctccctagtagctgggattacaggcatgcgccataccaccagataattttgtgtttttactagagacggggtttctccattttcgtcaggctggtcttgaactcccgacctcaggtgatccccctgcctcggcctcccaaagtgctgggattataggcatgagccactgcctggctggttttttgcatcttttatctttttagtttgcaagtagattatctatttcagtccctcagattgccagttgtttctgagaaagtggatttattaacttccctctgctttatgcattctcaattcttcctgtgtttaatttgtttgtagctgact

SEQ ID NO: 83027 - DNA, 1521 bp, Homo sapiens
aaccagcttatccaaaagattcgagaagacctcccgaatcttgaatccagtgaagaaacagagcagattaacaaacattttcataacacactggagcatttgcgcttgcggcgggaatcaccagaatccgaggggccaatttatgaaggtctcatcctttaaaaaggaaatagctcaccatactcctttccatgtacatccagtgagggttttattacgctaggtttcccttccatagattgtgcctttcagaaatgctgaggtaggtttcccatttcttacctgtgatgtgttttacccagcacctccggacactcaccttcaggaccttaataaaattattcacttggtaagtgttcaagtctttctgatcaccccaagtagcatgactgatctgcaatttaaaattcctgtgatctgtaaaaaaaaaaaaaaaaaaaaacacaaaacccacaagcacttatcttggctactaatgaagctctccttttttttgtttgtttgtttgcttcattgttgattgtgtattttcttcattcctggggagtactaacccaaaagcgtctgtctcttgttttctagtccagtttgagattaatttagaagaaaggaatactgtatgtgaaattcatcttgggctttcccctaaattgcaagataaggccatgtgtaagattttccctaaaactagaatatattaatgcatgtttgagaattttaaagcaccatggtcaaaaccagaagctatattttgcatatttggactcagccatccattaagaacccatgttgtcctctggacatatttatcaatataattgggttttaaatagtataaaagaaaacttgtgatctatataatttatgtatcaccttcattgtaaatttagcaggaaatgcatcacaattatgatttttttttttgcaccagtgaaacaataaagatgctattaacaattttggagctttttttcccctttcatactatctttaattgataaaaagtactagtagtatggctatagagtttaatagtcattctcatatattcacagagctcacttaactctagttttaagcacttgttgaacaaggcagcatctactcttttagtcatttataccccttttctttcctcaactttaccctgcttttcccaaggcatgatgaattcacataaaccccccaaaggctcaccaccgatactagttacctactatataataaaccatcccaaaacttactgtcttaaaacagcaaacatttatctcacaggtctctggatcaggaatttgggagcagcttagctggtggttctggcaaagagtgtggtgtaaggttgcaaacaagatactggttggggctgcagtcatctgatgctttgactggggctgacttttctgctcactgacctggctgttaggcagaggccccagttcctcttcttgagggcagaggccccagttcctctccttgagggcagaggcctaagttcctttccttgagggcagaggccccagt

SEQ ID NO: 83028 - DNA, 1604 bp, Homo sapiens
gaaaaaacaaataccaaatacattaacattgcaaaggcaatttaacctcaaatgatgttttgagaagacatcctgcttgatttacttgtttgccctataactgaaacagagaaggaaaatgacaggaaaactgtgcacacaacttacagtattttgttctattaaaatggatatcctggaacaagttaattttgaatttaaggtaacttaaaatgttttttcttgttttaggatgacaaatgggaaaagaaatgccagaagattttttcatttgcccaccagactatcagtgctttgatcaaagcagagctggcagaattgcccttaagactttttcttcaaggagcactagctgctggggaaattggttttgaaaatcatgagacagtcgcatatgaattcatgtcccaggtgatgatctgttctttctgcgttgtcatgtcagctctgctgggttcagttgcttgtttgcaggcatggtggtaatgcacatgaatttactcttcttttactgaatgtgtaactaccaccttcccaccatcatggaacctgttaatattattgttgtaattgactggtgttgatcatttgctgatgaaatctaagatttccaagtgggtcatggtaaaaatgtttcatggaacataaaattcgggaaatgcactcaattcccaaaatccagtttgggaaccctgggttaaacaaagttgaaagaagtttctttattgcaactttttagcgtttttaccatctcagttgtgtcctgtggctctcaagagagggtgcagcatgttctgatatgaaggctgcagaagtctcacaggatggaggtttggtgacaagtactttggaaaatgctcaactagaggatggttggtccttgaaagtcctttctgctttatgttcactaggcattttctctgtatgaagatgaaatcagcgattccaaagcacagctagctgccatcaccttgatcattggcacttttgaaaggatgaagtgcttcagtgaagagaatcacgaacctctgaggactcagtgtgcccttgctgcatccaaacttctaaagaaacctgatcagggccgagctgtgagcacctgtgcacatctcttctggtctggcagaaacacggacaaaaatggggaggaggtaaggtcattcctgactgcatgatagcagacaggatccataacagggatcagttgtcatggccttgtgttctggaggtgaaacatttggggtgcttggaaatctgatgaacaaaattgctttgttttgttaaaaaagagagtctcatcctgtagtgaagcctctgctttgaggatattgtaacatagcaagttcaaaccactacctgtttttaaaaaaatacagctgtatacttcaaaacaagaagaaggagaatgaaaaggatttaaatttgttatgtccctttaaaacacgaaagagccacggtagtgttgtgtttctttgtatgaaaacgagatgtttcattaatctcttcactgtccccctgcccttttattttagcttcacggaggcaagagggtaatggagtgcctaaaaaaagctctaaaaatagcaaatcagtgcatggacccc

SEQ ID NO: 83029 - DNA, 1264 bp, Homo sapiens
gtgcgccaccatgcccagctaatttttgtatttttagtagatacagggtttccctatgttggccaggctggtctcgaactcctgacctcaactgatctgtccaccttcggcctcccaaagtgctgggattacagacatgagtcaccacacctggccagagcctacattctttatcagtgcagcatactttgcacatgtgtgtatgaaaatatatttaaatatatctttgcttctaactcgctaccttgggcaggttatacaacctctctgaaactcaggcttccccatttgtgaaatggaatagtatctgtctctgggttgttgtgacaacttgaggagataagaaatatgtaaattgcctaccataaagtatggtacattgtatatattcacaaaatgttagcaatgatgattagagcccacatttatttcacaaatgattaatcagagtttggaaatttttttttctttaatgcttttgggtcagattttgaacacagcacgaaaacattttggagctggtggaaatcagcggattcgcttcacactgccacctttggtatttgcagcttaccagctggcttttcgatataaagagaattctaaagtggtgagtttacttttaagtatttaggtactttttttcctctttcatcactctgagtgtgtgtgtgtttgttttatattataaaaaatttcaaacgtacaaaaatagacagtggtataataaaatcccattttcgccaactctctatttgttacttatcctgtgctaagtgttcctaacggtgatggtggtggatcacatactgagggatcacgtaaaaagcacttagaaatgcaagattaaagcagtgtgaatttatgctgaaactctttcctaagttctaattcaggttagctttaaaacctaaggagagggcctagcattgcagtcgtttctctctaaaggcatatcattgaataatatgagttgtgggcaactttttatgagcttttttcttcctcaaaatggaaccatggcttgagtcttcacagtgtagttttgaagaaaatacctcaagctcacgtacctgaaagttggacattcaggttaatgttaaggaacaacctcagtaacttaattttgtttgtttgtttgttttgagatagggtctcattctgtcgcccgggctggagtacagtggcgcagtcttagctcactgcaacctccaactcctgggttcaagcgattcttgtgtgtcagcctcctaagtagctggga

SEQ ID NO: 83030 - DNA, 1575 bp, Homo sapiens
cttaaaatacttcccttagaaatgtcatcaaattctagacagtcatcttaactccagctataccatctgttcatgagttggaaactgtatctagttttgtatcaacagaaaaataatagatgaatatatatttgtgtttagataagcatttttatcctcctgaaaggaggttgttatagtcttctgtggtggtatgattcacttgacccatttcctttaatgtgtaatgaaaaatttcaaattcttatggaacaaatgctatttgtgtatatagaaagttaattttattcattaagacttctgtttttctttttgtagtattgctaccagtagtgcagtttcaaaggaactcaccagacttttgaaaataccagttgacacttacaacaatattttaacagtcttgaaattaaaacattttcacccactctttgagtactttgactacgagtccagaaagagcatgagttgttatgtgcttagtaatgttctggattataacacagaaattgtctctcaagaccaggtaagagaatacctacgtgctattttagggaaacagtgttacaattttagactttggacctagatacctgagatgggaggggagggtaattcaatactaaataaaatttacaagtaactttttcattatataaattaaaaattggagatgtataaagaattataaaacatttataattccaccagatagagaataaccactgttaattaacatttggtgcatatctttccagacttttgtctgtatatgtgtgtatgacatacatgtgtatcgactttctcaccaaaaaaaggaatatcttgttgatactgtattgtaattttataactggaaacacttttgataatggctttgtatgccaatggtttcacctcagtgggtttcttgtgcctcgcatgttacaggtggattccataatgaatttggtatccacgttgattcaagatcagccagatcaacctgtagaagaccctgatccagaagattttgctgatgagcagagccttgtgggccgcttcattcatctgctgcgctctgaggaccctgaccagcagtacttggtatgagtttacccttagtatatccctgtatcagctcctagtgaaatcacatgttcaagtgcttaaaatggtttaattcactttctggtcttagatggttttgaaggaattgcaactgaattaaagattcacttgaacctgggaggcggaggttgtagtgagccgagattgtgccactgcactccagcctgggcaacacagcgagactccatctcgaaaaaaaaaaagattcatggcatccatgggcttttactttatatataaacacataattgtttgtaaacttctggagcatgtgagtaacaattcagttgctctgatttcttttgaagactctctgagaattacaaaaaagtctgtcttcttttgcttgagtgccgataattattccatgttcattttttctgaactatgtattgcttataataaactttataagaaatacaattcttatatttaattttacttttccaaatttgcaagtataaa

SEQ ID NO: 83031 - DNA, 1813 bp, Homo sapiens
gaggctgaggtggaaggaggatagcctgagctcagcaggtggaggtttcattgagtggagagtgcgtgactgcactccagcctgggcgacagagcgagactctgtctcaaaacaaaacaaaacaaaacaaaaaaaacaaaaaccttttgggctcatacaaaatatagaaaagcaataaagaataagatgtcatccatgatctcactacccaaaccctgtatcttttaaaataaaggggtgttttttttttttttagattagctttatttgctcaccgtgaagatggacctggaatcccagcggatattaaactttttgatatattttcacagcaggtggctacagtgatacaggtttgtgtagcatttctcctaagttctcaaaactttgaaacttctctgccttccttttacaattgtttaaaataaattgtgtggttttctaaacattccagtctagacaagacatgccttcagaggatgttgtatctttacaagtctctctgattaatcttgccatgaaatgttaccctgatcgtgtggactatgttgataaagttctagaaacaacagtggagatattcaataagctcaaccttgaacagtaagtcagttacatttttgtaaaaatcctcaaagatatttttgtcctagatttgcttttctttctcaattgttttttgaactgctggcatttgtcttgttttaatcatgcattaagattgtcatgcttagcactactaggggcagaaagtagtgaccaattacttgtttttttatattaaggaaattgtggtacctatggaccataggcagtcttcagggaccagtgtctccaatttggatccctttctgtgtgtcaggggcatccaatcttttggcttccctgggctgcactggaagaagcattttcttgggccacacataaaatacactaacactaacaatagctgatgagcttaaaaaaaaaatcccaaaaaaactcataatgttttaagaaagtttacgaatttgtgttgggccgcattcaaagccatcctgggctgcatgcggcctgtgggctttgggttggacaagcttgcatgtgactgagtttgttcttaaactggtaaggaaactttgtcaggcagtatttatttccataagtggtgttttcctacgaatcagcacatggtgaaaaatgaggggctatgtatatttaaggtgcagaattaaattggtttaaatatcttttctattttgagctttgattttgataccttaaaggaaatatcaacagtactatttccaacctgaagcctcctcagctgttctgtcctagacttatggcgtcctctagtggccactatgggcagctatgatcctgttaccttccccagcagttcccttcctgccctgttccccactgctctggcttgggtcaagccaggcctgcctcccgccaacatattcttcagaattttacctcatgtaatcttcctcctttctatctcccttccagtggtttacctgcatcaagaaaatttcttctttttttcctccctttgtgttacccttgttcttttggtcatttttggttttgtgtgtgtgcaaactgaaaacaagtccagatgtggaatgataagtgtgagagaaaattaaatgatgtgccaggtgtggtggcttgcacctgtaatcccagctattcaggaggctgaattgggagaatcacttgagtccatgagtttgagaacagcctgggcaacatagcgagaccccgtctctaataaaaaataaaattaaaaataaaaaaaatttaaattaaaaaaactaaa

SEQ ID NO: 83032 - DNA, 1001 bp, Homo sapiens
gaggaaatctttatgacctaggattagacaaagatttctgaggatatacaagcacaagccatgaagaaaaaagctcacttttgagaggccaaggcagatggatcacttgagtccaggagtttgagacaggcctgggcaacatagggagaccccatctctacaaaaattaccaaaattagctgggcatggtggaacgtacctgtagtcccagcactcaggaggcttgaggtgggaggatgacttgagcctaggaggtggatgttgcattgagtggagattgtgccacttcactccagcctgggcaaccgaacaagaccttgtctcaaaaagaaaaaagcttttaaagtttagaagtgaagtcttggtgagaaaaatctcaaatacgattttcaagttagtagttcaaatgcgttactagaggaatagcttaagattttgaaaacagattttaacccttatgtgtgttttttctcttttagattgttttgactggcatattggagcaagttgtaaactgtagggatgctttggctcaagaatatctcatggagtgtattattcaggtagctgggaacatttcatttttttttaaacgacctattttatctttcattaaatttaattgttttgaaaaaattttgatggaataggaaataagctttcctgaataaagagttttccttgcggggtgtggtgactcacacctgtaatctcagcagtttgggagttcaaggtgggaggatctcttgaggccaggagttcaaaaccagcctgggcaacatagcacgatgccgtttctataaaaaattaaaaaaatttttttagtgtttcttttttttttcatgtaatcttgcttcttctaaaaataatttaaaaataggaattttctgtttctaacttataccttggtctttgtatcaatgtggtttgttttcctccaaaatgtaggaatgagtaatctgagttttctaggtctctgtagctttagtttaattgtaggt

SEQ ID NO: 83033 - DNA, 1139 bp, Homo sapiens
ccttttgtttttgtttttggtttgtggggatggggtctcattatgttgcccaggccagttttaaactcctggcctaaagcgatcttcctgccttggcctcccaaagcactggattacggacatgagccaccatgcccatccttctagcctttttcaattaaggaagttgccataagagcaagtccagttggcccaggatgaggagttggggaaagtaatttgccctttaaatttatactgtcctctccatggtactttttaccctagagtctgttccctttgaaatttaacactaagccaatgaagttgaaagtgattttttataaagcattggtgtactatagagataagtaggaaatacacaaaggagaaggatagtagtaagttggtcctgtaaatactgtgtaaagacttttctgtttctttgcagtgaagaaacaactggtgacatcagtgattccatggattttgtactgctcaactttgcagaaatgaacaagctctgggtgcgaatgcagcatcagggacatagccgagatagagaaaaaagagaacgagaaagacaagaactgagaattttagtgggaacaaatttggtgcgcctcagtcagttggaaggtgtaaatgtggaacgttacaaacaggtttatatatttttgttacctcttcttatgttcagagataaactgaaatctgatttttaaaatcagaatatttttgttatacaatagtacattgaaaaacatcttaaaatggctgttattgaagaagacttaaacggaaagatatatatgcagtgtttgtggattggaagacttaatattgtcaaaatagcatttaaaaagaattgatttatagatccaatgtaatctcagtcaaaatcccagcagacttttgtagaaattaagaagctgattctaaagtttatatgaagaaacaaagaacctggaacagctacaacgaatttgaaaaggaagaacaagttgaaagacccaagcaacctgaattaatgatttactctaaagctgcagtgagatcctgtgtggtattggtgaaaaggatagacacacaaatcaatggaggggaataaaacagggaatggcaaactttacctgtgagggaccagataataaatggtt

SEQ ID NO: 83034 - DNA, 2962 bp, Homo sapiens
ccagctacttaggaggctgaggcaggagaatggcttgaacccgggaggcggagcttgccatgagccgagatggcaccactgcactccagcctgggcgacagagctagactccgtctcaaaaaaaaaatttggtaaatgggtttgaggtatagagctggacattgttggagaaggactatggctagaactatagaaataacgtacttgctagaagaatgtgcttgagacatcagtggaattttttatttttcagcctacaacacagcagtcccctcaggatgagcaggaaaagctcttggatgaagccatacaggctgtgaaggtccagtcattccaaatgaagagatgcctggtaagaatggagatgtgggaggcacagttgcagttcgtgtgttcctaaggaagcatgtgcagtgtcttctagagtcaggtgtttctggtaaatctaatcttcaccgtttaccagcatctatcttcagtctcatctccctcaagcactttgtggagcaatttcaacaaagagccctgtttactcacatgtatatttatggtttgggattgtctgtcttccctactagaatacaagctcataagaataagagacccttccttttatttacacattactgtattattaccacaccagtgtctgaccagaattactagcctccttggttctatacctcagacctgaggaatatttaacatataataggtactcagtaaatatttgttgaatgaatggatttaaatgctttgcatttgaattattcagctttttttctaaatatcttgaaaactttaatttctttgctgaatagatatatttattgtagaagctagcttaaaaattatacttaacacttatttacatatttttatattctaaaagataaagtaagagataatctgtgtagatacttttgattctctggattaaaatgtaaggaattgagccaaattggttagtactttaaactataaattactgtgatgaagatgatgctattttacctttgtaaaatgtcttactgtgctttctaaagcatagtaatatgctcttgtgtcttttattggtttaattcctaacaaattgggaatgaaaaataaatgtcttggaatggagaagctgggtttgctattgcttgcttctttctcttcctgtgtatggatagtgtttcctctatctcaaggaattgcttgcatttctgagttaagtggaacatatgggcattgtgagggcttgaagaatgcaagaggaaagcaaacttacatggatagtcatttcagacagctctgaagagtctttaacccatgacaaagccatgtcaggatagtatcttccttcacctgaatcagtatgccagttctcttgattgcaggtaaaatgtgatgaatggagctagtttcctagtctctatagattgaaaagattagcattctatcaagaagcttgcagtcttagctatgttaagtcttactaagaatcatgtatctttttctttttcagtagagacggcaaggtgaaccgatctaagttgtttttttaatgtggttaaaatcatttaagtgcggtattcttttaaaactatgtaacaagtccttgatgtaaagaatttgtacaaccaagataaatgtttatttaaattaagcattctcatctattctcttggtatttctgtaggacaaaaacaagcttatggatgctctaaaacatgcttctaatatgcttggtgaactccggacttctatgttatcaccaaagagttactatgaactttgtatcttttgaatgttgaagactaaacatttggaccatacctttttcttgataaggcctattttgtttgttctttatgaagtttttctggagttatcttattcttcgttatctgagtcacatggcactccttctccatgcagatgtgctaagtgagaaaaacactttgagagtactcctttcctatgcttaaacatctttaaatgtgttgtcggtgcatctcaattttcagacccttcatgaggatatttaggctatgacacagttggttctttaatacttagattttgttatgcagcagtctcaaatggacaggaatttaatcatttgccatttcaaaacccattagcagtctgacaggtaaccattgtatttactgctttgcttgaccacacatgctttaaaacccttattttaaagtaagaaaagtccggctaaaattcatccttcgcttgaacactttcttaaaggactaaaacttaagatgtctgcccagtagttagtaatgactccaacaagtttcaaagttttgtttaggttggcttatttttatttttagtccttaatcataattaaaagatatggccatttctgatgaactgcactacttggaggtctacctgacagatgagtttgctaaaggaaggaaagtggcagatctctacgaacttgtacagtatgctggaaacattatcccaaggctgtaagtaattacaaatcagagaacttttgtgtctgtatttctcactatatgttacgtcttttatgattatcagcttaagaaaaagttttaagggtaacttcttaacaaattgagatgaacattttggtagatattctcttacttgttttagagtaactagatttacgttttatgtagatatttgaggaattttggaaatagaaaaaatggacatgcttgctattttttttaatgtcttgactattagaaaaattaatataattgttctcttcctaatatgtttaaaggtaatatctatgttgtatatatacagtgtgtgtgtgtgtgtgtgtgtgtgtgtgtgtatagtttttttagaggtcagtcagtggttatattttaaatgagatattttccttgtcatgcgggagaaaacaacatggttcctgtcttgtttatttaatgttttgttcagtgtgtttggaaataaattcttgatt

SEQ ID NO: 83035 - DNA, 1995 bp, Homo sapiens
tcacttgttagaaatacaaattcttgggtcccacctcaagcctgctgatcagtaactcggcctgggacccagtaatttgcaagtccccaaggtgattttcgcctaccatcaagtttaagaactactgatttaaaggaaataggaggaaaggaggaaccctggtctaacctgcctgtctctgatagttcgtgcttgttccagtaatggaaggaggaaagaagggtaatttttttgtcaaaatttaacttccttttgcctgaaagcatttgagcacagtgatgtttggagtcagtgctggttctgtcttcctctcaccagaggatatgaccttcattcccagccccagataaacgagccacaggagttaggcttagtgtgaagctaaccaggctgtattcattgtttaccaacgtgttgagcaaacttctgaataagttgtagcgaacacactgcccttttaaccaggaaagcagaggagtacttgcgcctgtcccgggtgaagtgtgtcggcctctccgcacgcaccacggagaccagcagtgcagtcatgtgcctggaccttgcagcttcctggatgaagtgccccttggacagggtaagtaggtcccaccgaatgtctgaataatccagtgcaacattgaagctcttttaacttttggttgaactaaaccctagtaaaaactcttgttttagaattgtcctgggtattcttgtgtgttattctggaaatactgtagaatcattttgcattggaaaatatttttttgccatgttttctttactcttcactgttttccctgaccacctctttctcggctagaggccatcttccacattgctgctagcattaccctccttttaaagcacgtatttccaaacccctatgcttttcttccaatgtcacagtgtttgagagaacaagctttggggtcagtcaggaggagtttcatgttgagatcaaatctccacactagctacctctgttagcctccagtgtcctcatccataaagtgaagataaaatatccaatttcgctggattattatgaggattaaatgtacataacaccattaacacagcacctgtgtcataacgatacactcattaaatggtaatactaaaaacaaagctttgttgatgaccatcaaactctccagcctctcttgaatcctggcctcaagctgcagtattctcttaacagactctgcacgtcaatgatttgtggctttgaaaatgcaataccttgtttttttcctgcaatgctcttctggcaaactcctatttgtcttacatgaccttgccttattgttacattgaaactttccttaagtctcccagacagagctggtttcccacagtggatcctcctgtttcttttcctagtttccttttcctctttctctcctgcacacacacacacacacacacacacactctctctctctctctctctctcaccaccccgccccctactccactcccgctacttctctccttccttttcccaataaattacacgttagcacctttgtataaacacaagtaaccatctgtgtgtttcctgtggttttttactgcctattttgactatattaatattgtgttataattttaaatcatctgtgcatatgcatgactgcctgcctttgcatagtttgaactctttgaaagcagtacttcctcagcctgacatgattaccagttttttgactaaatgaagctaaacctttaggtagagtgacttgccacaaaattaattttgaaaagttatactgcttattaaacaagtgtttaagggtactaatatatagaacttaaggtttttatgatttgtgtatgtgtttttcctttcacaggcttatttaattaaactttctggtttgaacaaggagacatatcagagctgtcttaaatcttttgagtgtttactgggcctgaattcaaatattggaataagagacctagctgtacagtttagctgtatagaagcagtga

SEQ ID NO: 83036 - DNA, 1092 bp, Homo sapiens
tatatatttttctttttttcctacaggttcctgttgcatgtaaatcatgtccttgtggttacatatttattagcagaaaacttttaaatgcaaaacactcagagaaatcaccaccttctacaggtaactgtgagtttaatacatttttagctttttgatgtagaaatgtaaagttaatttttgtgaagtttctatttacattttttgttgaagttaaaagtttaaatctattcaagtgtttttggcttttattaactattggaattagtttacgacgttggtttcatgtgcattccatttaaatgttaagtcccttacaatgctgataacgcttgtaacaaattttttatttttgaaggtggagaaccattgaaaggttttagcaagggagtgacctgatctgatataaaaactttttaaaaaaatagctttagtaataattgacattgagtaaattggatgtatttgaagtgcacagtttgataagttttgacatatgtatataccaatcaatcaccacaatcaatattatgaacattcatcaatttcaaaagtgttctagttccctttgtaatccctccttcctgctacctccaccccaggtaaccacagatctgctttctgttactgttcgtatttatggaatcatatagtatgtactcttttttgcctggcttctttcactgagtgtaattatttaggattcagccatgttgtatgtaccaataagagttcattcctttttattgcttagtaggagtctttgtatggagatttgtttatccattctcctgttgatggacatttgaattttttctctcataatggtggtaaaatttgcagcaacttttaagttttgttttttttttaaactagtgaccgttgaaaaatatagcttggttttggtatgaaaaacgtttttagacatgttgactatgttttacagttccctgactgaggatatccaaataatgattttgtttgaacttgttgcttttccattaacgtagacaaattggatttattcaatagacatatttattaatattaaaagatacaattttgttacttattcttggctaaaagcagacc

SEQ ID NO: 83037 - DNA, 1092 bp, Homo sapiens
gaggctaaggaaggagaatcacttgaatctgggaggcagaggttgcagtgagccaagatcgcgccattgcactccagcctgggggacaagagtgagacttcgtctcaaaaaaaaaagataaataaataaataaaaaatctgttttacttgtaaaacatacaaacaacctaaatctttttttaaaaaagtgaattaatgcccagtaaactatcagtaaacaatactttgaatattttcttttttttaaaatcctgaaagtgtaatattagaatttcagtactgttaggtttagtattatcaactgaaatttaaagaaactttagtgtgtttgtttaaaatctaaattatactataattaatgaaatgaggttaatattactgaagttgtccaacctatttgataattctttttacaggatctagggtggtgatggtggtggtggtgtgttttttgttttttgttttccagggcagaggttgtggggaaggaactttttattttaaataggactatagaatgaattaactcagactatagaatgaattaactcaaactatagaatgaattaactcaggcacatgagggtttattgagcataaaacactttcatttgtggatgaaaatcaacctgttaattcagttagtcagtgtttgtgcattctgggtcccaaagccaaatgtatacttctcatctaactgcaacactgttaattctggagatggattgatatgaagttcttttgtataagactgaaacccaaattcaaatttattgagtttcagtagctggaagaaaatgcttgctgattaggaaaggagctgttgagtaagaacatgcatttgcgtattttggatagcattaatttaaaacaatttacattactgtggatgcccttaataatatgtttaggtgtaaaggaaatgagtcagtgcctttgagcttggtttctatgaagatacgaaatttgaaaaaatgtcagacatctattttagacagattttacactatttaaaaaatgtagcattttttttgtcgtgatttgaagggatctcattacattcttaacaaagcaagctgttagacaaatctg

SEQ ID NO: 83038 - DNA, 1121 bp, Homo sapiens
ccgacgggtgcggggcttccccaaaacggcccctccgcgaccggggcgggcgcctgagtgggacaaagggggccgcgtgtaatgattttgagtttcggcgaatttggagattttttccccttcctcatctatttattatatttttgctgtgcaatcgcgaatcctgcctttacatcgtttttaatgggtcatgattgaataaagcccctgtttaagcccttcctcctttttgggcgctcctaacttccccacccctcgcagtatccactgttacaaatttggcctgtctgcttccagatctgtatccctgtctgtctgaatgtctctgtgtgtctctctctctctctctctctctctctctctctctctctctgtctgtctctctctatctctctatctctctatctcgtttcttgaatttgaaacgattcctttctacattgagttcatggtgtaatagttgtaatttaaaacatctcatttcagtgatcgctgtgttgaagcgtgtctcaattctttactggaataatagacattcctttaagccttaacatctaatgagttaaaactacttcagttaaaaccattcgtaaggccctcgtttgttaccaacatgtagatctgggtgtgttttttccttttccactgagtggattttttcaaaatgactacctttctctcctcccctccccccaccgcctttttttttttttaaatcaagagtaatttgaaatggctggagactttttaataagctgattttagtgcatttttcaaggagaattcttgtaggtttttcaaatcttttaacagaaaacatgttacatgttttattaagtatcctttatgggctgtagtaaaaatgcttatcagaaaaaggttgtgcaagaaatacagtgtaggagctataccagtatgcagtataaaaacagtttagtcatgttttccaaagagttactttcattcttactactgaactaaatttgttaaattttgacaaaactggactttgcaatatgactctttgcgggagattatttcagtgtttaaatcatttccaattattccagttaattgtgtagaagtgtaaggtttacatggtatgcgttatgcattccaat

SEQ ID NO: 83039 - DNA, 1010 bp, Homo sapiens
ctggccctccttgacgcaacagcctccctgctaaaacacagctgggattaacgcgttcctggtttatcacgttacagctgatttctctggttcctgagctggcaggggttccaggaattacctctgccttttgctaaatagcaactcctgtgctggctccatgaggcttgaggatgatgaggacagaagggcactgtctttgccttgaggaatctgactgccacgttgttctctgagcctgagtccccttccccggattctttaagaatgtgttgggattttttagcaggcagaatacgtgagagccttccaagtgggagcagtgctgtgagcaaccgcaggaagttggggagttctgggcatttggggaagggggctggtgctgtagtggaacactaacagagggatgtgggaggtgaatgagacagaaaaggtggactggagtcttgtgtgctgggattaggatgtcatggtgcgttttggctggagttgggaaccaggaagggtttccagcaggggtgtgtattgatgattgcaggtgggcaaatttcttggtcactgggccagggacatctctgatttctgagacagaagctccacacccccatatcctactcctgagttagttgagtttttttggccacctacattctgtggtagtttcattcaagcgcatcccttctcattctcttctcactgtgagtctcagttccccggctgtgggtgctggccagaccagcttagatagcctcattgaaacccttccttcttgggagacagccttgcttccccttgccagcttaaacagtgcccttcttgcgagagccacatttccccagtcctttctttttatttctggcttgccttctccttgtgcagctttggtttttctgcttctgttttgaactgtcgtgatcaaaactggttggttagaggccggccacggtggctcacgcctgtaatctcagcactttgggaagccaaagtgggtggatcacctgaggcaggag

SEQ ID NO: 83040 - DNA, 1093 bp, Homo sapiens
gtgttcccctcaagccggccctcactcatcctttcagggacccatgccccaatgtctgcatcctgacgtggcaccaggctccacagagtggacctggaacttggcccctgtagatgtgaagatgattctctccctcccctgcggtgatggagttccagcctctgggcctccaggtttttgttctgtcattttctttcctctgtttatttctgctggttccttcatgcagcacccacgctgggaatccagcttccttcgccctgaggaaaactgctgttgttcttagagtcttcctaggatatgagccctgatgttcccgaaagtggagctgagggtggggacagattcccgtggcttgctcagcaggggagtggccccccttgttgtctccatctcccgccacccccgccaactttttctgctccgtcccttattgacggccctgtgcttaccctcctggctgtggcccccctgccctccctttgagtctggacactgtctctctcaggagggggccagctgccccttgctttcccacctgccagcctggatggggtgtgggctggggccttgtgtgccaagacctaaaccacaggctggcagaaagcagccctgcagcccagaggcccggcttccgggctcctttcccccctgcaccctctgcctggccccaagggcaaaggtgtttcccaaagaccccgtggccatgggcctaaaactcctggaagcccccaactgagaggcagggggaggggaatgtgccttttgtgtgtctgatgcgagtgtctggggaccaggtacggatttttgttccacgtgctaagcctcatcaacaggtttttgcaacttcgtgtgagccagagctggggtagtggggctgagagactgtgtccctgtgagttccctcgtggggtattacagcaaaagaccagttggccctcatggtttttgggacccaccctaagccctgttccaggacctcataaacaggtgaggtaggagtccttggagtctctctcatccttcagccaggaagtactttgtacccacctcctcggcttgcaaggaaggttcatgtgtgctaaagcccctt

SEQ ID NO: 83041 - DNA, 1048 bp, Homo sapiens
accagtacagggccttagaggccatgctgaggatttgggtcattgtgctaagaacaacagggagccactgaagggtttgaaggagaaggaggtggagcagttagatttctgttcctaagttttaattttggctgggaggggcacaggaggcaaaaggaggtatctcgggctggggtcagctaccgatggggtcggggagggctggggccagtggttacttgcagtctggagtgcagtggagttacttgcagtggagtctacagtcctgggcttgggggactggtggagcctgcagtcctgggcttgggggactggtagagcctgcagtcctgggtttgggggaccggtggaggtttcagtcctgggcttgggggactggtagagcctgcagtcctgggtttgggggactggtagaggtttcagtcctgggtttgggagaccggtggagcctgcagtcctgggcttgggagaccggtggagcctgcagtcctgtgtttgggggactggtggagcctgcagtcctgggcttggggaagtggtggactacagtccttgcgggggactggtggagcctgcagtcccggtgggggactggtggagcctgcagtcctgtgtttgggggactggtggggcctgcagtcctgagcttgggagactgatggagcctgcagtcctgggcttgggggactggtggagtctgcagtcctggggtggggggactggttgcctgcctatccctttctgcacacgcctcccagggcctggaatggtgctgggtgctgtcaactcatctgttctcagggagccatgtgctgtctgaacgcttcctttaatggggctttgtttcctgacctgtaaggctcttgtttgttgagtgcttttttcctttcccaaagcctttcttacacgttaagctcttattggagcccatgggaaatggaggcccagagacattaagtggtctacctgcctagagtcagttcttgtgacatttgggactctaacattggagctccagctaccaatcacatcatcttccattgccttc

SEQ ID NO: 83042 - DNA, 1012 bp, Homo sapiens
ttacatttcaatgtgagatttgggtggggacaaacatccaaactacgtgaacagtcgtgatctgtcactcaaaggaggatgctcagtcaccagctacagatgttcccatcagcttttggggaattaatttggcccagcctcgaaaggtacttgggagacccctctccagcctttggggcctgtatcaaagccatgtctcatgtctcccccagctgtgccctggcttctctaatgccatttatgacattcccttctcctgcgccactgttcatgcacttatctgttcactggctcagcgggcatgctctgaggcgctggagagaactaagttctgcccttatcctcacgctgtgtgtaacagcagtattatttgcacacactgggtctcatttcctttactgggctgaagtctttttaaggctctggttcttgcttagtcacttgtgtttcctttagcatttagtgaacacagcttttctggtgctcaaatcctggtttgcattccaacaggataaagtttgtggcatcacaagcatggaagggcaagaccaggaggaattacaggcaggttctgctgtcctcagaaaccagcccttctctgtctgtgagaatagtggctggtttcttatagaagctggggcctgccaccctcctggcatcccagaaccctgagctttttaaataggaagcctagttggtgctttcttggcagaagaaaagttggtccgttagtaaaggaattggttcattgcttagctagttcaagatagaaattctaatggaatcatgccacagtcttacaaggtacgtgtgtatgttttttccaggcatattttttatatttttccatagaccagaatataggtattattaacaaaaaggtaagatactctatatactgttttgcatatatatatatgtatgtatatatatatgtacacacacacacagtaataggctgggtacagaggctcatgcctgtaatcccagcactttgggaagctgaggttgg

SEQ ID NO: 83043 - DNA, 1405 bp, Homo sapiens
ggaccttatctttcaggtcctctttcccttttctacccctctgtgttggcctcatacacaggcctgttatcttttcagcctagagattcccagcctagaaagagggctttttgccctggtggttgcagcaagtctcagaattgagcttcattggttcagcctgagtcacacgcccattgctgaaccaatcactgtgatgtaggggttccagtatgcagattggccaggcccagagcatagggtgggccctctgctttcttctcccaaacctccagatagagaaccaaggagggttattccttgagggccaattgagggggctcctacccaacaaaggagggtgggttcccagtggcagaaatgactgacgcccactcctcataaagctgcagttctgtgcctcccagcgcttctgtatctactgtctcatttaattcgcttacatctcaggaagggatcttaacccggtacctgttgcttcttgaactccagttctggaaccagggtctgctcattctttttctgttttgtaagaaagaaactgaggttccagcaaatcctctttttatttcctcttcatttctgcatggtttccggcgagctgcagcttctagcccgctgccttcatttctttgctccttgtcacccccccacacatgccacacacataaatgcagacacacacacacgcatacacacacagacatacacacatatacatatgtacatacagacacacacagacacacgtacatagacacacacacatacatacacacacagcttacccatcaaattgttgccttaatagtagatgggcctgatatcttcatttctaaaggagagaaagggcagcagagagacccatgggtttcctcacaacctggtatacagaacttccttctgggtctgggaagaggaggacgaggaggacagggcctggcttggcaatggagccagcttgaccctccgactgatccccagggccccagaaaggctcagtttctctgatctccaaaatagatggggaattaacctcaaaggccagggtgggtgtctgccagctgtgagtgctggactcgggactggaaagaaccaaacgggtataaatgctgctctggcagggaaaagtgggtggaagaacacaatgattccactcgagtggggggttaagtgttgcaaaggaaacccaacagggttagctcttcaaataggaggtcagaggaaagggccactaatgccgtcgtcaccagtgttggtaaagcaaggaagcaccgtgctttaggaggagagtctgcttgggaggatgggggtctcagcaccatcactggtcagatggggtggaagggaagtctggggattgggtggggacgagtgtgagagaaatcaagtgagctcctgagct

SEQ ID NO: 83044 - DNA, 1157 bp, Homo sapiens
gtaccaggacaacgtgtactctccagattgcagattccactccttcaagaaggtgctgtacgagatggggcccgagtactccagcaacgtggagctcgcctccttccactccacctccaagggctacatgggcgagtacgtgggcctcccttccctctgccactgctgggcctgccagatcctcacgctgccggctcctctgccctgccccgtggtccacccacttggatggagagaaggctgcccttatctgttgcttctgctgcatctccccagtgggagagccgtggtgtgagaacagccctggtacaggggctcaaataagggcgtgctcagagaagcctgacaacggacaaatggagtggaaacaggactacatggcagcttgcgacacctggtgttttctctgtcacttgttccgaggttgactgatgtctgagaggtcagggagggcagatagagcagacaaacagatgctgttaggctgactggctgtgctctgggtgcagggctgccttaggcactgtgtgacctcagaggctaaagggtcagctgtaatcctgtgtctgttcattcagctaatgtttactgagcacttacgatgagtccggcactgatctcagcaccgcggatgccgcagcgaacaccctcctgccggcacaaagcgtgggttctagtgaggggggagagctgtaggcaaatgagtaaatcgtgcgtcccacggagaacagtcattaggagagaggtaggggtggggtcgaaggctgaagtggtgcagcctcactgaggagttggcttctgagttaaaccccgaaggagtgtggtggggaactgtgcagatatctgggggaagagcattgcaggcagcgggagcagcctgggcaaagaccctgtggtagcagcacacctgctgtgctggcagaacacacctgccatgttggcggaacagccaggagctggaaaggagggggcacgggggcagtggcaggagtggagacctgagaattataggaggccaggtcacctggtccactttgctgattgtatttttcacttgtgttcagcatgagataggagctgttggagggggtgtggccttgcttagctggtgtgttgctccttctggctgctgtgtgatgggggatggggacagaggc

SEQ ID NO: 83045 - DNA, 3124 bp, Homo sapiens
gaaaaaaattagccaggcgtggtggcacacacctaaaggtccacctacacacaggtgtggcacacacctacagtcccagctatttgtgaggctgaagtgggactattgcttgagcctaggtggttgaggctgcagtgagctatgatcatgccactgcactccagcctgggtgacagaaaaagatcctgtctcttagaaaaaaataggagtttgtacacaatcatcactgttgttcaccttccattggcaagaactcagccacacctggccatttggtgttgggtgtgggaatgctttcgattctggctgtccaaatggcactttgttgaggtctttctataactggtggtcctctccctctctttggccctccaggtgtggttacagaggaggctacatggaggtgatcaacctgcaccctgagatcaagggccagctggtgaagctgctgtcggtgcgcctgtgccccccagtgtctgggcaggccgccatggacattgtcgtgaaccccccggtggcaggagaggagtcctttgagcaattcagccgagtgagtccactgtgatgcgtctgcacccctgtggccggggtcacgagagttcctgctgggccagtggccagcctgtctccaggtggccagacagcagcctcctgagggtgtggcctgcaggtgcactcatggctcttcagagcctgaaccacccctatgagttgaagtctggaagcgcagctgggcattgtttggaagtaggaggactgtgagtgtgtgtgggcaggtgaacccttcctcttcctcatggcgagtgtcgaagagggaagggagctgtgtcctgataacacactggggggactcatgaaactgaaaagaagacgaggaggtagaggggcgcagcatcgatcccaggcccccacccgcctctgccaacctgtgtcctcacagcttgacagggtcctccagctctgacagctttgaccagttcaaacaaaggaatttatgggtcaagtaatctagaagtcagctcccaactggtccaggctcacttcttttttaaaaaattgtggtaaaatacacataaagtcgacctttttaacctttataaagtgctcggttttctggcattcaggacattcacaatgttgtgcggccatcactgccatccatctccagagccgttccatgatcccacactgagctctacctgttacccactaacaccctaccctgccctccccttagccccagcagccacccttctacccccttctctctgcactcacctcctcgagattcctcatataaatggagtcatgttggccgggcgtagcggctcatgcctgtaatccaagcactttgggaggttgtggcaggcggatcacctgaggtcaggagtttgagaccagcccggccaacatggtcaaacctcatctctactaaaaatacaaaaatcagccgggatggtacatgcctgttatcccaactactcgggaggctgaggcaggagaatcacttgaacccaggaggcggaggttgcagtgggctgagattgcgccatggcactccagcctggatgacagagcaagactccgtttaaaaacaaaaaaagtagagtcatgtcttatttgtctttttgtgactggcttattttccttatcatgatgtcctccaggtccatctgtgttgtggcccgtgtcgtgattccaggctgaaccatgctccccacgtggacaggccacatagtgcttatgcctccatctgcagcccacaccttccacgccacttggccggcggcacctgtggaagccctggacggtgactgtgctccagccgtggacatacgcccagctcaggcccagtcactgaccttgacttgctctgcctgggtcctgtgctgcatgcacaccacacagacagagggtggggcgcgctggtcccccccagatgcattggtggggcccatctgcagaagaatgggcatgtgtcctagaagcatgttctgaggaattccgtccagagccaagtccatacagactgacaggcaacaactggtttttctcattttctggaaagacatcctggtacgagaatagaacccatgacacaggctgctgggctctaccctttggcctagaactccctggtgtctgtgtgccccacaccccagggcacgtggcagcctcccagggtgagcgctgtggaagaatttgtgccgggagatgtgttccacccacctccctgttttgctgtgctcaggctcacacaagctcttctttggtcagtctgtctgataccccagtgtcgaaggaacagaccaccccacccactccgtctgtgtggtgtgcatggggcatgtgacccaggcagagcaaatctgagtcaacgcatgggtcagaggggacatgtgttcaaagctggagcaaagtcatcatctgggatttccgcaagtgctgcaggaaagatcagtggctggagtgaatctttatccagagatactgactgctgtgctgtttccatctctcatcaggagaaggagtcggtcctgggtaatctggccaaaaaagcaaagctgacggaagacctgtttaaccaagtcccaggaattcactgcaaccccttgcagggggccatgtacgccttccctcggatcttcattcctgccaaagctgtggaggctgctcaggtctggggcatgggctgggctggctctctcttaccaggttcacctgagatgctgggttgggggcccctgcttatcttggggagcagaagtgctggccctggaggctcggaactgtatgcacctctcggccagagggtgttgaccgtgtaaagatgacaggttcttggaggcccagctgtgtgctgtgttgatgggcaaacatgaggtgggccccaggggaaaggagctgatctggactctgtgaatgctgctgctcccaagggcggtgcccaggtgagatgcctgcgggggaagcagcaggagctaccacctccacccagccactgcattctggagcagcgcttcccaaacttcagtgtgtgcaccgatcacctagggcctttttttttttcctttttgtggagaacgggtctcgctagattgcccaggcaggtctcaaactcctg

SEQ ID NO: 83046 - DNA, 1240 bp, Homo sapiens
cacgtgtattacttgggtgaaaaaaccaacatgtgaatgaaggggaaagtggtccaagtgctgggtgctgtccgggctggagctgtcgaagcagaccaggcagacctccctcttccattcctagaggcagtttagctgctggattcgttcctctcccatcttgcagagcagccaggctgacactgttgtctctcctgccaggatgactatcctccctccagtggagaagctgaaaacggtgctgcagaaggtgaaagacttccacatcaacttcctggagaagtacgcgtgaggacgcctgagccccagcgggagacctgtccttggctcttcctcccaatgcccgtcaggctgaactcgcctcccccgtgactctgcctcgggcctcgcagaggccgctggtcacttcgtcatcattttgcccctggagacgtctttctttgtgccttgatgttgagagcgcctctcttttgagcaaacaagcattctatatgcaaccagagtagaggggacctgctcagcaggtgtgaccagggttctctgaatctgttattgtttttgcttctggaaagttcatttggggtttacaacaactaggatgtgttgggtgagatgtttcagatctggagaaatgagcaggtgtcgggaaatgtgtgacttaaccgtggtgagggctggaaatccaaactcaccaccatgatctgtgaaataaagcccttagcggtgtgaagcatccggtcctttgaacagaagggcctggaaggcccctggggctgagaaagggtccgcccggtggcctggaggcaggcgccgggagcgcagtagcacgtggactgggcaggatgttgcactagcttggggtagatgctgggggctgcggccacggtcagagggccccactgtgaggcgtgggtgtgagccaggctgcaggaggaactgggcctccgcttcccagcaacgcagccaggcctgagaattctgtgcgcccggcgggctttgggaatgaggggttcccttgaacatgcgtaggctggaaccccgtctgagaggtctccctgaatttcagtgacacatagtgcagcccggcagtgtcccacttccgtggagagagccgctggaatggtgtggacccatcccgcgggtgaccggtgcctgttctcccctgaccgagcctgtgagcacatcgccccctgctggcgacagcggggaaatgagggctgaaaatatcctccccacaagg

SEQ ID NO: 83047 - DNA, 1984 bp, Homo sapiens
agtagagacaaggcttcaccatgttgtccaggctggtctcatctcctgacctcattatccgcccgcctcagccttccaaagtgctgggtgggattataagcatgaaccaccacacccagcccctttttaaactcttaaacagacactggattctatgtatcaaaaggaaagttgatgaaaatattacaaccaacctggtttttgtttgttttaataaaggaactagaagatcttctgccatctagaccggaagttcctaacataattggagaaacagaggaggtagagcttcaggaatttgatagcactcgaggctcaggaggtggtcagaggcgtgaagcctataatgatagctctgatgaagaaagcagcagccatcatggacctggagtgcagtgtgcccatcagtaaactctgcaaacaaattgcacaggtggattttctttccacatttgcctgatttgttctcagcaatccagctggagtgtcttatcaatccagatgaactgagggacatctgttggtctatgtataacttttaaaattggtatagtatctacagagtgtataatttaaactaaccacaaagctttacatcttcattttgactgttccatagcagaataaagcacttgaaaggaaacaagactccctttcacacatggattattataagtttcaatcctggtatctgtgcttgatttttatcagttttgtgtagatttttatgtttcatattttaaatttaaatcccacattgtaaagtttgtacaatttgtcctgaagctttgtgtttggctgcacctgcataagctgctacaaatagaataaagaatttcatagcctgtatctatcatttagatgcatggaaaaaaatgggctttgcacacaatgggtttggagctgactgggaacaatggaaaaaattacattagctgtggttgtaaagtttttttgtttttggttttgttttttttttcttttttctttttttttttttttaccatcttgtgaaaggtttctgaaactcgataataaaaagcggttggtgtaaattattcttttgtgtcacatttttagaaggaaaaacataaaagaatgtatccttagtactggttcttaaacagcccataaaaacccattggcctgaagcttatatctcaggcctatgcccatcttatagtcttggaagacaaaaggctggtagagacagtcttcagtggcttcagtgatgctctgtagaggccagggtgtcttgagtgctgtaactcccaagcactgggctagcctgacttctgtatctccctaccaccacccccttaaaaaaataaggtaacagcaaatctatagtaaaaccatgtctgcatagaacgtgttcaaatcctctgttttcattaaatgtaaaagatgctgtctccattaagttgaatatttggaattggagaagccattgattattattttgagtttctgtaatgttttatagaaaagtaagatgcttattcagaatttaagaatgaaggcaactgaaatatgcattgttgtagttatttatatttcaaactaaaaataagcaaaaaaaaaaggctggtttgagaaaaatcaggtaaaattgatgaaacggatgttgtgtttctctttccatcatctggtttttaccatttcactcagtaggtatttttagaacacacttatttgaggaaagagacatcagatgcacaattttacatttataaaggaacaaatggggaaaactgaaaactaaaaattttaaatgtattaaatgccatccctgagcctaaatctagtatttgtagtttatttctaggtctgctagaacctgaaaacctgaatgaaaaaaggtgtgctgacactaatcaagtcctgtgaggtttaaattattgacctatccactctacctccattgtacaaaaaatattttacaacaagcctgggtaagattcaacagcatagtagttttgta

SEQ ID NO: 83048 - DNA, 1062 bp, Homo sapiens
ggatgtatttttcctacacattgaaggctcagaaacattctttgtgcttattctcaataccttttgcattacctagtccataggcttatagtgtaatattgaatgagccagttttgcattttagtgagatgtgagacttgttggtatgtgtgtgaagcacggaattgagccacttgactttgctggctgggtgttaactggttgatgttgggttttatgttgatcttggaccctccccccttccctgttacgatcatgtctggggagcactccagggtgagcctgttctgtaggagccctctgggcattctgtacctttttcaccagaggcagagtctgaaagtgggcaatagttgcagaatatacctggcactgttttgagggcctcagttctgttgctcttatatatgccattgtttaccagttccagtacaccttcctcatggaagtttctcacatactacttgggaatagctagctttcctaatgcggtttagggcactagggacagtggcactttggatttgcagtgagtggtagaaataaggttttgaaattaagtcaaggaacataatgctgcagggtgtacctccataatttttaagaaaatgtatttcttttgtgctttatttataggtatttcagagagatgggaatgatttgcacatgacatataaaataggacttgttgaagctctatgtggatttcagttcacatttaagcaccttgatggacgtcagattgtggtgaaatacccccctggcaaagtaattgaaccaggtaaatcttgattttgtccgattctggttttcaagtatttttgaaaaaaattacaatttgtaatttttttatactgcataactctaaaaaaaattgaacacctcttttgggtaaaattattaatcatttcctcttaaataatagggtgtgttcgtgtagttcgaggtgaagggatgccgcagtatcgtaatccctttgaaaaaggtgatctttacataaagtttgatgtgcagtttcctgaaaacaactggatcaacccagacaagctttctgtaagtgtt

SEQ ID NO: 83049 - DNA, 1199 bp, Homo sapiens
ggcattttcattgatagaatccttggagtcgtttggggttcgttgtcaaatgatgtctggcagtgcagcagcatgataggaagtgaagaaggaatgcttatttgcagaggaaggatgacttttttttggtttgaggcatgtcaaactgatggtaaaaccttttttatccctaagtttagtttttaatgttgctgcataattaaattgggtttttaaaagtagatcattggatttggaggcaaaggacttaaggtctgggccccgtttactagctttggcttccctggactttttggatattaaagagtcaaatgagattatgaataagcttctttcttggggcctgtggggaggtgttgggaagtaactcatctctgaaaattgttggcagcagtggaattggcatggaattttcaacagaaggcagatgtagctagttgtctaaagtagaaaatagaagatggtaaaggttagaatggaagtttgtctcgttccttcttgggagtgctgtatcatctatagtcatcatcctgccatgtcacttgtcagtgtgcctgtttgtgtgtctcggtggtctggttaccatagtgcacttgtacagcatcaaaccacagaacctggtgatgttagtcacgcctctataacctgtacttttgttattcagaaatatgacttctaagtgttttctggtctagtgcttggtggtccctcctcattaatcttgtttttcagaaactctctggcatccttgcttgtttattctgtttaaacttttaacatcaaattgtttagcttccccgctctgctgcaacaaccatcctgataatcataatcattttttattgaaatcactttcagttgaactctcctgtacaagaacgtgatgtgtatctcttcctgttcccttttcttttttttttttttgagacagtcttgccctgtcacccagactggagtgtagtggcgcaattgtatttttagtagagatggggtttcatcatgttgcccaggctggtctcaaactcctgacctcaagtgatctgcctacctcggcctcccaaagtgctaggattataggtgtgagccaccgtgccctgccccactttttatttttgtttttatttttgaaatggggtctcactctgtcacccaggctggagtgcagtggcgcgatctctgttcactgcaacctccacctc

SEQ ID NO: 83050 - DNA, 1092 bp, Homo sapiens
actttttttatttgtagtagaggcaaggtctcactgtgttgctaggctggtctcagatcctgagctcaagtgatcctaccaccctgacctcgcaaaatgctgggattgcaggcttgagccactgtgcttggcctcagaatgctgctttgaataaaaatttaggtagtgattaaaagaagtccagaaagcatatttaaagaataagggtattaagagtacagtatagtactcttgctgaaagtttcaatgacttctctttccaggagaggtaattaatgaaaaagaccgctgtaaaaaatgtgaagggaagaaggtgattaaagaagtcaagattcttgaagtccacgtagacaaaggcatgaaacatggacagagaattacattcactggggaagcagaccaggccccaggagtggaacccggagacattgttcttttgctacaggagaaagaacatgaggtgattttcctttttttagttttttgtattttgttttattcagaagtacttcttgcttgtgagaaataggttagatctgtttggagtccctggagcaacactgaacactggtgaagttaagggcatcatggtgagttcctaagacgggcttgtgtaagaaagactaacaaggcaggtgcagttagaagcactgtaagagtcagttttagtcctggcttggtttcttccccctgcccctcagttggagtttcactcttgttgcccaggctggagtgcaatggtgcgatctcggctcactacaacctctgcctcccgggttcaagtgattctcctgcctcagcctcccgagtagttgggactacaggcatgcttcttcactcctggctaatttttatttttagtagagacaggctttctccatgttggtcaggctggtctcaagctcccaacctcaggtgatctgcctgcctcagcctcccaaagtgctgggattaaaagcgggagccaccgcgcctggccttggtcttttttgtgtgtgtgtgacggagtcttgctttgttacccaggctggaatgcagtggcacgatcttggctcactgcagcctccacctcccaggttcaagcgattctcc

SEQ ID NO: 83051 - DNA, 1707 bp, Homo sapiens
tatataattcacgagcctccgtgaatgaagatttaagtgctttaggacccaaacacctcgttgagagtgtgtgcaacttctctaccaccgaagttgccaccacgaccccagttaaccaccacgtgcaaataaaacaccaaaagacgctaactaggaccacctttactttttcatgatgttacagttagaaggaaggcgtgagccatcgggagcaggaattgtgactttagcttgatttatagtaatgttttgcagtccgcaaagcttaacagtcatttatctcgaatttattagggtcgtcttggtctggttacttggccatcaaagacacttgacaataggaaaatatggataatgtttgaacgttttgtttttccctgtggcattgcttcattgttttatctggttttcacgtcactgtaacctgttttcaagtatagctgctgtctacttggttatattacattagtaaacagtatcgcgagaaagtgccgaagaatccctacgaatagaaaatatttttgaaaggttataactctagaacattacttctcagaaaagtggatattaagttattacaaaacttttaactggtgtttagttataaccttttttgtttttatccattttcaaaggcatacagaaagttagccaaggaatatcatcctgataagaatccaaatgcaggagacaaagtaagttatttgcaccttttttattccgggggttttagctttaacttaaattgccctccttgaaaaagaggaatgttgcaggaaaaaaatccaactatgcccacacagccacattttcataatgtcaagagtattttagttttagaataagagtactaccattctgaggagcggtgggtggtaaatagaaccagaatcaagtcaaaggtaacttgtccctttttttttttttttagaattaaatggattctggattcctgtagcttctccccactcttctacttgaaaatgcaattatttttatttttaccttttctttatagtttaaagaaataagttttgcatatgaagtactatcaaatcctgagaagcgtgagttatatgacagatacggagagcaaggtcttcgggaaggcagcggcggaggtggtggcatggatgatattttctctcacatttttggtgggggattgttcggcttcatgggcaatcagagtagaagtcgaaatggcagaagaagaggagaggacatgatgcatccactcaagtgaatatcttgttttgttgttttaaaaaattaagtactttttgtcaagtgggataatgactcagtagatgaaaaatctcatagagtgttctgtccttcattagaaaaacttccatttgccttgtcttcttttggtgactaaattgaatttgattatctgaatgtttctatttcgctgtagctcttaaaaggacagtcgatattttttaatgagaggaaggtggttttatatggttctgaggctgcttgttattataggacttaaaatttcaactgtgaagatcattttctctctctctctttttttttttttgagaccgagtttcgctcttgtccaggatggagtgcagtggcacaatctcagctcactgcaacctctgcctcctgggttcaagcgattctcctgcctcagcctcccaagtagctgggattacaggcatatgccaacacacccggctaattttg

SEQ ID NO: 83052 - DNA, 1059 bp, Homo sapiens
ccggattctaataacgacatctgcgcgccaggcgggcctcctgcgggagccggggcccattttctttcgaagctaacgaagctgctgcgcaggcctgttaattccctcagcagccagtgcgaggttaaacacgcgacctcgcaaccatggcttttgagaggaagctgaattcctggggtgcgccgtgcacagttcttcatttcctacgttggccctgcccagccgcctggacctggaggaaaacagagaacctggcccactcttcaatacttcgaccccagtggccgcgcctcgggcgctcgggggcgggctctgcacagcgacgtcacggcgcaccgtgcgctgggtcaaagttcagccccgcccccgcttccccctcgctgtctccctcggcctgtgccgccgccgacgccgcttgtgggcccgactccgctctgtctgcttcgccaccttctccccgagcactgcccggccggccgccatggctaacgtggctgacacgaagctgtacgacatcctgggcgtcccgcccggcgccagcgagaacgagctgaagaaggtatctgggagcgggccgggcgggtgtgaggggcgcggggcctgcgcggccagggatgtcttcttcagccaggccgcgctactgggctgcccgcgagccggcgccggccgtgactggcccgggctgggagtcggcggcggcggcgggaccggcctcgccgcgagccgcgcactccggcctcggctgaccttggggccgccggccccgcccgcccgcagatgcagcaaataaaactcactcctgcgcaaacacgatgggagcccttccttcctccctccttgaacgagcgccgggggctggtatcccccgggaggcagcagctcgcccggtccttcgcgtcgaggtcaccaccccggaaaaacaggttggaccgaggtgctcagcgcatcccggccccgagagagaagctgtccgccccgcggccgtcggccccgggtctggtgctccgcggggaggaacggcggggaggtcgaggccgcccccacagagcgcctcgggcg

SEQ ID NO: 83053 - DNA, 1020 bp, Homo sapiens
gttcttgcaggcccttctaattcctatcactcatcagatttttattttattttattttatttattattatttatttacttatttttagagatggagtctcactctgttgcccaggttggagtgcagtgctgcaatcatggctcacagcaacctcaaactcctgggcttaagtgatccttctacctcagcttcctgagtagctgggactacaggcatgcaccactgtgccccgctaaatttttaaatttttagcagtgatagaggtctccctatgttgcctaggctggtctcaaacacctgggctcaagcaattttcccacctcagcctcccaaagtgctgggattacaggcatgagccaccgcacctggtctcttagtattctaattgcttaacaaccttctctaagggcacctaagttcacatgaacagggaccagatctaccttgttcaacacggaccctttatacttggcagttggtaatgccctggcaatatttgtggaatgaataacagaataaaagttcaagccacagttgaagaaggaagccagaaatctgttcagaagggaagcagcctcacgtacaggcccatggccatagccagagagaaaatgagggacagcgagccacggtcaggtgcaggctgggaggtgacaccaggcaaccatggtttgggccataaactatgggcaggggagagcgctgggatgtggtcacacagagaacaaacctcatggtgagctgggcagcctagagacacactcccaccgatcaccagccaggtgtggctgagtccaagagactgaggctgtagtgagctataatcatgccatggcactccagcctggatgacagagtgagatccacctttaaaaaataaaaataagaaatagaaataaaaccccaaaaaactgagttgtgttaggttgttatttttattattttcaggtcaaagagtcttgactaacacaaaggctttgttctaaaggagggaaggtgattgtagttttgtccattctg

SEQ ID NO: 83054 - DNA, 1030 bp, Homo sapiens
ctgcagcgtaagtttcttccagttcagtttccttacattgatgataaaactcttgacatgccccagcatccattaaactgccctgagcccctcattccctatttttctatacttttttttttaagagacagggtcccactctgtcgcccaggctggagtgcagtgttgcggtcatagctcgctgcaacctccaactcctgggcttcagagatcccgccacctcagcctcccgagtagctgggattaaaaccctgaatcactgcctggccttctgagatcccgccacctcagcctcccgagtaactgggattaaaaccctgaatcactgcctggccttctgtgatgttcctaaaggaaatctagggatacactgttcttgcccccaactaatgtatcgtccactggggactcaaagaaataaaagagcacatgagaaacaacaaatgctggattgactgaccaggaaggactcaagcagggaggccctgcagcgcttccagcgcttttctgaaggaggagagggaccagctgaggaggaggtgagcagacttcctaacaaccgtaagactcagattgcagggggcattcctcaggtgcacaacaaattgggaactgtgggctaaaatgaaggttttgctgaaagaaaggaagaaggaacccattgtgcctctgactaaatgtaaacagcccctttcctgtacctctagcacatacctggtgtcccactcacccaggtatattttttttttaaaaaaagagaagcagcctgtgatgctaaaggaagtagaacatagatgactattgaggttgctcagaatcgcctgtgtactttcatgcacatccagactcctggatctgacgccattacacctttccatcttaatgagttggagatgaaagggaatagaacaagctccaaggaaaccagaagagatgaaaggacctcagtttcttcaaataactccaaagacttgagagactcagattccacttgatggaaaaaatgccacagctcatgtcagcagtggga

SEQ ID NO: 83055 - DNA, 1050 bp, Homo sapiens
tcagcctctcgagtagctgggactacaggcgcccgccaccatgcccggctaattttttgtatttttagtagagacggggtttcaccatgttagccaggatggtctcgatctcctgacctcgtgatccgcccgcctcggcctcccaaagtgctgggattacaggagtgagccaaggcgcccagcccagctgtacgttttaaaagtcaagcacttctgtttagcagcccatgtaagcttgtcaatcattctgaattgaaatgtaatttattctgtaatttcttcaatgcattatatttccccttttctttaaatgtatgtaacattgtgttctacagttttgctgccatgattccttggcaccgtgaattcttactaagcaatgtttgttaacagtatacaggctcgatactaggcaggaagagctcctgtgttcttgcttttttgatcttttttaaatctaaaggagacgtgtattctagaaattaaatatttgtgtgccatatctcttgagttttggagaatgattggagtttgagttactgtaaataacaagattatcttggatattttagttttctgcaaaatcacttatgttttatatacctctgctaataattcaaaactctgaatttgctttactttaactttttaaaaatgtatttttgcaattggtttaatgactaccaaagcctaaaaagctaatgactagggtgcatgtttagtatgcactgtctagtgtaagctttttaaaagcagtagatttttattagagatgaacttccaggccatatgagaatatgcttaatcctagatttggcattttatagaaaagaattttgactcttgaactagaattaaaaacttgttctgatttccttgcttgcctcaatttctaaagtctagaagtggcaaataatttagatcacttataccaacagaatctgtatttccttccggggcaaagttggcatttcctatccactagcttccaaaatacaataatcctagttatgataagggcaactttattttattacacttagaaccatt

SEQ ID NO: 83056 - DNA, 1050 bp, Homo sapiens
atgtgtgcctgtcagttactgtgctatgtgtttgcggttacaaagaagatgcactggagtcgcgctcagtcacccccatgtgttcatcgtgtctgtattgaatactgttgaggccagacagtcttttaggctgtggagatgcatcagtgaatcagacagacaaggcccttctttctagtgagaagagacagacaaccaacaagactcaaaataccaggtaatataataatgaagtaaagcaaaatgaaggagaaaatgtagcgcttatttagaaattgggaaagcctcacaagacctgaacaacaggaaggaatcagccaaagagattctaggccgaaggcacagctggttcctgaggcaagaattagcttgatgtgttttgagtgatgggaaggcggcctgtgttctagtagagagcgctcggaaggccagagagacacgcaggctccaggtcacatagtacctccgaagtcagagtaaggggcacagagttgttctaactataatgggactctactggaagattttaagcaaggctgtgatgtgatctgatttgtattttgaaaaggtcactggctgctgtgtacataatacactatagggactgtggcagaaacttccagttgtctagaaatgtccatttaactatttgtcagtaattctctgaatttaactgagcgcacagttccccaaaatgaagactatttaccagtttcctgttggtttaggtgaccatgtgactaagtctagccagttagatataagtagaaaatgatgtgtgcaacttaggggaattgttgtttttgttgtttaaacttttattttgaaatcattgtagattatgggcaagtgtttttgttttgttttgtttgagatggagtcttgctctgtcacccaggctggagtgcagtggcacgatcttggcgcaccacaacctctgcctcccaggttcaagcgattctcctgcctcagcctccccagtagctgggactacaggcgtgtgccaccatgcccggctaatttttgtatttttattagagacggggtttc

SEQ ID NO: 83057 - DNA, 2248 bp, Homo sapiens
ggggtttcaccatgttggccaggctggtctcgaattcctcacctcaagttatctgccctccttggcctcccaaaatgctgggattacaggcatgagccaccaccacacccagccattagatttgtttattaacatcattgttaaaaatgacagaaaaatgcaatcattgattcatccttatagaatctaatacttattcctattttcaagtagataataaatgataagaagctaagtatttaaggaccctaagtatttaatgtgccttaagtattcaagtatttattgttttttaatcaattagatcattaattataaaatagctactataaactacaaaaatactaggactgttgaattaggaaatcatatctattatctgctaattgctggagacttttaaaaatgaatcactgtgtatttcagaaatgagtcttttcataacatctttctaccatttataaacgagtctaaaattctttttcagaaagcagatgatagagaaaaacgacaagaagcccaccggtttcattttgatgctatgtgacttgcctttaatattacataatggaatggctgttcacttgattagttgaaacacaaattctggcttgaaaaaataggggagattaaatattatttataaatgatgtatcccatggtaattattggaaagtattcaaataaatatggtttgaatatgtcacaaggtctttttttttaaagcactttgtatataaaaatttgggttctctattctgtagtgctgtacatttttgttcctttgtggaatgtgttgcatgtactccagtgtttgtgtatttataatcttatttgcatcatgatgatggaaaaagttgtgtaaataaaaataattaaatgagcaggaatttttgtgtccacttgacttggtcttgcttcttattctaatgatgcaaattatacttttgtgaatatatcacggagtcattaggcattcagcttcatcacagcaggtcaggggtctcactgatggcatacaatatagtgatcgggtactctgacttggtagcacagtaagacagacttgccttaaactcctaattcaaccacttacaaagtcattgtttgaacttggctcttgtttaacctctgtaaacctcagttttcttgtttattcagtggggctaatacttgagttactgtaaacattaaatgggatgatgtatgtgaagtgcttagcttggtgcctagcacagagtaagtggtcaatatgtggtagttgtcattattaatattttagatgatcttattagacttatacatctaattatagaaatacatagacttgatagaattttattttcaggcatgaagaaatattctttggaaaagctaaatttttggtgattgacataaagatttacttgctcatattaactaaaaattatagtactctccaagaattaatgtgccctaaaaattttcctccaaaaacttatccttatcatgtgataatgaagaacatttgatttcttgaaaggaaactgctgtaggcagcatctgggaatgcaaatcttcaatcacatttctattctcaaacacttggagaagtctataatttacattcagacttcaatgcaaattttgtattgtgaacttcacatttccaaaaagttactttaaaaagactttaagactgaaaaaaaaaagtttatcaatgctaataattttctagtatgcaaatggacatgtgatgcctataaaacacaaaaatttctctgaaaacaattttgttcttatttttttctttatagttcactgagattggcatgtgtttttactttgtatctaagcatgttaacatgtcttcttaataaatattccttattgaaacaaagtatttcagtgagtttttaaataattattttagagcatgaagagaccttagagcttatgaaagcatttatctggactgggagaccagggtaaggtgacttgcccactgcctctctgtgggtcacgggcaagataggattctcctgactgtaatactcagttaaattcactagttatcagcccacagcactgtcccaggcactacgtgacactttctcaaagataattgggatcattattgatatagcctgagtcttcaaactcatgtgaatcagagtttacaagacaaataaaatgttaatgacaattaaaactacaatcagtgacattaatactgcttctgtatttccaaatgcaactttaatatcat

SEQ ID NO: 83058 - DNA, 1109 bp, Homo sapiens
ttccttcttttgcccacactagacatggaactggtcagctatttggagaggctgctatgaaccagtgcaggttttctggactcacagtttatgcagatctgctggatctgggtccagggagtcccactgatgggctgaggctggccatgcccagctggggagtctcagaggagcagggaatcaaaatgcttcctggaatcaccaccctggtcttcaagttctggcatggagtcatagttgcagcagactatagggctgcagtgggtgcttacattgcctccagatggtaaagaaggtgacagagatcaacccctacccgaagccatcatggctaggggcacagggaactgtagcttctgagaatggctgttggctcggcaaagtcaaatgtatgagctttgaaataaggaatgcatccctgtaacagctgcctccaagctgcctgacaacatattgtatcagtacaaaggcatggggctgtccataggcaacatgatctgtggctgggataggagaggccctggcctctgctacatggacactgaagggaatcagatctcaggggccaccttctctgtaggttcttgctctgtgtatgcttatggggttatgaatcagggctattcctataacctggaaatggagcaggcctatgatctggcccatgaggtaagctaccaagccatctaccaagccacctgcatagatgcctactcaggaggtgctgctaacctctaccatgtgcaggaggatggctggatccaagtctccagtgacaatgcagttgatcttcatgacaagtatgatggatctaccccaggagggagggtgatgtagctgtttgcatttcttgggtgactgtcattggtaatatggatacagtgcttcatcttatctctagtggaggggtcttcaactgtatcaatacttttttttaaagctgtggaacactgacctctatgtgttaccagtccttaatgagctgctgcagaggtggctattttactttcttggatgttaaggtactctactcactactttacctgaatgaatgaatgaatgaataaataaatacatacatacataaataaatgaataaaatgtcattc

SEQ ID NO: 83059 - DNA, 1040 bp, Homo sapiens
gcacatcagtattagatgatattacagcttgctctagttttttttaaacgttcgagtgtttctatgtgacacagttttaaattatgtaatctgactagatgtgtattaatatcagttcaatcctaagattcatgtggtattgtgaaaaactttctaaggctttctgtgccagttcagacaaaaatgactaggataaattctaagggaaagtacttttttttttcccagagtgtcacctattcatcagagtaaattatgatcccctaccatattgtagagataaaaaagttaagtaaaataatgcttatcttgaaaacttaatggatcgtttgttttgcaaattataaatttttttataaaataactataaagtctgatctttttctcttaatccatagtgggttccagtcctacaagatttcagcaataagggcacactctggggctttgtgccatttgtggatgaacagcaaccaactgaaataccaattccaattacccttcatattggagactacaatatggatggctatccagacgctctggtcatactaaagaacacatctggaaggtaaggaaattaaatcaagtgagaaatatttgtaaactatgtgagaaatatttgcaaaccatggtactttgcaactgaatagtacctaaatatgttataatctcttaaataaggaacatggtgagctcagttcctgtttttaaatttggtccctgcacttctcacaactgcttagttgtttttttttttttcacagattcattatctgtaaaacaaaaatgaacatttagtctaaagcaaacagttatatttcactcaataaaacttaatctttaaaagttcaaaagttgttataggcaaatgacccaattatattttgagaccgaagacactggtggttaagaactgactctaggctttgatctcagtccaaccacttaccatctgtgtgactttggtcatattactcagactcttcatgtgtgaaataagtgtaataattgtacctctgtcatggagttatagtaaa

SEQ ID NO: 83060 - DNA, 1056 bp, Homo sapiens
ggttttaatgaagtctatgttatcacttgagccagtttgtaaatcacatttttgtattagttctttcttacttggctagctctcaaactttttttttttttaagctgtgatatatgtttatctccttggaaaaccttctccttttcaagtattcctgcctagaattgcatctttgtctctcaatctatttaattctcagtagtccaaatctatatgttgcaaattacagatgttctctacatattttattattaattcaactattgtatttaatgttgcactcctctaaggcagggtttatcataatgttattaatcatgaggatcctaagtaagcaaatcatgaaattaaatgaaagaaattcattttttactttgttgtgcatttttaattttccatgctgaagtcagtttccattggctagattttaattccactcagcctaaaattctttttttttccttttgaatacattattggagacttgataggcttttgataactacatagctctcagtacgtaagtatgcttcactaaatatacaatgaagcatatttctgtattaataatccttttattttcttccaagtgtatatactacctcaggcacgagttaaataatacaataaacaacagcagtaaatcagtgattaaagcaatacaaaatcaatccccaaattaaaaaactaagtgactgtgcattgtgaatgtccacataaagagacttaactctgcgacatcaaaatctgtaaaccccatcaggtagcagggacattagatgggagagagcactagagagctgacacctcagtaatgtcagtaacttactaacttcctccataacctcacctctgtaggccttagcagaatactgtgctttgtaaaaaacagtcacttggaaaggatatctatattcctttcatttgctttttcattgataaaaatttattggtacttttaagaagccagagtgttgagggctttataactcttggatcgaagttcatccagaataaagtctcttacatatgtataaagttaagagtctcacgttt

SEQ ID NO: 83061 - DNA, 1064 bp, Homo sapiens
atgaaattctcctctcatttcaatatcttttcttaattgttcccaacagaatcttcttcccttaaaatctgcaaaacatgtctttgtacttatactaattatgtgttaccgtcagaaatcctatttttctgacttatattctatctcccaactggactgtaagctctttgaggataggaactagttttataattctttacatttccaaagccttccacagtacttgaaattattactctctgaaattatggtgatgatttggtaaaagatactagaattgacagcaaggaaagcataccacattcatattttcttcctcaactcacaggagtttcctttgcttcaaaataaaagtgaaacaggagattggaataatttttgtgcaatacaacaaaatactgaagttatttatttccccagttcagttagaatgctttgttttacacttaacaaatgagtggattaagatggtctaattcaaagttttcttcatttaacaggatggaaacttctctgtcagtactatattggaaaaacctcaaaatatgatggtggttggacagtcagcatttgcagactttggtaagatttggtaaaaaaaaaaaaaaaaggcttttgcctttccaattctctccttctttctgttctatttatattaattccccatagcaggaaataactccagggtcttcagagctattatagcttcaaaagatgcctattccataatagtattgtatgtgacatgtcaattccttaatgaaataaggagaaatttatgatgtgtttaaaaaatagtttgatactgtttgcagaagtaatatgcaaaacaagaaaactactgagactttttctagagaattccaggtattaattaccgtaaattcttcacgtatatacaacatatggaacaaatagaagtgaaggagttaatatgacctcttaaaaccaatactaaaagccatttttattacaacttaattttaaagcagattaatgtctattatgaattacccaaaagaggacatatgaatttctgttttccgtaagattctgcacaatca

SEQ ID NO: 83062 - DNA, 1321 bp, Homo sapiens
aaagcataaaacagtaatgttattttaatattcctataagccacctcatcgttttaataccttatatattcactaagtaaaattgccatgatacaaacataataaatgctgctactagaatagatttgtttgcagtaataggcctttacaataataggatgtttcatttgactgtgaacctattttttttcaaagaaattttattaaaattattgtacttttcaataaaacaaccattcgttagctggaatttatgaagacaattctattactgaaaatttgaaacataatttattcatttaacatgagtgcaaaaacttttgggtggtgaaatactgttatttaaaataatgctgaaaactatgatatataggtaagtgttgcttgctttcagggtgagaaagcaaatgtgattgcgatcagaatatctgttttaaaaaatatagtacactttggaataaaaaagattaaaaggcacatgatttaaaaaaagtgcgacacataactattcttggaaataaggaatattcttgaaggactaataccaaatatcctcgttaaatacattttctttaatgcagggtcatctgcttttttttttaatgggatgaaacttgttaaaatataatttaaaatatgtttaagtagaattgtgtcaattcttttaatgtattgcattttttttctgtttttaaatgtacacatcagtaagactacaaaactttacgtttttattatttttccttctagatttattcctgacgacattgaatgccaccactagtaccttccagtttgaaatatgggaaaatttggtaagaaatcttttccttgaagcattttaaaatgatggctttcagtaaaagcacacaattttagaaaataaaatgaaaataatcacttggttgatttcaacaataaatagaaaactttaagagcctttggttgcattgctgcattcaaactactgaatatttctgaaggaagtgattcattcagcatcagttactctgcaggtttttaggcatgactgccaattaaaccaatcaggctgccctaatgtgcatgttaacaggacccctgctatgctgtcagctgttgagagagttactgtcatttaatttgtcagcatgatggtttatgaaaaaaaactattttaaaaagaccaatttttcccctttgcctttaggcttatataaagaaataagacaacaaacaccaaacttactgccacgttgactaggattaagaaatctttcccaatagggtttttttttttttaattgtaagtagaagattcccaaaccaatgtcatgatttt

SEQ ID NO: 83063 - DNA, 1051 bp, Homo sapiens
ggaaacatgtcttgcaacctaaacttaccagtcttgtgaccctgcagccgtgcaggaacttcctgggcctgtaataaactttgaggaatatggagttggggagtacagataaggtacactgtccacagagagaggacaggctgttaatattctcttttaacttgagtgtaagacggggtcacactttgcagcaactttaagaggattttaaaatttctgttactactactattaggttatagttgatttcattaattccttcttcaaggtgagtctgctagcagtgaattatctccgtttttcattatctagaaatgtctttatttcctcttaaattttaaaattagttttcctgaatgtaggacttttggttgacaggagcttttttcttccgtcatttggagtatgtcatcccactgccttctggtcttcattgtttctgatgagaagtcacccattaaacttattgggattctcttctatgtgatgaatagtttttcccttgcttctttcaaaaattttctttttctttggttttcagcatttttgctatgatttatctatctgggtctcgatctctttgcatttattctgcatcacatttattgagcttcttagatgtgaatattaatgtttttcatcaaatttgggaaggttttagccattatttcttcaaatttttctttgtcttctctctctctcacttctactagagaacttccattacgtatatcttggtgtacttaattgtgccccacatttctttgagattcttttcattttttccttatcctttttttctctctgtttttcaggctgcttaatctgtcatgaagtttgctaattcttctggcagttcaaagctaacgttgagcccctcaagtgaattttttatttcagtatatttactttcagttccataatttccatttggttttttatcatttctgtctatggatattttatatttgataaggcacacttcacttctttaagcataatttccttttttttttttaacatatttgtagtggctgctttaaagtttttg

SEQ ID NO: 83064 - DNA, 1142 bp, Homo sapiens
catgctgcttttctttccacgtggaagttcatggacctgaaaatggcttattttaagctttgtacccaaactaaaatctttgcattcgataggcattttttgtccagtctgacaagctctgtcttttggtgaacttgtttaattcactgacaagttattaatgttcttattgcaacagttgagtttacatctgccttctgtttactatgcctcagtcctttggtcctctactcctacgttactgctttcttttgctttcagtgaatattttctattgtaacatcttaattcctttagtaacttttttaactttttattttgattagtggttgctatagggcttactacatatatcttatcagaatctacttcagatatgtactaacttaattgcagtgagacatggaaatgtcacttgtttatagctctattctctttcccccttattgtaatacatattacatctatatatgttacaaacccatcatactttgttataattattactttatataattttatgtctcttaagcttagagaagacagtagacagatattatttacaatgtttattatattaaccttcttagttactgtttctggttctcttctttattcctgtgaattcaagttaccatctggtgtcattttcttggtccattgcagttttgctcccactcaccttcttggtgttgctggcaaatatattacatttctatatattatgggcctagtgatacaattatatacatattgttttattacagttgcatttttaaatcagttaagaaaggagaaggaatatacatttaaactgtcttttttaactacataattcctttactaattgcaccattttttcctatggatttgaattactatcaggggtcatttgctttcatcctgagcaactttagtattttttataaggttgttgcgggacagtcagaccgaaaaaggttcaggagagtttattaaattaaggtgatcaccggctcagccagacatatgtccagaaagtctgagccctgaaaaagggcttttcctacttttaaacatcttaaggtgggagctaacatgaggcgggaagcgagttacagaagcaaggaacaaaggcagcattacaacattccttatatctt

SEQ ID NO: 83065 - DNA, 1688 bp, Homo sapiens
attgtaacattgatttgctcaaagaccttcagtggctcctcttcatcctctaaggtagaggctagttcccgtggctgcctgcagtgtgatcctctcttcctttctagctttctctcctggtcccctgctggcatcctgtacttaagccaaactctccttttcccagtttcctctagttttcctcattgccttgcctttgctgcttcctctacctcagggtttcttaatcgtggtactgttgacactttgagcaggatccttgtttgttgtggggagctgccatatgcattgtaggatgtttagtttagcaccatacctggcttctactatctgaatacctgtagcaaccaaaaatgtctttagacattgtccagtgtctcctaaaaggcaaaatagtccctggttgagaatcattgttctacctagtaagctgtcaacctgtctacatcatacttgtctttctttcaagctttatctcaaatgctatttcctctaagacttgttactgttttctttttgcttacttatcttgttagccactctgtttcccatgcccagtaagagtgaccattcccttgagctctgtctcctaacttacccatccctgacccctgtgctccctccccaacacttccactctgtcttctggaacaccagctccaccatcagctctcatctgcattcttgcttcttttcacagagttcctttcacagttgtggaagcatcccccgtagctgcctctaatggaatatgccacatgcctcatattttggtgtttagagatcagcaactttaatccccagtaccactttcaaattatttctccccgaaatatctgcaaatctcctcctatgaggtttctgccaccccgttacaccaaacgtcatcttcctttttttattactagcatctatcaatttctagttcactggagacataacatcttctggacagttgtctaactcttgtcatcattttaggtgatttcagtgtctgcagagatgagtcagcccagcaccaggacctccccacctcagccagctcagttcgttccctgcaccttgtaggtaccagaaaatataccatctccaaaaccaccagtcacatagccactctcctactaccaccccttatccctctaggttacatgcttaagtgccctccctgcaacgctttttggatctcactggggcctgcagtccactgatcctgctactttatatccactcatccctcatccagcctccatttccctcctatccatggtaaattattactaaccctctcttgcaaatatgcttggcttctctcattctctcacattcagacaccctaattctaggtaaacccagccaccttccttctttctctttctctctttcacacacacacacacacacaaaataattattaggttaggagactgtccttgatctcagtctcacattctaaattcaagtcctcattgtgttctttctcatagttcctgaactttttcttcatttcttcatttctatcacagtttgaatttgaagttccctttctcatcttcatgtatggccggtgttctgtcttgctcctttcttctgctcttctcctcccctccccctctacttcctccctcccttttgctcccattggagaagcaagcaatgcatacattttagcaacagctaacagctgtacc

SEQ ID NO: 83066 - DNA, 1060 bp, Homo sapiens
gtgttctttcttaaagaaggaaaataaaatgtagctctcagtaaaaattcgcttagtagaatccctccatttgcctttatctcatttttgctgaatttattatctattagtagatgataccagttaatttatttacactttggtaacatttcttatactctgcaatctctctgagtgcctctagccctctttttggtctgtaaagagagggaagcacttctcagagctgattaagggtaaagggagggatgtactcttgtctccttcctgataatagaagattcttcccattgtaggatttatctagcttgatccatgcatgtggtttgaagaattgggcttctctctctaataaatgttccctgaaatattgtctggtgaataagccttcccaaagtataaacaaagtgccattgaaatagtattagctctttaacgtcactagggcttcatttggtacactagagaaggaataagtgactttttggtattgtgatatcattctgaacagaaaacctgccagcagattaaattctttacctgacagaaaagatctgattcattttaggacattattgccttgctgaccttgtttggtgtctaatttatttttagagagaagaacaggaaaggaaacttaaatcaagtttaatattttctttttagaaacagattgccttgctttttataaattaccatcatcactgaaagtaatgctgactgaagtgatccaaacaaacttacagagcagctaaaaactggtacaaatctagaagcttaagttgttagtaatgatttccttcttgaagaggagggttaaaataattgaagaatagcgagccatgttttagctttagtgaatatttccaaaatctagcagtatggtttatgctcactttttcaggaggaatccagatacttcttgattcaggcctttttttttgtttttctggctcatgcttcctgccacttcttttcttcatcagcgcctgtaaatagacactggggatgaagacagaggaaattaaagtttttcatattttctctgttgttagtagtt

SEQ ID NO: 83067 - DNA, 1023 bp, Homo sapiens
gtgcagagtggatgggacctgttggacatttaaaagggcaagtgttatgtcatcggccaagggaaacataacctgaaaatttctttaatatcacacatacttttcattcattcattcatcaaattcaaaattatttactgagactttactcttccaagcattgtgctaggaaccaaagacgaaaaaacaagatcaccagactcaaataatactaaagcataaacctcaaggaagtggttatagcctggcatcactctattcattctgtattgaaaattttaaacttgatttttaaagacactgatttgcgttttaaaatgcagtggaatttcagctccagatgtacagtaataccctgagtgtcagttgtttgtagtatatttagtggagctatacaggagtcttatttttctttctttgcacactcttggtgatctcatggctttaataagcaccatctactgggtcataaccctgcatactaataacatatgtatgtatatgtccaagctagacgtcccactatgctccaaagccacatagcaactgcctactagccatgtccacttttatgtccatgtctgatagacagttcagactatttttcccaaaatgaatccctgatctttcctcctaaaccacctcaacccttaagcttcccgtctcactaaatggcagtcccgtccttccaattctgtcaaaatgttgagttggctgggcgcagtggctcacttctgtaatcccaacacgttcggaggccaaggcaggcggatcacatgagaccaggagttctagaccagcctggccaacatggcaaaaccctatttctactaaaaatacaaaaagaaaaattagccaggcatgtctgtaatcccagttactagggagctgaggcacgagaatcacttgaacccaggaggcagaggttgcagtgagccgagatcacaccactgcactccagcctgagtgacagaggaagactctgtctcaaaacataaaaaacattggagtcatccttgctgc

SEQ ID NO: 83068 - DNA, 1025 bp, Homo sapiens
tctgataaggtaaagtttagttcaagagtacagaacacatttatttacttttttgtctttctgaaagtacaaaggaccacccttatcaatctgtctttcccagctacttggaactctagtgacttttctctttgtgttttatagaaatagtttgtttttatgattcatttttgaaatgtgatttgtaggtatgcagaggagtaaattgtgaaaatttttaaggtattctgaagagacactttaacatttcctattactttttctggtttacagccataccaccctgaacgcgccccatctcttctgatctcggaagctaaccaaggtcagacctggttagtgcttggatgggagatcacctattactttttctgtaggtttttaataaagaatatgggtgctttgatgctagtaatagtgaactttgaaataattattgtgaatcctgaatgagaaacctgtttttttctccaaaatttgaaaaatatcttgaagagagtcttgctttagagacaaattggaaggagatcctgatttgcttttgtggccgtatccaagaggaattgagtgcaggtggggtgcagggaaaacacagtccactccccaccaccactccgctccttccacagcaaatggggactgctcagaaaaccctgtcctttcttttcctctcttcaaaggcaggcatgtgattgaggatgtgatggtgacttctggcctgttttattttgtggtaacttcactttagtcagggaaataattggaatatctttaatctgatgtagtttgacctttagaaattgaaagtgaaacagctattgttgataattcacaaagtattaataaaacttctattacctgtacagattttttacttaatctgcgagaaaactatttagaatattatggaattgtgccatagcttctttatttgttcttaattctatattagatttttttttctctgcttcatgaacaagttcagattttaaaacatcatgcctgaagacatgtccaactttatt

SEQ ID NO: 83069 - DNA, 1034 bp, Homo sapiens
ttggtccgagctcttcgctccaagaccttccagctcacttctgccgtgagtcccgccgcccccgccatcgcgctccggtcgccgccttggccaccgcccccggggccgcctgtcagcaatgccgggccacgccccccgcacgacactgtcgggaggcgcgcctgccggaagtgagcgtgagggcggctttcaccctagctccactgcttttttagcgtcggaagggcagccctagtgggagagagaaaaaggagccggcagcggctcttacgcgtcccggggctgcgcgccactctctcggccggtaacgcggtgctttgcggctgtcgtcaagcgcggcgttgggccggcgggcgggggctgaggggctgccatggcggcggcgggccggctcccgagctcctgggccctcttctcgccgctcctcgcagggcttgcactactgggagtcgggccggtcccagcgcgggcgctgcacaacgtcacggccgagctctttggggccgaggcctggggcacccttgcggctttcggggacctcaactccgacaagcagacggatctcttcgtgctgcgggaaagtcagtgcttgccgggccctccctctgttcgctgtccgtgtgcctctcccggtgttccccaaacccattgcccaatggccggtccttctgcatttcctggtccttctctcccagccctgtggccttccctttagcattcttaacagcttgtccttttgcaccaccctttccaaccccaggttctgacccagctaccctacagtttgacctaccctcaaaagccctgacagcacctcagttttgttcctaagaagtctgcggccctcacccagtcaccttaccccctcctccccatggaatcacctgttttccaaagtgcttcctgattcctaggaatctttgtagcttgcctcaacgttcgctcccaaggcccactcattcctttctattttgcttcagtcttccttccccgttgatgaacatgaaaaggtgcaacctgacaatctcttctca

SEQ ID NO: 83070 - DNA, 1861 bp, Homo sapiens
tcacctgaggtcaggagttcgagaccagcctggccaacctggtaaaaccccatctctactaaaaatacaaaaattacctgggcgtggtggcgggcgcctgtaaccccagctactcgggagtctgaggcagaagaattgcttgaacctgggaggcggaggctgcagtgagtggaggtcgcaccactgcactccagcgtgggcgacagagtgagactccgtctcaaaaaaaaaaaaaattattttctcacctaatatgttctccttacgttttgggcttttcctatttatgaagttcttagttgtctgttgtgcacactgacttttttttttttttttttggagaaagtaaatctaatttctgaaaatctaatttcagaaatcatacaccgaacactctgtttttttataccttacaaaaagttcagctttatatacttagggttatagtaaaattaccatctatgaagtatgagataattttttcaaaaagtagtccttagtactactaagaatcaataaagtgacttggaatagtcacatgtatttgtttcacactttttcttaaattgtttttgtgtgatatagaaatactgagttggctactaacgatgtggctatctggatataaaaagtgttattggattggttatgtctgaacaaagagaataactggagttttcttacagggacctgagtactgcccccaacatatatttttgcaacatttctctttaactttcataagctcatagagttgattttcttcgtcagtctttgtttcctctgaaatgcatgtcataacagtaagctttgaaaaccttaattctcttttcttagctgagaaaaaaaattctagtgttaactgttgttgagtgcagttatttaaatccacttttatgtgcaaagtgcatagtatcaatgttgaatgttcctgtatgtttacatcatagtagtaaagagataccacttgaagttattcctccaaattaatagttaaatttgaggtttcagattcttgtaagtatatgaagtacagaggataaagttaataactcgagttaataacttcctgtatcattaaaagcaatcaacttgattctgtttgttacttttagaagaatatataaatggagctttgttaaacacttgactaacctgactccagtatagagtcctccccacagagttctgagcattgttacatagtagcataattacttcactgcacaacagaggatactacttttatgtaatgtctaataagtggatattatatagtttctatctcatccatatgagcaagtgtaatttatcaaagcaaagaaaatcacattttcaagtcataaaagagaaaataaaattataatgatcctcagttactgcctttgttgcatactgcatcatgttaataactgctcacactgctttcaattaatttaacactgattgcttctaacctttactaaacagttttaaaattgctatagcttagcctgcgacgcttatgattagagccaacaatttgaaatggcctgctcacctgatgcagtcgtctctccgtcttccgctttcttaaggtctggtaagtgttgtagaccccaaaagggtcacttggtaattttaaatacctttgtttctgaaggttgatttcactataagatatcattatgtctttatttcttctttggtgggcccaggcctgagtacccggctggtgttttgtttaactttgcattgtgttttgaatgtggcctattgtgttcttctcatgtgggatgtgaaaagaacagagagtggagtgcctgccccgatatttgcaagcagaggcagttccttagtgtctgggagctcccattgtcaa

SEQ ID NO: 83071 - DNA, 1388 bp, Homo sapiens
ggtacctaaacattaagtgatttccaacagccttaatgagaatttttttaaagttatttttaattgacaaatagtaattgtatatatttacagggtacaatataatgttttggtatatgcttacagtgttggataattaaatcaggctaattaacaaatctggcccctcacatacttactattttttcgtaatgaaaacatttaaagtctactcttctagcaattttgaaatatataacgttttatgattatagccaccattctgtacagtaggtcactgaagcttttgcctcctatctaactgaaactttgtaccctttggtcaacattcgagaatcttgtgtaataattgaaatttgtcatttttataggttctgatatatgtcatatatgctcttttttcaaaatatatatcattgatttttcatttgtcatataaaatcttttaaagttctgatatatgtcatatatgctcttttttcaaaatatatatcattgatttttcatttgtcatataaaatcttttaaagtttattgttttactccctttgttattaatagcctcacagtgtttacatggccctcctttttggcaatttaagattcaagtcttgtagctcaggactgaaataggcaccagccatagagatgaacacttatgctgttatttggattatagatcaagtcttattgctaaagctgtggatggagactaggaaggacagacacagagtctgggattgggctgttgagctgtggatagttcctcttcgtacatattttagctacctggtatgttttgaaaatatactcatcaggtgcttaacttgtattctttattatatttctgtcttcctccaatagttgaaccagtaaataattttctgtatactaaaaaaaaatgtggtacatttactttgtatattaactttggttgcattaactttgtcggctcacttgtaaatatctgatgattgataagttataaatcaacaatatgtcaaaaagaattagcttgttgtgacttcagtcagtggactattttcttgtttttttttttttgagatggagttttgctcttgttgctcaggctagagtgcaatgatgcaatctcagctcactgcaacctccatctcccaggttcaagcgattctcctgcctcagcctcccaagtagctgggattacaggcatgcgccaccatgcccagccaattttgtatttttaatacaggcagggtttcaccattttggccaggctggtctcgaactcctgatttcaggtgatcctcccgcctcagcctcccagagtgctggtattacaggtgtgtgccactgcgcctggactatttctttcatggggttttctgcttacaggacagcttattgtt

SEQ ID NO: 83072 - DNA, 1097 bp, Homo sapiens
aagcagctttatttggtattacggtaagcattgatagagagtgttaatcatttctattgatgttcttcctgctttgacagttttcctgttcaaattgagccccttttaactgtggcttatataaacatgtttattttatttttagagtcaggatcttccttgatctcccaggctggaatgcagtcgtgcagtcatagctcattgcagccttgaacttctgggctcaagtgatcttcttgcctcagcctcatgagtaactgggactacaggcatgtgccaccatgcccagctaattttttttttcttgttttagggacaggatcttgctatgttgcccaagctggtctcaagctcctgtcctcaagcaatcctttcttctcagcctctcaaagtgctgggattatatgagtgagccttgatttttaaagtgtaaggccttaactttcatttgtgttaagcagattttatgtagtccactggtagttttcatgataaatatctttaatatagaggtttttaaaataaaagcgtgttttcttaacttacgtatttctaacagaaattattttagttttgtggaatctttttatataaatttctttctgtgcccattcagagatcctcttgtttggttatctttttttcatggaaatacacagtaaggctcaattagtttgttatacccactttatcccaattcttaataggcttgtagctttgataataatcatttgctcaatgacctcaaggataaaaagatctatcaggatgtaaggttttagttattataatttgaagaaataaactatttgagagttagaatttatcagtgcactctttcttctgctgtatctcattttcattatattgatacttatacctaagacctataccaaatttaagtccttcttagttttttaaattctactatttaaatatttcttgaatatttcctcccttatgcattactggtgtcactgtcttaattcaaggccctagaatgattgttttgacccaaactagacttttatgcctagggcttactccctgtctagcagtcatttgctctgccaacagatatatcttctagagtttgg

SEQ ID NO: 83073 - DNA, 1024 bp, Homo sapiens
aagtatgtttttgggacacttcagtatttgagccaagactatgtattagatcatatagtatcagtattaaatttcttaggtataataatggtattatggttatgtaggcaaatctccttgttttctagagatacttctgaagtgtgtaggagtgaagggtcatgatgttcgtagcttactttcaaacaatgaagaaaatattatagagaatgcaagctaatgttaaaatggtgaatctaagtgacgaccaaaagacttattcattatagcatccttttaacttttttgtagatttgaaatttttctaaataaaatgtttacaggaaaattgctttaacaaatacaagaggataggcagcatatggacaaaagtcagatattaaccttttcccagaatgcttctaacatcagatagagactttaaagtcctcattttgcaggcacactatctatgtagaatatgcctctattaaaacacttgtgtctgacctcaaggggaaaagtactgtatagagcaaattcatgctaatttttgtgcaatgccagcatgaaaaagaaggtatgatgtgctaatgatgaataacttactttttactgacattcaccatactatgtcaaaataataatcattcttcccaatagtgaatggtatatgcaatctatgatttaactgggaggtaattataatatactttttaaggagagaagtgatactttttaatcatgtgagaatgattgccagatatttttagttaagattaagtgaaacaatgaataaatcacttttattttttagtagtgggtgattctcatccacctttggaaagttactgatttataataaaaagcaacttgtggacagaaggaacatcttaaccaaactaggtttggttaaggtatttaggttaatctaactattaaactaaatagttagattttaggtgttctttatttttaaaagcaagagatgtaaaatatgctcaattgattttaaattaaaaccaaagaatataaagctctatgc

SEQ ID NO: 83074 - DNA, 1054 bp, Homo sapiens
tcctggctgaaagtttttcactgcctttttaaaaatttacttatttaataacagttttattgagatacaattcacgtaacatgtaattcacctatttaaagtatatagtttgatggtttttagtatattcagagtttctcaaccattatcactataaattttagaacattgtcatcaccccagaaagaaacattgtacccattaggttgcaaaaagaaactttgtattccctatattctccaaagccccccagctctaggcagcaaccagtctttctgtccctgtggatttgcctactcttggcatttcatatacaataaatgatctttttgtgactggctttttaaatttagcgttgtgttttcaagatgtattggtcaggattctccaaagggacagaactaataggtggaggagaggagagagggacagagggagggagggagggaaggagaggttggaggaattgacccacacaattatggaggctgagaagtcccatgagaggccatctgcaagctgcaaaagcaaggatgccactaatgtggcttagtccacatctgaaagcctcagaaccatacaagccagtggtgtaactctctgttggaggatgaaggcccaaaagcccagcgagccactgatggaagccctggaaccaaaagctggataacctggagttctgatgtccaaaggcaggagaagaagagtgtatgagagcaagaattcacccttcctctgcctttttgttccatctgggtggcccccagtcaattgggtggcacctgccgaccttgagaataggtcttccccactcagacagccaactcacgtgccagcttcctccagaaacatcctcacagatgtacccagaaataatgctttgccagctgtctaggtatccctttatccagtcaaattgacacctaaaatgaaccacacagggttgtgcctgttgtggcacgtacctttcctgcttctttacctgagacaattcacacatcccattcaggattctgtgagtatccttttttgttaaagtgatattagtattttt

SEQ ID NO: 83075 - DNA, 1070 bp, Homo sapiens
tgaagaccggagctgttcgtattcggctgtcttggaatggacccctaatttttgtattttttagtagagatgagtttctgcatgttggtcatgctggtctcaaactcccaacctcatgtaatccctcccctcagcctcccaaattgctgggattacaggcatgagccaccacacccggcctatgtcctgttattgagtatgtccttatgtttcatttctttttcttttaggtctcttttattcaaaaccttgtattttgtgtggaaagagtttaccgtgtgcctgactttggtgtctgggaaagaggaagcaaatataataatggcagcacagagctacattcgaggtaatttgctgatttctgaggttttttttttaaattaaatgtatggaatttgaatatgaagaaatactgaagcattagattggaactgtgattcatatgttaatttgtagcaatttttttctacctatgatgcagatggaagtcacttaaaattaacacaaaagagcccatcctcagtacccataaacagatgcaagaaagaagtaggtgtctttcccaacctcccaaggtgtcagtacatgcatgtcagccctcatcattaatccacagcttggcctttctgctcaaccaagtcattttctttttcctctttgaaattacctcatttgaaatgtcaagtacattaaaattttcaaacaccagttgtatatgcactgaatataaaatttccttccatgttatagagctgatttttatcctgaccacggatgcttacactgttcacataaaacttaacattcattgttaccagtaaggtgtgtgatcaacatcttgagctgtggtttactgcgtttgaataagcaacaatagctgataactgatgttagtagtttatgaatttcttttaatccttagggttaaggaagtagctttagtgactgattgtacctttcctaaatcctagttttatgcctaggagatcatattttaataacaaaataatatagttcaataagtcctatccatgttgcactaaaagatgtaagaatttaagctaaaagtt

SEQ ID NO: 83076 - DNA, 1042 bp, Homo sapiens
atgttcaaatttatctttctctgtagtttgagaattcctttcacagtatgtgcatgaggacgaagaagcttgggttgtgagaggggctgctggaaagagctgttgggtcagtaagcaaaagttggctatttacacatctattgccaccacagccttggtgcagaagggaaattcctatcagtaaataccctttccggaagaatacatttctccaggctctgctacagagctcagtgacagcctcataactgaactaggggagaaaatctcctgaccatagttttgcggtgtggttttgttccagaataagaatgtgaagatcatgtacgataggtagatccaatgaccagttgtaccttgttttattttttgagtctagatgagggcagcaagtcccttagctcaggctctgagaagtgattaatgaagaaaagaaagatcagtcttcaaattgttttctttttaattgagaccagtgagatcagcaaagtcttatgtttacagttggtacccttggccttagggactgtctcaaaagtggttgttctggtcatgggattaagggaagtgcagtgcagcccttccccaccactggaactcaagtccccatgacagtggtcaggtttcagaatcatcttccagtcccagtgcatttactagactaaaacaattatagaaacttggctagggagtaaagtttgagctgtcagtcttaaaataagctctttaggtggagtcaggatattatggcagaattataatgttttcaggaaatggaagatgaaaataaaatatccaaagttaatctgatactctgaagtgacatatacatataaaacatcctttcatattcctatccttaattggggaaatcaagatactgacaaatgagccgagaccagaatctaaaaggtaatgactagagagattgctcatgttatgcaaagtgttcaaagcagtgcagacatctagcttcctttgaaatttgcaggccttaaattaatgtgtctgattatttaaagtaggtgataattaattccat

SEQ ID NO: 83077 - DNA, 1064 bp, Homo sapiens
atttatcattttatttaactttttttttttttttttaatagagaccagatctccctatgttgcccaggctggactggaactccagggctcaagtgattctcctgcctcagcctcccaagtagctcggactacaggcatacaccaccacatccagctttatttaatttcacggttgactatcacttggaaaccattttattgtgtgcacttttgaaattttagcagtgttggcagtgttacagtctgttaggttgggccaaaagatccatttatctcttaaacaccttcaaatgtttctttcctatttaatacattttctgtgccaatatttacagcacttacatttgaattggaccacctgcaactaactaccacctcgcacacttccaactttggatctgtccagcaagctttcttgctttggatctgtccagcaagctttcttcaccttctgctgagcaccactaaggaaagccacagcactgtgggtaggagctgccccacagtcaggagatctttcttggttcagcctcatcattgctgtcggttcttgtcagtcctgctatctgactctgccaggaactccccatgaaagcttttccagctttttcctgtttgtactcaagttcgcagactttcctttttattttctacttgatagcctttcatttctgcatggtctcctccactgtgtctttccttcatccatacttacctccatctctcttgcctcacagaaggagctctctgttctaaggctaacccatcctgtgtataccccatcctattctcttttcctttcttgacaccctcacttgttttcttctgtgatagaaggatatctatttctctttcttttttctcctcatctccatttctacttctctgtcttgtttccccaacttaaattagcttttttcgtcattaagcacattgatgtttatcattaagaaaccaaacgaaacccttcctcagccctttccctgtccacctccatcctctttctcttggtgccacacatctgaaaagcatggcctctacttggtgtctccttgtttacatcc

SEQ ID NO: 83078 - DNA, 1045 bp, Homo sapiens
ctccctggtttaggctagtggatctggggcgattttgccctccaggagacatttgacaatgtctgcagacattttgggttatcacaatatagtaggtactactgacatctggaaggtagatactaggaatgctactaaacattcctgcaccacacaggacagcccaacaacaaagaattatttggccacaatgtcagtagtgctgaagttgagaaagctcagtttaggttgtcatcttttctctttggattttgctccagcagaattccagctggtcctgttttttgccctacaactctcttcggtattaccagctgctcagtctagcaagtaaatataatgagtaaatttgatcctgctgagtattcacctgtggttctcttttatttccagaccaaagtcttagctacttagcatgacctgcaaggcccttcccgatctggctggcctggcccatctgttgggtttcagttttcactacttcgtccttgcttattgcagaaatactgaattgctggtagattctttaacatactttgtgattctgtgcatctgtggtttgtaactgttacttcctttgccttgagttaccttagctcatctccccagtgaattccatccagcgttagctgaaacatctcctttcctgtaaacattccctgattccaaggcagactcaggtgttccactccctatgagcctgacataccatgtgtagatatttcctactgcatagtagttgtttatttacatgctggcctccctattaggctgtgagcctctgagggaagttctctgtcttttgtcttagtagctctctgtctagttggttccaggcattagtaagtattcagtaaatatttattgaaggactgcagtttgatggactgaatgagtgagcttttgaataataagatctgaggaaaaatttttttaaaaaaaggacaaggaaactgcttacaaaatcagttcaactttattgctataaacaaatctttgacatatcgcctaactatagttcttctaatgtaattgttagtggctg

SEQ ID NO: 83079 - DNA, 1032 bp, Homo sapiens
gcagggaccctcaaaaaacatagctgaattttctgtataactggaaaaccaattttcaaaggaattccaaatgagatgttctagatgtctttggggctttaaagtattgacaatcacagcagtgagccccattcctatctcacatgaaatttgtgatattctttggggttttccacagatatctcagagtaaatacttaatattatatgctcactaacatgcttgtaatgttaaaagttgtgaaatgtttatggataaacattgatttcaaagtgaatattaatttttaaaagttatctttgtctttatgctacaaataatcacttgtccaatgtgagaaataatgtattaaattttgtaatgcatgtaatatttgaaatcctttgaagcagatcttttaatatttagtattagatctttgatgcattgagatgtagtagtttaatgtacctcacttcaggcttcatcatgttcagagagtgatgttcaaagtattatctgtatatcatagaccttcttactgattttagacacaaatattgttgattgatatgtaaggaagcaaaattttagggaaatctgtgcaatttcattagaaaaattaagtttactgtgggctaatattgcaaaaagtctcctgtagcatcctacatagattgttgattattttcccattatatcatccacaaagattctactattaaataataattttagttcctaccaacccatttttaaatggtcacgggggagatggctttttctcttcggtgatattgaatggtagataatgggcttaatgtttaaatggggatttctttgctctagcaatggctcagagttataattcttcatttaagattacacagtatctcatttgtgaagcttctacagaataatcctattaaaaatagcttcctctgtggctctaagtatttgcatactgtgtatttgttgattcatttaaaggtattaaaattaaatgttgttgagggagattatgtactcattgttagccaaagcataacaatc

SEQ ID NO: 83080 - DNA, 1468 bp, Homo sapiens
ataaaaatcaatgcagtggggaaaaaatgtgcccataaacttgaccttttaatgatatttctcacatttaccattatggaaattaaagtaatgattatggcaattagtgtttctgtatttgctaaccgactaatttattattctgcttagtaagtgtattgagtgcctactaggtgctggtggctctgctaggtactgggcatcatgtataagaagcatacagtctatgagtttatacatgagcacgtggtgtaagtgggaacatcaagctagatgaagtgtggcacaaagagaaacacgaaggaaatgcaaagaaataagcttttggaagacttggttaaccattcaattcttaccaattttaatagattagcatttatgctttacaaggatataaggtttcttaatttatctgtcactatttataaataacaaaatactgtaataaagatagaatttagtttctatagcatgacagtgaaaacttgttcgttttagaaattttttcacatctcagtgatcatacaattgagatacggaaataatttactgcctatctagaatatcagtgtactaatcaaccctgtatcatgagctaaactgaaattagtacattaaagttatatgtcgatatctgctttcattggtttggtttaaattttgaaaaagtgtattttttttttcagagagaaaggagaacatttgtaatatgcaacctgatttcgataggaaaaatgtaacatgtctaaatagttttttttatttcatcctccttctgctattattttcacctatgttatgtagaatgtcagtgttcttaaagggcaggattagtatgtgattaagagcccagactctgggagtcgactgactgtgtctcagctttgctctataccaaccaccaggaagttgcctaaacactcaggtgcctctggttcatcatctataaagtgataaggttgttgtgaggattaatgaatgaatatatgtgaaatacttaaaacaatgcctggagcttaataactgtgtaggtattgctgctgctgcagaggcagcggtggctctggcagactctgcttctactcttcctccttcttgttattctactgttaatactactttaattattattgaaaagatcttccaagagttactaaaatcctttggtgattttgtctcaaataacaatgcagatgtgcctggaagataccccaggatagaaatctagtatagaaatattcctaaaactgcaaataaatttataaccattggttccttgctctgtcatattcactacctaaaagcaatttataaatagctatggaaaatgaactgtaatctttttagtaaatattatacatgggtacatttatacaaaactcagcatagtattgtttttaagtgatcagtgtagagccaaagatcaagaatgaaataaacatgttttatagcttacatgcagtaaaaa

SEQ ID NO: 83081 - DNA, 1062 bp, Homo sapiens
tgattttcttgattctgtattgtttttctatactgtttcattaatttccactctaatctttattatttccttccttctgttgcttttgatttagtttgctctttttcatccactgtctttttttgtttgtttgttttgttttgagatggagtctctctctgttgcccaggctggagtacagtggcacaatcttggctcactgcaccttccacctcccaggttcaagcaattctcctgcctcagcctcctgagtagctgggattacaggcacacacaaccatgcccagctaatttttttttttttttttttttttgtatttttagtagagatggagtttcaccatgttggccaggctggtctcaaactcctgaccttgtgatccgcccacctcagcctcccaaagtgctgggattacaggcgtgacccactgtgcccagccatctcatccactgtcttaaggtggaaaaataggttattgatttgagatttttcttctgtttaatataggaatttatagctataattttttctctgagcattgttttacccacatcccattgattttggtgtttgtctttattttcattcatctcatcagaaagtatattagaatatattttctcatttcccttttgatttattatttgacccattagttatttagtagtatgttttcatttccacatatgtgtgaatttataagatttctttctgttattgatgcctaattccattcccttgtggtcagacaatatactttttatgattcagtccttttctatatattgaggcttattttatggcctagtatgtggtatatcctggtggaggatgtttcatgtacactgagaaaaatgtatattcttctcttgttggagtattttctaaaagtctagttggtttatagtgttatgcaaatgcattttcgataatgtcattccccttctttttttcagctgatgaacttattagtcctaaagacattgatcctgtccagcgctatgtcccactaaaggatcaacgtaacgtgagcatgaggttttccaatcaggtaaagaatt

SEQ ID NO: 83082 - DNA, 1431 bp, Homo sapiens
acataagttatcaaaagtgcagtggtatcattttgccactttaagtgaattatagaaaccttacttcttccattagtttcccttaccttcttcatttcttaaacataatttttaaaaatatttcctctgtcttcattgagcagcacatcaaattgtgtgaaaatttttgcttcaaccataaactttgattaaagaagttcatgggatgatggatagtctattgtactgacctcagtttttaccatttatgttctttcctttctgaatgtcccagccttcttctgttatcattttctttctgtttggagaccttcctttagacattatttatgggtaggtctgctagcaacaaatttcttagttttcctttgtctgagaatatctttatttcaccttcattactgaagggtagttacgttggatataggattcctagttaacaattgttttacttcagcactaagaaatattgtgccacttcctctggcttccgtagtttcaaatgagaaattccctgtcagttcaaatttgtttcctctacagataatgccccatttcttcttgtcctaagtctccttatgccactgggtagagggccagaagctaccaggctcaggtgacatgggaggatcaacctaattgctgttgcccctgctgtggagcaggggtcgagtagacctgtcattgctttgaaccctctgcaggtgaattggactgcccaagggtacctgagtagtagaacactgtggagtcaggaaagccgtctggggcttctttgttgatgctgcaaatatgttggcccatcagcgctgtggttgtgaagcagaggttgggttggctcaccaggactttgaagttgctgctaaagacagattgattggccaactggtacctcagttgaagagctgagattagagctccccacttggtctctgttgtgctttgcatttccctatcctctggtgagagaaaacagatttttctttttttctatgcctattggttatttcaggctgcagactcctgcactgcccagcctagcatatgtgtagtctcaagagtctcactgcattgccattcttcaagtgctgaggcctctggccagtccagtctgctttctttccagctttcagaatcctttaatagttatctgtctaggccatcttgttcctacttccaatttttatagtggataatgtatgttcgtaagtctttctacaagtaaaaaagatttattctgttcctttactcatcttttttcttcagagtaattttttaaacaataatggctatcatttattgagcatttattttttaatagcagctttattgaagtataatttgcatcccatacaattcactaatttaaagcatgcaatgaaatggtttttagtatatttaccagaaccaattttagaacatttggaacta

SEQ ID NO: 83083 - DNA, 1116 bp, Homo sapiens
cagcatgaacatgtccttaaggcacagatcacttgtgctattgtttgtggtttaagaacaccttaagtagttttctgccctgggtgggccaggtgttccttgccctcattctggtaaaccaacaaccttccagtgtgggcgtcaaggccatcatgagcatgtcacagtcctgcagagattttgtttatgtccagttttggggccagtttatggccagatttgggggcctattcccaagaatatataatgtataaatatacattatatataagtatatactaagtaatataaatatatttatataatataatgtatataaaatatataatatttatatataatataaatttttttatatatttacatataaaacgatatatatcatttcagtcattcataagtgtacaagtcagtggcaataagtacatttacaatgtatcattgtagctattgcctctatgtatatgaaaaccttttttatcatcctcaacaaaacttctgtacccattaagcagtgaccctctttctttcctccctccagcccctggtaatctctattctactttttgtgtgtatgaatttgcctattctagttacctcatataagtggaatcatgccatatttgtctttctgcgtgtggcttatttcattaagcataatttccatactaatgtttgtgtgtttcattaatatggtgtttttctttcctcccactggttattttgtcacatacctggtatttctcatcattcaatcatatattagtgtgataagtgggctgattattctcagtgtattaagtagtagtctgctactcccaccatcccatccagaggtgacggaaatgtgatgggagttttgtctcctggctaaccttattgatgagtcagggatctggttgggaacaaagaagactcttatcacccttgccaaatgccagaacatgaaaggctttaagaatctgttgtttgcagtggaagccttaactcatcccagccagcttgttctatatatttggagaaaagccctgctttattgctgaccgtgattccctgtgtggtacatggggctggccactgtggcctttaatcagtccttctattcacttccgcttc

SEQ ID NO: 83084 - DNA, 1052 bp, Homo sapiens
ccaaacccaaacctactgatcttttcttataatagtcctccagttacccacataatccagtggtagcaatgcctctgaatgatttagtttgagtgcttagtctacttttataagcagaattaaaacctgatgtttaatggtgccactgtgtaaccataaccatttccagagatttcagtgtaaaaggttgactagccttaattgattatcaaaaggtgtaaagatgacattagtacatatggtacatctacaaaatggaataccaagcagttagagtgaaaatgaggacgtgttctatgtgttaatatatgaaaagagttccatgatatacaattattaactagaaaaaggtgctgagagtaacttttgtgtagaaatgtaagaaaataatatatatttgcatttgctgttgtaggcatgaggaaatgctagagcaaggcataaataatcatagcagtgattggttgttagatggaggggaactgtggggatgaaggccccaaatgggaatgacatgtcaccaaaaactttttcataattgttaaatttttgagccttatgaatgaattatctgttgaaaaaattaaattagaaaaaaagagcaaggaaaagaaacactattagggcacattcacattaagttttctctgtgtgccctttgaaagttgtattacactgttttatttatagcccccagctgcaaatatcctggctttactactttgacctgatttgagtaatttaaaaactagaatctagacagatagacatgcagtgtcttaattaccgtagttttaaatttttagcatgatgagttgcaatattaatatagttagtgcccagcttatagagaagttatgctataaaagttcctcttccaccgtacacttaaaaatggttaagatgttaaatttaggttatgtggggttttctttacaatgaaaaaatcttagaaaaatacaatctgactttatagaaatgaaaattttgaatgagaatatttctaactacagggttttggtcctaaaccatattgttactctgacatgtac

SEQ ID NO: 83085 - DNA, 1001 bp, Homo sapiens
ggtgaaacctgtctttacaaaaaatataaaaattagccaggtgtggtggtgtgcacctgtagtcccagctacttgggaggctgaggtgggaggatcacctgagcccaggatgtctaggctgcagtgagccgtgatcactccaccactccactacactccagcctgggcaatagagtgaaaacctgtctgaaacaaacaaacaaacaaacaaatcaatggtggtggtttgaagaaaatggtaaaaacagaacagatagtttcaactttggcagtgaaaggaagagagttttacgagtggggctgcccgtgctgaattctttctctcaatggtgaatggggcaaaaggtcccacttgggctggagttgtaagtccaagctcgttgtggtagatggtttgtgaaccagactatttgaaatgcttagtttttacaacaaaagagctcttcagccatctgatagtcccctaactagatgctcagtatgattcaacatgtatagaggccattttagatctgagtactctgtcatacaagtggaaacaatatcctaaacaggcctatgattcaaaaagaagattccagtttgccaattacaatctataaactgccttatttattgttattgaaatatcatctgtattctgtatgttttcatttgctttttatttaagaatcccacaactgtcctgaagattgtacataatggcctattctaaggttactcatccttttaaagcagtaaatactagatctcatccaagagaaatagggcttaattttttcatttgttagaaatcttgatgaggctttgaaaacaagttttttctcacccttttggaaaacatttaattgtgaggtctttatcaagtaaaaacagaatttataacattttaaatgggtatttgtttttgttggattgttaaatcacattttctcttacacattcatttaaatcacatgaaagtctgcgtgaaatggcactttgacgatgattctgggaac

SEQ ID NO: 83086 - DNA, 1043 bp, Homo sapiens
tgtgtgtgtgcatgtgtgtgtacgttatgtttataggtcttgttgattcctacttctttctaaactctattactaacctaggctgagcagttaaataacaagttagtcttaattttaataggaataaaattattcttatattttgatttgatttttttcctcttatcaaaatgtattcttacattttgatttggttttttcatccttttatctttgattttttcgcctttgattatcaaaaaatatttaggtgtgagaaggtttgtttaaaaaaaacgtactcatacctaaatatttttgatattcactactttcctttttttctcttgccttactgtttggtgtctgaagtaatttcaacctctttggtttgctgggtctcaaagcaattataaagtaaaagtaacatctgtatttatcattgatgtagttcaatacctatttgggatggaattaaaaggtgacatttgaggccttttgcacgcactgctctgcagatggatccattattgcctatgcttgtgaatgttcttgctcgttagagacacgacattgttgactcctacccactacttatttatacactgccatttttatttagtaattgttaaaaacaacataagaacaaactgctcagtgtttagtagaagtctttgtaacagtgtatctcaagtggacatgattaagtttattaggttaaatataaatggttgtagtcaaagtcttgttgctataacagaaaaatgaaggcttagagaagagaggtacatgttacatgggaaaatgcaggactccagtatcaggcctggatcttgacattaggcaacacaaaccagaacctgggtgtcaggtcaccaagagcaccagctcttggagagtccttataccttctccaataaatttaaccaccactaccctgccaagagataaagctgaaaatacaaggatccctagagtaggtaacaatttaaactcacgcccagatgtacataatggtacaaggcaaggagcggaggcaacgtggagggagagagaaggatgcc

SEQ ID NO: 83087 - DNA, 1072 bp, Homo sapiens
acaggcccattggctgcctcgggacatcaaaggtactcatgaaatgtcctcaaaaagtagtttttggattctaataccgcatactgaaatggtgcttgacctgctatgcatcctttttcattttcattatgtactcagactacttatctgaagtattattttctgctagtaaacattacttatttagcatcatatcatggaagtcttataaatatgaaggagcacctcactgctaaatatattttttctaagctttgtaaaatatctaattataacaatatttactcacagacttttccatcatattagaggtagactgctttaagtttattggtatactgattccatcaagaaacttaaaaatttttaaatattatctggatgtcgcaagctattaatttatgtgcttattcagaattagacatcagtttttatttttattgagacttacagcactgcacctttgcctttggtatgttctttagttatttgttttaaaactttttcccttacagatttatcgcattctaggaaagactgtggtttgttacccgattattttcgacctaagtgatttctacatgtctcaggatgttttcctgctgatagatgacataaaggtagcttcggaacacctttcttaaaaatggaatgagtttgtttccactgattttatcatatgttactatattgagtactcccaggtatctgtgacactgggttaacacagtgtaaagcatgacagtaaaaccacctgcatagctttggagagtgtaaattacttgcagcattggcataatagatgacctcgtcttatatacagttgtatgactgccccttgtgcctttatacaaatgaaaagatacaattcagaaaaacagggggacctattttgaaaaatatgttcatatgacagtttatgtctttttgaacaaaaggtaaattagcaaaataattttatttatgaaaaatatccagtaaaacctcaactaactcataactccatgagttaaaatcttcactcccttttctactgacagagcagagaaggttagaatcatgatttagagca

SEQ ID NO: 83088 - DNA, 1679 bp, Homo sapiens
ttctggtaattaactgagcatagttatttattcaaatgagatctacttagtttttgccttattatagctaagagataaccttcttcagtattatagatgtgaattgaatagttttcaatttcttagcttgttaaaggcagaggaacttttagcaaatttcaaacagaatcttgcatgtttctaattagtcttaaaactataagtataagcagaatctcagttatatttaggacattcattgaaatttgcactttatctaaaacagtaggatttttaaaaatcaaacatttcattagaaacctagaattcagaatggctgtttttttaatttaaaagttttagtgcttttaaataaaagaaaatttatataaaatagtttataatgaaaatgctaagggaatgatgttgtaaaccatttttataaatttgagaataatattcattaaatgttttaaatctataaaaccttatgtgaaactttgaaaatcatatgcatctacagaatctgaatataattttatccaatttgttaaaaggctgtaaaaagtttagagtaaaatgttaaagatcttgttttttatcattgttttctttttggcgctctttcctgtcacattgtgattttacgggcaaaatcagtggccaaataatgaaacccactggtgtcttttgagcagtagcatatgttggaatgatcatagccccatgtacataacaaggcctcagtaaagttttattgaacaaataaatgaaaactcatatatattagagtctacagtatttgttcaattgctaattattttactatattctcttttcttcttttctgcagtaaattagaatagcatttgtatttgttaaaagtttagattgcatattaattaggaaaacagttgaatttcgagaaataaaatacctatattacatactcagactaaatagtatcaagtgctggggatagtcacactctatatatttgagttacatatttaaatatgttagttcagaacattaatggatcgatgtatcaactctagtgaagcacagtgaaaatgagtacttttaagaggaataaatgttgtgcatttaattaaaagctttgttcaacaaagactctattatccaatgtctaggtaccgtttctgatcacattgagagagtctatagaagagctggcagccaaaaactttggtttgtattagtgtccttgttgttatgttttatttttgtgttgttatattcgatagcctaaagaaaatggaccaatattaaagatagttattcatcctaatttttacttttaacctccaaggttacagcactttctaagaatgtgcctatgtagcatgtctgtccccccactgcctccaccaaaattctgagaacaaagacactgtagggattgaacctgaagagtattcgctggaatggtatgctaaggtttctttcctgctgtacacctcctctgccccaacaaggtgctttaagttctgttttttaatttaggaaacctgttctgctattatagaaggccatgaaaagagaccagtgatttatctaatcataagcaaaaatagtagaaggctattgtcttgtcacttaagttgaatgaatcccagtgattgtagttgcttcacgaaaaataaccaatttgttctacagaggtagtctgttcccag

SEQ ID NO: 83089 - DNA, 1022 bp, Homo sapiens
taaatctttcaaattttcactgtaaattttcagtacagtaagacatcaagccaataagtgatagttctggtaaactttcttagccagtaagtttcaagtgtggtctgtagtcttatttttgattaagcacatctgttcttgctttatgtattacactttatgcatttcagataaatcattaactagcaaacatttagaatgctgactgttatgtttggaagaactcctggaagttttatttactctattttcccttttatggctttccactgacacacccaggttggcggtgcgctacggggctgcatttacccagaaattttcttcctctatagccccacacattactacttttctggtacatgggaaacaggtaacatgcacagaatttgaaaacccaagctgcttgaaatgtgtgggcttatttgcactctgaaggttaaatatgtcttttggtcttatagtgtgtgggtgaaagcttctctagaagtaggaagtgtttgtttcactaactttattagttattgacttaattttcttttagtcatctatgttgaaattaaggaatataaatgctttttataagtcagcttctgtggatatcctgaaatacatgaagattgcagccagtttcaaacctacatttttatttctctatctaaaagttccacgagaatttttacttttgagggaaaaaaattgtcttatgtattgcatgtgctgtactttaaaaaaaaaaaatctgttctccctaggttctaagactttttcagtaatataaaaatagcagtgtgaattccttcccccaacattatggctttatcagtaaaaagaaatactggtatttcattgtagcactttctaaaattcagtactaagtgaatcctctaatccagagatttggttatctaggcaccaaaagaaacatgatttaaagtggttatagaaataggtcacatgtactagtgacagatttagtaatgaacttgttaatgcaaaatcagaataccctcttaatccct

SEQ ID NO: 83090 - DNA, 1016 bp, Homo sapiens
tccaggtcgtttgatcctgaacctgggtccagagtctccattgaacctgcctggcttctctggctttggtccctgacccgtctctccacagacagtgttttggtgtcttgccaacaaggattgacacccaaaggcctagaaagagttcagacactttgggtgaatagggtatcatgtattatgtacatgatgggttaggaaagtcatttttctaagttaacggttttatttaactgatgaaaaaacatttctagggatacacacaatgaaaaaaaaggtgcactttccaaacagaatttatgcaaataacttgcaaaattaggaagattccttccataggtgatccttgagcccctcatcatatagaatatcctttggatcacccatccatctgatcaaagggtgaaaacatgtcactattatggttcatatagttggctttcaatgtctgtctcttctagttacttatggttgtatccattgtactggaaagaaaccccgagctagaatttcaagacaaagtagatctagacagactggtcaaagaagcatttaatgaatttcaaaaagatcagagtcggctaaaggaaattgaaaaacaagtaagtacacagctttttttttttttttttttttgagaattttttcattgtctcaattctttaaaatatccctaatctcttttcatttactttataaaacagattcacaggtgcaaaataggatacttgaggggcagtctgcctttttcgaggaattaatgttacttttcagttaattactagtcagttcagctgtgaagttctgacaaaaaagagatctagaaagagataaatttcctttatatggttagcataaaaatgttttatcagagaggaggcatagactccagaaggctataaaattaaattctggggacaatagaatgcagtgacaggctacgttggtgctgcgtactgcctaatataggcccttccaggttctctgtttaatattttatgttcaactgtaaagag

SEQ ID NO: 83091 - DNA, 1031 bp, Homo sapiens
gtgtttcatgttcaagcttaatcaaggcagccattaatatacgaactgagcatgctggggaggtgaatgccacatccttggcggggttatggacctcttgcatgtcatagccaatctaacggtaatggtaaatgcttttaatcaagcaggaaaaagttctcatgattatgccaactataatagtaatcctcactgagtgataaaaatagtttatgaattgaaaatttgccgctgcatgttgtatgatcaaatagttcatcaaaatgaatctttgctctttggactgaattcttaccatactgccattaaaataaatttgccaactagtaatgcatactggaaatcaaaagatactgaaagaatggtgaacttctcttagtggtattgtcatgctaaaagatgttaatatacatcataaaagcaaagtcagccagctgatattttggttctcaaaaactgcattattaataatattttagtatacagagctattctacagtttttacattgtaaacatgactgtggttttgtatttgctaaatataggggttggactaaaatataataaatctgtaccttatcaaacattttctttgagctcctgctaaaaataggacatgtctatgattgttcaaaaatatgttaaatttaggctcagcacagtagctcacacctgaaatcttagcacttcgggaggctgaggcaggtggatcacttgaggttaggagttcaagaccagcccagccaacatggtgaaaaccctgtctctactaaaaatacaaaaattagccaggcatgatggtgcatgcctttaaacccagctactgaggaggctgaggcatgagaattgcttgaaccaggagacggaggttgcagtgagctgaaatcctgccactgcacaccagcctgggtgacagagcgagactccatctcaaaaaaaaaaaaaaaaaagaaaaagaaaaaaatatgttaaatttaaggactgttaacctacgttctactagtaaaaacaacattaagggtcattaaat

SEQ ID NO: 83092 - DNA, 1118 bp, Homo sapiens
tgctcacattttcgctggtccccctttctggaactttcctagcttctcacctctgctccttcactcataacatttcttaggccccaggcttactactatattgcccagtaccctcgccctattggtgtgactttgggtgagagctttaacctctatttcttttattctgcaatttggaaactgacagcatccatctcttaggcaagttatgaagaataaattgaataatgtgtatattccactttgcaccatgcatgatggatgactttgctgtccagtactgtgtagtgcatgtggctcgtcaaattgagatgatagaattgccagttgtcctggtttgctgcgattgtctgttttagcattgaaagtcctatgttttagcccctccgtcccagggaaaccaggaggttggtcaccctaaatgtgctgtaagtgtacaatacacgccagattttgaaaaaactttttgattaatacattttatatggattaaatgttggaaaggtaatattttgagtacttggggttaataaaatgttaagatttctgctgtttttactttataatgtggccactaaaattttatatgtggtccacattatatttttattggacaatgctggtatatcgtatgctctcaacaagtatcttcaaactcacctgccaagcacccgcctcctattcctaactctactggaggtgttgtgttttcagtttagagcttctcctttcctggcagttatcccttatttttaaattaggggttcctgactctgaatggatttccggagggttggacatgtcttatttttcctcaaaatcttgtgactatgtacatttttttaggagaatcctttgctttcttcagattctcaaaggagactggtacctccccccacccccgttaaaagaaagcaaaacaaagcaacaaagaccaacaaaccttccacagcagcccagtattcatttatattgtaaaagccttgattttctcaagcatggaaaatattttggctcccatctgacctgctttggttattgcctgagtggaattggtcacattccaagtttcagtactctttgataaattgtattggattctagtttcccaacatacg

SEQ ID NO: 83093 - DNA, 1028 bp, Homo sapiens
atatatgtcacttgactatccctgtgagcttaaaagggacacacactagtaaggccatatttccaggttagaattagatataatgttttctcctgcagtttgcaggtatctgccttattttgttttgtaagtaccttaagtacttagaaaatatgagaatactttgtagagaaagcagagcagaagggaagaacccctccctggtgggactccagaaggggcagttaagtaggctggggagagagataggagtggtgatcattacattacaaaacaaaataaacgttttattatctggatactttaaaactttttcagatttgtttaaacatgcatgatatatctaaccaagaaagagagctgtgtttgatttttctgttatggaatttttctgtgttcttgaacatgtttgctgtgtattctttctccacagactcaaaaaaatgcctcagtcaatgccagaatatgctctgactagaaattatttggaacttatggtagaacttccttggaacaaaagtacaactggtaagccaaaaaataacacctgttttgcagtctaattgtcactcagaaagctcatgcaatttttcatttcaaatttactccactgattgtcgtactgttaaattatttttgttttcaatttttttgaaaccattttattgaagtgtgattgtcgtacaaaaagctgtatataattaatgaatacatctcagtgagtttcagaataagtatacacccatgaaaccatcacaatcttcatagccataaacatatccgtcacctccaaagtttcctcctacctcttttgtgattattattatcatcattattattggcttttttcttttggtgctggtggtaagaacattgaacataaggtctaatgttaaattaacaatattgttagcgataggcacttttctttatagtagatctctagaacttatttatcttgcataagtgaaactttgttccctttaaccatcacctcccatttccttctcctctcatcctgtggcaac

SEQ ID NO: 83094 - DNA, 1019 bp, Homo sapiens
aaaataggtttgtaaatgcacgcacacagcctggaattacacatactgaagtaaaggtagtggtgatctcttgggggcatgagattatgggtaactgttttcttcttttctgttagtgttatcaggttttctggaatgaacatatgttactactgaaataaggaaaaaaatcacccttttttttaaaaaacaaatgccagcacacatacaatatgtagaaattaagaagtaatgcataactagaaaatcattccaaataaaatgatatgaacattgagtttttaattgtgtagtgcctactatctctggggacactaagtcttaagcagagaaaccaaaccaaatgcagatctcctagaatcctcatctagaaagatccaagtctgttcttatcacatctattttcaaaaaaaatattttgccctcgtcatgcttgaaaggagttctttaacttaaaaattttatgtgttctaattatttctgttgggttatttgacagaccgcctggacattagggcagcccggattcttctggataatgaccattacgccatggaaaaattgaagaaaagagtactggaatacttggctgtcagacagctcaaaaataacctgaagggcccaatcctatgctttgttggccctcctggagttggtaaaacaagtgtgggaagatcagtggccaagactctaggtcgagagttccacaggattgcacttggaggagtatgtgatcagtctgacattcgaggacacaggtagaacacttctctcagtttaatctctgattcctctttctttttaattgactagagctccctaaaagcttaggcatagcatacatctattttccttaaagggctatgtgtggtaccttgaatgaaaaggacatttacaagaagtatcagctagcctagagcctctaagcgtaatgataaacccaaactaaccttgatttgtatgacagtggatactactctgtgcctcaactttcctggaatctcatttgaatgtaatta

SEQ ID NO: 83095 - DNA, 1055 bp, Homo sapiens
cactagatgatagttttaactattttccatacataaacattttccgtacctaaacagtttgtttgttcatttgtttgttagtttgtgttggattttcactctgtcgcccacgctggagtgcagtggcgtgatctcagcccacggcaacttctgcctccaaagttcaagcaattctcatgcctcagcctcccgagtagctggagctacaggcatgtgccaccataccaggctaatttttgtatttttttttagtagagacagagtttcaccatgttggctaggctggtctcaaacacctgacctcaactgatctgcctgcttcggcctcccaaagtacttggattacaggtgtgagccaccgtgcccggcctgtgaacagtttttagatgattagtagatagtaagaccactcttaaccaattcaatactgaacataattagttttccttgattacttgaaagtacttgttttttaatgatattaaacattattaagtcttgtgaaaatgtgaaattagagctttctgggaattctagatagagtttccagtaataattaatgtttaacaaaattcagaattatgtatgaggcctagaattaagactagcttggggctgggcgtggtagcgcacgtctgtaatccctgcactttgggaggccaaggcaggtggattgcttgaggccaggagtttgagaccaatctggccaacatggtgaaaccccatctctactaaaattgcaaaaattagccaggtggggtggtacgcacctgtaatcccagctactcaggaggcaaagattgtagtgagctgagaccatgccactgcacctcaaccttggtgacaaaatgagactctgtctcaaacaaaacaaaacaaaacaaaacaaaaaactaactttggatagttttgaaaataagtaaaacttcagaaagaatcagaaggtaggaaaaactgcttatatagttaaattgtggttggtgagtatattagtcattttattgcctttttgaatatgtatggcaaccctatttatagtaattgggcgtaagtga

SEQ ID NO: 83096 - DNA, 1047 bp, Homo sapiens
cactcttcatccatgctttcagggctaccttgaattctttagcttttgtagacttttaggacccacatcaacttgttgttctctatctctagccccacaaatgttgaggtttctgctttctctagcctgttaagtgttggttactttttgtccatgtactttttgtttcccaaaattttgtcagcatctcttgtcagctgatgtcctctttgtcattatttttgttcttgtgggtttatatattttttatttcttaattgtcattttaatactattcagacaggaagtaaaaacgcatgctcagactaccatttatagaaatttgaatttaaaaaaaatgtcctaggtgagggagtacctatcaagggtggaaatcacttgtgtagatgacagtgacagtggagaactgaagtctataaaagttaagacctagatctagatgctcctgaatttcccctttttattcttaacaacacttcctttgtgctgtgatctcaagcaactgagcctaggtctttttattcttgtctgatataacagaaggtagaggatgaaataaatgagtttattaggtaacacattttgaaaattgtgtttaagatttagatgatatattttagaacttctaataaattcagaggaattcaatgtcaaaggaaacttttgtatagttatacattgcttaatgtttatacatacatccatgtagcatacttctaataatatctttaattatactagttattttaaaataacccacaaatactcaaggaattgttcagtttgtgaactgtgtgagaactacagtttttcatggtaacatttatttgtgtggtttttaaaagtgatcacaggacatctcctaaaagataatatagttaagcagatttgcttagttaagatattaccaagagcatctagatgaataattagaataaatacttgtctcttggagacgattttgggtgtagtctttactagaggcataggtatggactccaagttggctctaatattatgagatacccttgagtaaataacagccat

SEQ ID NO: 83097 - DNA, 1095 bp, Homo sapiens
taggttgggacaaaaagtgtctttgagagtcagtagtcctaatactgtctgtgaatgctgtggacttaggcagtttgtttaagcttgtttaaactgggtctctctttccttagatataaatggagggttagactggatctttaagcttctgcccagcatttaatgttctgtttattgtggttctagcctgtgcttcttgaattcctgattcttcctgaattctgctaagcatcagaatgcagtctatacattctcaacagcttcccaaagacatgatattagtataacagaaacagtagtagtcctttcttggaaaattatccccatttctggaccctattttattgctggctgcaattaacaggttcttgtatgtcccatccttccctcctccatccctaacccacaggcattaaaaacctgctgtttgtgaaaatgaacacttctttgataatctggaagaaggggttcctgttaccagaaaatttagctcttgaactcctgggactgggcttgaaagcatagtactattatgcttcagattaagcagggtatagagaataaggagtgatcacaaaaattctgtcttgaataaagatgatgatagatatcccagggccctctgtggttagatagtctccatttctaccacattctgaggaattgtgggtgttgcgctttttatgtttctggcctccctgctacttgccattggttggatcactggccaagagctaccgagaactaccattttgcttcaagattttttcaaacagcaaggaacttttttattttttaacagagagctactgaagtttcctgagttattacaacccccttatccttcctccttacttcccctttcaataattccctttcctccctcttcccacagcagttctttggctattgggcctgttttcattgaaatcatcttcctgtggcagagggaaaatgaatagagaagaacagttgactgtgtccaagtgatagctgcttgcttaggaaaagcctggtccttccccagaggagtctgtccctataggacttccctccataatagctgtgcttccatcagctctagaggatggctta

SEQ ID NO: 83098 - DNA, 1036 bp, Homo sapiens
caggaggctgccctttggggaaggaatagccttattcgaccttctttttgggacgcaggttgttggtgtggccgcacttcttgcagcagttgactgcatgggggcgcaggcgagcacagctcttgtggcacatcatcttcttgcagttgtatttctgggcaaggtggcagagggaaggctccgtaatgccacctcacaggcacagcatcaggcgcagggtggactctttctggatgttgtagtctaagagtgtgtggccatccttcagctgtttgccctcaaatatcagacactgctggtcaggtaagatgccctacctgtcttgaattttggctttgacattctcagtggcatcactgggctcgacctcaagggtgatggtctggcctgtgagggtcttcacaaagatccacatctcagcgtctgcagcttggccagtctcactccattctcatttttttgttggtactcactggtgtactcaggtggttgcttaacagagaagtaaaattggatgtttccagaggctgaattttgccttaagatggaaactttatttctatatggtattgtgttttagtgcttattgtgataatatgacttgccaggagccagagatcccagccatatcctcttttagaaccccagtctcattttattctctaccattcagttccattttaaggacaatgcctctgactcttcttcttagaaaaattacatattcttatgtgtactttaaggagggatttctttgtgctatcaagggcttgggggaagaggcggggaatcaacctgatacaggtctgaaaacatgagcatagcttagcttcagactgtgctagtgcagacccagatgacatctttcaggaacctattgttccattgttaatagttcctttagggttaaacccacatgcaggtctagccctattttcatctttctctcctaactgtacctcacagcagaaggcctgggtgccaagaccgagttgaagcagctgatggaaatagatgttagactataactgctaag

SEQ ID NO: 83099 - DNA, 1387 bp, Homo sapiens
gagactctgtctcaaaaaaacaaaaaacaaaaacaagaagaatcttactactgcttcttcggggatacttttggtattattttgacaaatgaattgtgaggattcaaatataagaaagggattattcttggtagagttaacaaaattgtaccaaatgactttttgtgttaaacacgattcattcacccaaccctagaaaggagcctgaatgaagtctaatttgggtgacagattcccacacaaattagatgtatgtcattcaggtatagagaattgattttatattagaaaaaacaaaccttgtaaacagttttataaataactgtttcatgattttccttaagtagtactgatctcttacatatagatcgtttgtgtctttcgcctcaagttagtatagaacagggcaagtggcaaagctcgaggaaagtgtgacctgaggtacatgctgtcagcttgatgctggagtttggcctctcaaatctctaacctgttaaatgaagttaattaggattaattttttttaatgtatgtttactactgaaaataagtgctcggccagacgcagaggctcacgcctgtaatcccagcactttgggaggccgaggctggcagatcacctgaagtcaggagtttgagaccagcctggccaacatggcgaaacactgtctctattaaaaatacaaaaattagctgggtgtggtgatacatgcctgtaatcccagctactcggagcctgaggcaggagaactgcttgaacccaggaggcggaggttgcattgagccaagattgtgccattgcactccagcccaggcgacagagtgagactcatgtctcaaaaaaaaaaaaaaaaaaaagaggaaaagaagtgcccaatagcttcaatggatgccacataattttggaataatttttacaatcaggaatttcattgtccaagccccttagaaaaagaagcaacccagccccatacccagaaagtcaagctgtatagtgctgttccttagtgagacggtcaactctcagtagaaaaatctcctgtttggattagtgcttagttgacctattgtgttcagttcctctaacatgagtaacttctattggataggaaattttgaagctcaaagggtgtaatgagagttaacattactgattttccactgttactttttagtgttttcataacttggatgtgttaacctatggcccatcaactatgctcctagtctcaggtgacaacatgttcaatttaagatggcaggcagtacagtggacctctctcatcccatgggaaggaacccaggatgtttattatgtagtattgtatagtctctgcagcagtaatagagaaagttaaaggtaagcggtggagaagtaaaatctaga

SEQ ID NO: 83100 - DNA, 1054 bp, Homo sapiens
agtcaatgaaaatttgggcttcacccttatcccaccactgattctggataattttggataagagtttatttctgttatccattttcagaaaagatgattgtgtagtctcttccttacataaatatcttttgaactggttataatgtgcttgtggagctttttttttttgagacggagttttactcttgtcacccaggctggagtgcagtggcgtgatctcggctcactgcaacctcggcctcctgggtttaagcgattctccttcctcagcctccagagtagctgggactacaggcacgtgccaccatgcccggccaatttttatatttttagtagagacggggtttcaccatgttggccaagatgttctcaatctcctgaccttgtgatccgcctgcctcccaagtgctgggattataggcgtgagccaccgcgcccggccttgcgtagccatttttatggtgaaagagaacaacagttcaaccacagatttatattcaagtctgttcattagcatgtgtgcttggaaaaagtgacttttattccatatttaatgttgtatggtgaaagggttacattataatatgtaaaagggctcccaatatctttcaaaataaacgtggctggacgctgtggctcatacctgtaatcccagcactttgagaggccaaggtgggcggatcacttaaggtcaggagttcgagaccaacatggtgaaaccctgtctctactaaaagtacaaaaaagccaggcatgatggcacaccctattagggaagctgaggcagaagaatcccttgaacccaggaagcggaggttgcagtgagccaagatcgtatcactgcactccagcctgggtgacggactgagactcttggctcaaaaaacaaaacatattgggtatattcgtggaggtatatcattttgtagttttactattaagtgttttgattataaagttcatgtagactttggaaattataaaactgcacatacaattgagatgtgtaatcttaactgtccactcaggtgacatttttatttttccagttttt

SEQ ID NO: 83101 - DNA, 1906 bp, Homo sapiens
aaaagagagcttatccagtgtacagatcctaataaagtgcacattcagtgtaattttatttttttaatatcttttttaatcctatttttcttcctcttttgctcagtaaattttgtatgaaactttaaaaggacttatggcatgtaaacattatttataaagtaagtcatggttataattatttttctcctgcctccttatgtatttatttcagaaatgagccgtcagactgctacagcattacctaccggtacctcgaagtgtccaccatcccagagggtgcctgccctgactggcacaactgcatccaacaatgacttggcgagtctttttgagtgtccagtctgctttgactatgtgttaccgcccattcttcaatgtcagagtggccatcttgtttgtagcaactgtcgcccaaagctcacatgttgtccaacttgccggggccctttgggatccattcgcaacttggctatggagaaagtggctaattcagtacttttcccctgtaaatatgcgtcttctggatgtgaaataactctgccacacacagaaaaagcagaccatgaagagctctgtgagtttaggccttattcctgtccgtgccctggtgcttcctgtaaatggcaaggctctctggatgctgtaatgccccatctgatgcatcagcataagtccattacaaccctacagggagaggatatagtttttcttgctacagacattaatcttcctggtgctgttgactgggtgatgatgcagtcctgttttggctttcacttcatgttagtcttagagaaacaggaaaaatacgatggtcaccagcagttcttcgcaatcgtacagctgataggaacacgcaagcaagctgaaaattttgcttaccgacttgagctaaatggtcataggcgacgattgacttgggaagcgactcctcgatctattcatgaaggaattgcaacagccattatgaatagcgactgtctagtctttgacaccagcattgcacagctttttgcagaaaatggcaatttaggcatcaatgtaactatttccatgtgttgaaatggcaatcaaacattttctggccagtgtttaaaacttcagtttcacagaaaataaggcacccatctgtctgccaacctaaaactctttcggtaggtggaagctagacacatgaaggtaaataaaaagaaaggctgttaaatacaggaaacagttgcatgtagtaacactaatatatttaaaaataagtcaacagtaaaccactgaaaaaatatatgtatatacacccaagatgggcatcttttgtattaagaaaggaagcattgtaaaataattctgagttttgtgtttgttgtagattgattgtattgttgaaaaagtttgtttttgcgtgggagtgtgtgcctgcgtgggtgtgtgcgtgtttgggtttttttcctttaactgacaagccatcttgagtggtcatgggccactgcttttccctttgtgagtcaatacatagtgctgctgtgtgctttttttgtgtgtatttgctaatttttattaattttagtttttcattaaataaatttgacttttctgtaattcaggtttttcctttttttgtaccattttaaagttagtatcttttgatatgcatatttgtttatggtaaaaaatttataacgtgttcaatattttcttttcccccattaatcagttcattagaaatattttaaaatcagctattttgtgaagccatgagttccagaaagtaaaggtgacatcggaaaaataatcaaaagctatttaaagcatctataaggtgctctctttctgtcttctacagatgagtcacacctttgagcttaatctttgaaaggttagagaataaattgatttttataaatactgcaaa

SEQ ID NO: 83102 - DNA, 1680 bp, Homo sapiens
atgcgtggcctgacttctcatgacgggaaaggctactccaccttctctgtactcctggaggggagtcttgttcacatgtttaccagcggccaggacaaggaagagaaaaggtattgacattaagaggatggtttgctgaggctgtgaaacttgaacgctattagtcagtggaacctgcctggcttagggaatggctgcagcagaatcgagacgtttccgaggttctcagtcatgtttcatttgggctgctgttcttttttctgtttaaatcaaacttcaggttacgtcatgacttctgcagggctgtccttggttcctactgcagggcgcctgtgtggttgggattccttttctgtttcaagatggagctgggttccacccttggagctttgagaggctttagcagttgctgtcctgtaatacctccgttcccaagaaataccgttcacatttcgcttctttttcacactttgaataggagttaaaatgtgctttctgtagtgtttggaaaatggcaaagatatattgtaatgtgagcccgaactgttgttgataaatgtataactattgctaggtcaagaaattgtgaacaacagtgttttgcttggtccgtagctatattgtgttaaatataaactgagtttactgcccttggatgtgattctttggtttgatttagtaatttgaaaggcattggttgactagactgttttttgcccaaggaaccactttgtaattgttacgctgcttactgaagtaaactggaccatgcagtaggcatacagcatacagccagggtgttttggcaatgctgagcccactgttttacaagtgacataaaatggatgtcatatgtacaaagaatctactgagagggaaactggattacaggagagctcccttatagtcctttgtcaggggacagaatacctgggtcacactgggcttcagattgagagttgattcatgttctgagtccatatgatgagacacattacgatggaattgtcacttttgttgcctctggaactttaaaatacccgtttagtgacgtggaattaatctttattttttccgtcaccctcagccctcatttaagctatcagttggtaaccacttgggtaatctaaacctaagttgcatttatttggtcacattggtaaccaacattgcttcttaaaagttccttgcaacagaatgactataattgagataaaacattaattttgaggctttaattttgtaatatggattagtggccgggcgcagtggctcatgcctgtaatcccagcactttgggaggccgaggcgggtggatcacgaggtcaggagttcgagaccagccatggtgaaaccccgtctctactaaaaatacaaaaattagtcgggcatggtggcgggcccctgtaatcccagctacttgggaggctgaggcaggagaattgcttgaacctgggaggcagaggttgcagtgagccgagatcgcgccattgcactccagcctgggcaacgagcaaaactccatctcaaaaaaaaaaaaaaaaaaaaaaaaaaaagattatggcttagtagagttactaggagtgcagtcttaggacattgactgatcttttttttcacccccaagacaaatagtggcctgccattttccagcccaggtagcttcctgggaaaagttgc

SEQ ID NO: 83103 - DNA, 1494 bp, Homo sapiens
aactcctggcctcaagtgatctgcctgcctcagcctcccaaagtgctgggattacaggcgtgagccaccgtgttcggccaggtttgcatattttggataacagttcttttttagatacgtcttttgcagatattttttctgttctctatctcaaagctggcattgcctctcttcttcacatttacattcatttccttctacctttaagagatctccttttggtctccagccttacagtcagttttcctactgcagtttaagtgagctttctaataggtgaacctgacttaaaaggctttcagtgtaaagttctaagttcttgatatggttcgtaagtacatagcctctcctgagctggcctctcttgttactcccctgccattttggactttacttgcaagcccctctcatcctattaagctctcttatctcagcctggacatcactagctgagaagctctttgtgaactctgcacattgaattggatgtcatctctgtgttcccatagcactctgctcggtcccactgtaacatatcctcctgaattataatttttctttagttgtatgcctccccagatagactgtaatctctatgacgacttggtcatccttgtgtctcaagagtttaggactctttctggaacataggtggtgctcagtaaaaagttattgagcgactgactccacactgtccttattaaactcttctagccttttcgttgtgttttgtttttaccaaggcatagtgtttcttacaaacttctctagccttattgcctgtgtttcccctttgccctacctaggccaactgggttcttttgttccttgaacactgctttagcatctctgtgcctttggtcatgattgtatttagcctctgaaatgtctatttgtgctactttgggtagattactgaacctctctaagccttagttctattagtacatgaacagttattaagtatattgctgttccctgccttcccctcgcccccccagcccccatgtcctaatgctagagtgtcagtataattaagtggctaagaggacaagcccttaagagtcagatctggatgtgtctcttggctctatcacttattagttgtgtttgtgactttaagttccatgagagcagagacactgcctactttgcatctaaaagcacattgcctaacacagcaagtgttgtaaaaagattagttgttgagtaagttacttctctaaatattaccacttaccttctagtgaggaaagaaagaaacagaattacaaattgtgaagtgtactgtaaaggagtcaaagtgctgaagagaccagtggggtggaagggagacctggtgtccaaggataaggagctcgccctttgaagggggaaggagtacatcttagatggaagatgcagccagataaaggccccatgaagtagggatgaatttggactgctctaggacctgaggagtgttgctggagcaaatgggtagtagagagagac

SEQ ID NO: 83104 - DNA, 1104 bp, Homo sapiens
tccaatgggccatcccacctccctgaaaggcaaagctgcaccagaggtgactcagcagctggtatggcacctaagatacctccacccttcaaggaaaagaattgagggcccatgacagacctgggtcaaggctgtcagtcttcagggcacagggaggctgcggaaggaagctgcctccccacttcctgcttggtgggcccgtatccagccctgttcctgcgagaggatgccaagagcatatttttttaaagaagttgaccagttctgcagaagctgtgtcaggagtgagcccatgtatgcatcagagccaccttgcacttcatttcgggaaacacagatgagttgatgttgattggaaactgtacgtggcctttttcccggctcaggttccaatcccctacacaccgaggatgccagggctgggggcattcactggggaaatggactgggcaggcagggatttgcccagaaacagagcagaagtacccacagccagtgctggagccaaaagcccagaggcttagggcttcttaaaccagccccctttcaccccctcctgcctggtggcttcagctcccagagtcacaggactccaaaccgcagactccagcctttggggctttccttccccagccccgagtccccagggagccctgcttggccccacagcctgaaacccagtctggggtcaggcctgggcaggccctgtcctcccctcctccctgcttctagcgagaagaggaggcggcggcctcccccaaaaagaatgcgcttgtctgcccgcctgtctggctcctggatcagtctaaagtttcagccaccaaaacaggcagcaggaagaagagggcctcccgcagcctgcccctagcagctgcgcacgtgggcttgctcaggggacttcccccaaaccagggtgtctctcaatgccagcaggaccctctccccttgccagcccctcaggatccctggcatgtcacacctccactctgagaagggctgggaacccttacttcttcccactgtgtggctaagggacatgaggcccagccggtgaggggtggggcccaaacccctcatcccctccggatgctgcaccttcccagc

SEQ ID NO: 83105 - DNA, 4905 bp, Homo sapiens
gacctgggagggtggtgctccctcatagagcgcattgattccctggcacgccttgaggtgatgtcagtgaaatccccgcaggctcctctgtgggtgtctcatggcaccatctccacctcagtcttgcatcctgcctttggaagccagggagcggcatcctgagcctcaaggcctgccgcaggtaccttctaaaatagctctatgattttttgtttacttataacccaactcaccaggactcacttccattcacagagatatgcagcccctactcagtgccctgccaaatgtgggcatgtttgaccccagcttcagagtccctggcacccaggcagccagcaccagccaccagcctccgacccggattcagggagccccttcaagccactggctccctcagcagccccacttcccactgctgccagccctccccagtctccagcagaacctgcccatgccagctcagagatcttctgcagaaaccaacgagctgagggaagcccttctgaagatcttccctgactcagagcaaagactgaaaatagaccagatcttggtggcccacccatacatgaaagatctaaatgcgctttctgccatggtgttggattgaagattgtgctgagcgctgagcttgcgctcagggctggctgatcaaactcaagctcacacctgtacctgatgggaatgaacataatgtgaagaaacttatttcccagtgtaaacgcagttgtacagaaaaaaaatgttttgggtataaatctgggttttcaaaaccagcttttttctatatataaattatgctgctattacagatttaacattttctgttaaaggaaagtctacattttctgcctgttcagaactgtttaatagcagttactcttgagtgtatttacctttttatgttttttaaactattttccttaaagccgaaaatattgacaaatggatatggttagcctttataaataaataaaaaaaaaagtgttgctttcttaaggaaagcaagacgtcttaaagtatattttcttgagatgagtatgtcccatcactaccatgaagtgtgctcacccttccagcctcctctgccctcacccccggagttaaagtgggtaagagttggtttgttctgcagtctttggttggagtgttgtgaaagtggacccgcggtgccactagatggcacttggtgcctagccatggtgaatgaccagggcgaagttagtctcacagaataccagggctagaagacatcgtggagcccatggagtcccaccctccttcccccttccaccctgcgcaaaaggggacggcccagtgtgcacgccgtccggccatgcccacagccacagccacagctgaggagtggccgggcaggcagcaggctccccagccagggcttgacacgcccacagtcaggggcctccacatgcctggcctggctctggaagtcacgtcttagcttctgaacaccgtagcgggttatgaggaagtttaatgaagagcccggtcactgtggccatcttgtgtccccaactgcaggagacgccctgatgtggagtttgtacagctttgccaaaaaatggttttctattctcaaaagtgacccaagccaataaatagcattagtagcttctgtggggggatcccagagcccctgtatttattttccctgtgtttgtctctagtgtcctcctaaacagcctttcctgtgagtctttctcagaattgatatcttaatattgtctgttctaggtgttgcccaaattcagtgtcagtgaagttcttttcctgggcaatcttaacatctttactcttattgtctggaccttcaaagggctttgtattttacacctgcgcccccaggctgctcacagtcggcttgctgcctgtcctgcctgtccggatcttgtctcctagtcctgaggagcggaggctgagaactcagtgctggtttgtaaatggtgaggggacttgggggcatcccagagtgctccctccaggcctgcttcttggttttgtttgatcactgcgttcttcaagggatgaatccagagccctccatgaggccaagcttgtccttcaatcatgtttcctctcagatgcgtccgtgatgcctcctaatgtggaactggttgtccattgtttgggcctatggccaagtcacccagctgtggaagcagaggtagaagacgaggccagccaggagggcgacttcagtcacagctcccatgcctcagctttgtacctgttttcaaaagcacaactgaggtgtgcgggctggagctgtcttgcagtgattctggccttctggctcatggttcagtccagcagcctggctgacccactatttctcctctgcttcagaggaaacccaggaaatgcccttactgccaggctgagtctccacccatgctggttggtgctggctaggctgagggggccaccacttttcctggctagaagctacttgacctttgatgtttgagttctgtaagtcttcgtgttctgacttactgcttcagagggattggcctgtcccctttccctttctcggctatgggaaggaaggattgctcattggttgccttcatcagttacagcatgagacggaattcatcattccttccgaaacccctgatatttaatatttaatatttaaaaacccaaattatcaaaccattaagaactcattactggttctcagcctcctccagtactagcctcagtgtggctgctgcataagtatctgtagcctgtctacctcctgcagtggggccgctcgcctcttccctgtctactgctcaggctctcccacttcgtggcatccatgtaaagtaggtggcagggcagagatgtcactctcattcaacagggaggatgtctgttgctcagagaggttgtcctgaggggctgggtgattcctgggcctacattcttcccgaggctccaggccgctgtctctggaagtaaaagagccttgtctgaccttaatgcaagcagtctgtttgaacccctgtaggctgcattcaggagacagaaggtgtctgggccatcctgggcggccggtcagcgttgctaggcaggctcggctgtctggccgggacttgggcctgggtggcttttgagaccagtgaagaagggagagccggcctcatgccgatgcggcttgtggcacggctgggatgtgagggaggactcagatctacacacagaaacccctcttctccccgccctcccccagctcctacctgcctcccacgcctcaggtgtggctgcctgtgggaccatcccccaacccctttcctcgcacctccttgtcctcacccagttcctgcagtgtctctgacccacgcctcccgcctcctggccgacttgcccaggaggtgtctctggctcacctccgtctgttcatcaccttcctccccagtgtttccacttatcttggatgttttagattgaaacagcctgattcccggaagaatcctcttcattcattgctagtgcttcccctcacctcccactctccacttcccagtttgcaaatgtggctttcgcccaccaagtgaaagcggactgagagcagcccttggggacggcccggtgcctggctgcaaggccgcgctggggctctgtcttggtgcacatggcttgaccggactttccctgcttcccaccacttccctcactcccagacctccctcattctttttgtctcttctttttgcctaaagccagtccttaacaccctattcttcctctgcaggtggcttgcagacttttccccacctttggggctcgtggtggtggagagggcagctggtgttaagaatgtaggttaccgggcatgacccggcagatgcttgcccagtagttctggaggaaggcccgggaatctgcaaatgagcgcattccccaggcagttcccatgcaggtgatccacggaccacatgttgagaaactgcagtcacccttagggccacaccgtccctctcctcgctgtcccctctctgtagtgactggccctgaccttcaggagtgcactttccactctaccaggaagccctatgacatcctcaggctccccagacctgcagcttgcatggggcccctcccttcttccacacccaccctccgtatggtcccctgctctgccctcgtgctttgctggcccctgcccgctactcccactctcagacacccaggggtggtgggccctaactggctggcccctcccagcgctgccctctgccgtccagatgctgcagtgtggccagatttaccttccagtaacatacttctagtcacccctcctcctgcgaagtgatctgcagtggctgtttgaccagaccacaaagttcacatctcctgagcttagtgtccgtggctgtccacctcccagccatacttgactgtccccaaactctccctgcagccacatgtttcccatgacctgtgggctctgcagatggacctctctccgctagagatgcccttctcccaaatggcttccctcctggaaggcccagcctgagtcctcgtctcctttccagtgcttctgccagaagcatccccatgatgttgtgaccgcacagcactttgtgtctcgctttgagcacttgccactctggctggtgctgctgccactgattgtgtactgtcttgctgccctttctagactgtgagctcctcgtgggcagggaccgcctgtgttctctgtatttcccacggcgcctagcacagtgccttgcacttgataggtgcttaataaatgtctgctcaactgaactggaggacagtgccttcttgactgcggcatctggcagcaggaccagtaagaggccgggaatccactgccctgcagtgggacagtggggtggggctggggtcactccactccct

SEQ ID NO: 83106 - DNA, 1009 bp, Homo sapiens
tttccaagctggtggtcacttactggcgaatactacttaggttcatcatgtatgtgtgagagctctccctctgaatcacgagtgcctgatggggtcattttgtatgtgtgagtgtctttttacattcactttctaaagtcatttgctttgaacatgttatgcttatattaatttccttactgcttaggaatcactgcctgggggaactgaccattactttctaccttcactgaatggaaaagccagtattcaatatttatctgaaaatgatttggtagtttaggttttctttgttgtagttggggtttgttttgtttttaggacaccttgttagtggttgtttctgttttcataattcttaggtaacagacattaactaaagattcctgtgaacctaacagggagatcatatgaccccatgactgatgtttactctttttaaaaactaaaccaggctgcacttctgtgcattcccagctggtatttgcatgggggtgtgatggggggtctaagctgagaggaagacacacagctctctcagcatttttaggcagtcacactttccagctgatcttttccatttgcaacaggaaccactgggagctgtaggtttggattcagtggtaggtggtgatgggtttctttttttacatggtggtctcttctacctaggagaccactacaatttcaactccctggtcttgtgaatcatttctcttttgagcctttgggttttatgacacagacgaggacttaattcccaaatgccatgcttttctacccacatgaagagaatggcagccattttccacacctgctgtgctcatcagtccatctcattttgcttccccacatctgaacttggaaatcccctgctgggcttcaggcccgaggcctgtgtcagagcatcaatcaggtccgcgggtcagagttaccagaaggagagtcctctgcttgctcctgctccttgagcaacctggcacggggtctgtcctgcctgccttttcac

SEQ ID NO: 83107 - DNA, 1015 bp, Homo sapiens
tcactgcacctggccctttttaaattttttctaaaaactttattgagcactaaccaaatctgatacaccgaggtaggttctggggacatgcatgattcagatgcaccttctgccctaaagaattttgagaagacgtgtgcataagtaacagaagggagttttgctgtggttgaataagagaaggttctaaacttaaccaatggaaataggaccagtttttaaaatcctcctcatggtatgaaattagtagcaagtctactagtatttggtagcctagtggtagctgtttattcttttctcccctgcatttgccctgtttattttcatctggcttatagcactaacaacaaccctggtgttttcgcctgtgttccaccaaaacaccactccattgaagatagtgtttagcttgtgacccaagctagtgaatgatagtcaaatgggtaagagatgaaaagagggcctgggcagagggatggggggcttgggaccacagcagacatatattcattcaccaaaagggccttctcattgacagtcccttgccctgcaccaggctggtatgcaagaccagatctgatgggtgagactcaggtggcatggaagagccgaaagaggataccatatgtgggtgccgggggggataggtgagaagtactagaaggcggaatggaaggacacttctgctcagctctgtgacacgggcagggaccctgcagggctcaggtcctttaacacagcagcttcattctaacaccagcagcgttggaacacacgtacaagtatgcagactaagctcttgcttggctgatacggctttttgggtttttagagaacatgcatatatgttctcattcatggtacatgaactcagaagccttactgcctatttttgttaatacttctgggcaaacattaccacttacaactcacaccagttagaaatcatttgtaaaatgttatttaataaagccaaagaactaaatcatatttattttccaaggttttctaagat

SEQ ID NO: 83108 - DNA, 1029 bp, Homo sapiens
aactgaagttagttcatatgttgtttttgccttagtatgggtcttgcttgttttttttttaattcctagtgagttagtaaaattgagtcaatagaaaaaaggttttctacagctctccaagtgaaacatttgagtgtactttcatttcttgatacatttgggaagatagcccttttctgaatgtatattcaacttattccatgaacagaacagcacttcttaacccagctccaggagctcggaatattatctttaactcctgcccggatggtctttggagaaagaattgcttctcatgatgacaggtatgaaaggccattctccttcctaaggttggagtggggtggtgaggagccagccacctgctctgctggacaggtccacacttttagaggacctgcttgatgcagtgggtttaatatttatggtcattaaggtgatatgctcagtgatatttgctacatagtttttagaaacaccacagaagaaactctttgtgttttagtaaaacatggctgaaaatctataagtaaaagcagatattgtagtctggttggtaggtgctaaaagtaatgtttgtcttgtcttagtgtggcaggcttgaaaatggtttcaaatattatctcctctcagtctacttttggtcagtgacttagcctgttattgtaatgcctgggtcctcagggtttcttctacataatagaagtgtctgaactgaccctactgtgataggagtaagctgcatttcttttctttcttttttttttttcttgagatggagtcttactctgtcaacgcagactggagtgcagtggcgcaatctcagctcactgcaacctctgcctcctgggttcaagcgattctcctgcctcagcctcccaagtagctgggattacaggcaagcaccaccatgcccggctaatttttgtatttttagtttagcaggttgcagtgagacggggtttttccatgttggccagggtggtcttgaactcctgacctcaggtgatctgcccaccttggcctccc

SEQ ID NO: 83109 - DNA, 1142 bp, Homo sapiens
tcctaagacactattaagagttctgtcccctacagtgggttccatcctaactttgtgcaactaaatgccaaaaatgtaagaatattaaaggaaactttgttcttactgtttgttgtatgtgtatgttaacttttcatggtgaaacttactgtgctttaaacagaaataaactttacttattttctttactttgtaatttctagccatggtctgaaaaagttcttttcttgtcgtggaattgcaattgcagttgaatatttttggaagcttggcaacagaaacatcactgtatttgtccctcagtggagaacaaggcgtgatcctaatgtcacaggtgaggcaaactgattttttcagatttctagtgaaatgtttaatgagttggcttataattgcaacacatgctatttagaatagagctgtgtgccataggcagcggctttaaaaataaaattgtaaatctactgcacctagcaaaacatcaattgaagagagtgccacagcatcacaaatactaggaggtaggatggaaagttaacatagttatttatacaggaagttatattaagagttcattatatatcacgttttctttttactttctaaaaaatgtctttttattaggctggatttctgactgtttagatagtatttttgaagtcacttcataaatttggccccttcaagttacgtctttttaacagtctatttaaggcttaatataaatcatttccgttaaccataaagtactctggctgacttgcaggccacacacgaaagatttgaacttattatgaatcatgaaatgttctagagaaacttcaggttgtttgtgtcataggtcatgataggaagataggtgaaggggctgtgccaggcaacttaacacatcagagggcctggaaaaataaagtagattgtggggaaggagggtcagtacaggacttgcccagcacattaaacaggaagtgaagtttagtcactagtggggcagaaatggtcaaaccacacagttcccaagtattcccaacttcccccattttgaagagcatattcatcttaacagagggtacataaggaatgaagcagatacactcattttgttatttttgcaattggatccctgaaggagtctttttttt

SEQ ID NO: 83110 - DNA, 1251 bp, Homo sapiens
tgatttacgaatctggcagcaccctgaaccaggagaggttcagagagcttcacccagcaatgagggctggcagtatttataggcagaaaagggaattgccctgcagaaacagcttgattacctacgggttggcatttgccttatccaggcatcctgtgatgaggcatttgccttatgtagaagtggtctgaacaattggcagcctgtgattggctgaagcttggctgctgtgattggctgagactcagccatttttttttacaagaatactcttaggttgccatttgttcacatactaaggttgcaggtcactatgtatggaggcacctttaggccaaatttaatttaatttaacaccattgatttttgaagaaatattcaaggtctggcattttaagtagccgcaattcaagaaacaggacacctggacatggaatgagagagaagttgccaaatcttaaaaatacttttctgaattgctgaatgtttgtgtaacttcttttttaggagttctgaaagatcagtaaatgccctgagtttttaagaatacctattaggattgaaaaataaatgttatttttgaaatatatgtttatagtatatttgtaattttttgttttgtaaattttttattaggattttcaaatacataagataagataatgaattcccaggggttcatcacccaccttcaacaattaccagctcgtgatcagtcttgtttcatcctagcccttacttcttctttccacccctattattttgaaggaaatctcagatatatggtcataaatattttaatatgtattttttaaaatataaggattcttctgctttttattatttgaatgaattatcgaagctgtgttttgctgtcaaaaagaaaatgtcatcatttcagatgttaaagtttgaagacaggcagcaaaaatatgcaatatgcttatcttcatttccaaataatactgtttattgtcatttcactttggtttttttggcagccctgttaggggaaacccagcaaatgatccgcagctgcatagcgatatctaagcaaaaatgtcacttcagtcacccacaccccaagcccggaacaagttcttcattgttacgatttcttgagccaactcgtgacacaaaatttaggtcacaattgtgagcaattctcatcctctttcacttttctatatgtggaaggattttccaaataagaaatgcaaggttaacgtagaatgagcagcgatcctgatg

SEQ ID NO: 83111 - DNA, 2430 bp, Homo sapiens
acattgcataaaatgttacaaaatacccaccttttagatttggatgcagagttttcagttcctctaaagatggtttaagcaagttatatctgttattttcaatgttttatttaaaacatgacattttgttcaaaattacaaacatgcttgtgatttttataaaatcggcctgacatttgtagttacatggtaatttattatgtgctataaggaacttttgtaaattgacctaatttcttattttctctttacaggaatatattaaaggaatctgtgaacctgaactagaagaaagagaatgttaccccaaggacatgcactgcatttttgttggggcagagagcctgtttctgaaaagcttgattcaggatacttgtgctgacctctgcattctggacattggccttcttggcatcagaggaagtgctgaggctgtggtcatggctaggagtcacattcaacaatttgtaaagctctttgaaaataaagagaacctacccagtagtcagaaagaatcagaggtgaaaagggaattcaaacaatttgttgaagcccatgcagacaattacacaatggatttgttgattttgcccacttccttgaaaaaagaacttttgacactcacacaaggtgaggagaatctctttgaaacaggagatgatgaggttattgaaatgagagattctcaacaaacagagtttacacagaatgctgccacagggctgaatatttctagagatgaaactgttttgcaggaagaggcaagaaataaagctgggactcctgtttctgagcttacaaaacaaatggacacagtcctttctagctcaccagatgtgctttttgatccaataaatggtctaaccccagatgaagaggcactttccaatgagagaatttgtcagaaaaggagattttctgattctgaagaaaggcatacgaagaagcagttttctttggaaaatgttcaggagggggagattttacacgatgctaagacattggctggaaatgtaatagctgacctatctgattcttctgctgattctgaaaatttaagtccagatataaaagaaactactgaggaaatggaatacaacatcctcgtaaacttttttaaaaccatgggctactcccaagaaattgttgaaaaggtcattaaggtgtatggaccatctactgaaccattattgctcttagaggaaattgaaaaagaaaataaaagattccaagaagacagagaattttcagctggtacagtgtatccagagaccaacaaaaccaaaaataaaggtgtttatagcagcacaaatgagcttacaactgattccactccaaagaaaacacaggctcacacacagcaaaatatggtagaaaaattttctcagttaccattcaaagtggaagctaaaccatgtacctcaaattgtagaattaatactttcagaacagtgccaatagaacagaaacatgaagtctggggttcaaaccagaactacatttgtaacacagaccctgaaactgatggcctttcaccttctgttgcctctccaagtcccaaagaagtcaattttgtttcaaggggagcttcaagtcaccagcccagagttccactttttcctgaaaatggtttacaccagcagccagaacccttgcttccaaataatatgaaatctgcctgtgaaaaacgtttaggatgttgtagttctcctcattctaagccaaattgctcaaccctttctccaccaatgccactgccccagctgttaccttcggttactgatgcaaggtcggcaggaccttctgatcatattgattcctcagttactggggttcaaaggtttcgagatactctaaaaataccctacaagctggaattaaaaaatgaaccagggagaacggatttgaaacacattgttatagatgggagcaatgttgcaattacgtaagtccattctctgcagattattttattttaaatagggctctaaatggtgtctcagaatcacatgtatatgggaactatacatacatgttgtatatagttgatctgtagccttagggtcggatggtggaggggaatgggaaccaactggttggaaaggttttgtcagtccatcttctggattcatgaactttacttcaccctgctgaacttaatttctaagggcaagagaggatagaaaattatcttttcacgttgcattgctcagtgatatgtagtatagtgacttttaagtcattaaattcttaatattgtgagtaccattatgttctaatctaaataagagaacacagcttaaagcaaaaggatttttttttatcttattatgctggagtatgcctgatctctagccaagagtgtgcagtggtaacaggtgtgatgtatttctgtggatagagcaatggcaatttcctttcaaaagtagt

SEQ ID NO: 83112 - DNA, 1052 bp, Homo sapiens
atgaccatgcagggaagtcctttcctatggggcagataagcacccttccaggaatgaacttcatagacattttagagatgaggttaaagaaaaagatggaacagacagcaaatgttgaaattatattgggggaaaatggctaataaaggcattattaatttgatagcaatcttactaatatagatggctagagacctaaaatagacctgttatagacttacagattaatgattaaaaatttgttttttttctgaggcttttgtggtacttctaattcatgtttatgctgtaggactcacgttaatgtctgaaagtcatattctccttttctcttagagataatacagaacacctcttatgaaagagtctcctaaaaaaaaaaaatagcatactaaagtgtgcatccagcattgagaactactggtctgaaccattttagaaatccctccttaatattttgagtttccttgcatgtgtagtttctcttttcccagtgacttgtggttgacttgaacatcttatgttgtgccatggtggagtgatgctccttgcagctggcaagtatgtcatacctacccccatggtagctggtcttgggctgctgtggtttttaaccgttgtgtctgccttgaatttgtttttcgctctgtttgtccattgccatttgctctcgtgtgctcttcaggtagcactcagtgctgccccttctacacttaagagtcagctgcttctgagaatatgcagcctgggtgaagctggccgagcccctttagtgtatgccaatactaaaaagtacaagatgctgagtagtggtgtgaagaaacatttccccaggtcaaacctgcatactcttgagcccctgctttggtcatttctggttttagctgtgttttgaatggtagaagttgccgggaactcctctctggatttgtgaaatgttatgatagagttgagaaaaactgagtttataaaaggtagaataatacaaattccatgtaccacataaaagaaagttaacttatatatcatgtatatcatgcccctcccccttt

SEQ ID NO: 83113 - DNA, 1051 bp, Homo sapiens
ccaagcttttcattgttcccgtgcacagaggttactgggggaacaagatcagcaagccccacaccatcccttgcaaggtgacaggccactgcagctctgtgcttgtgcgcctcatccctgcgcccaggggcactggtgtcatctcggccccggtacccaagaagctgctgctggtggctggtattgatgattgctacacctcagccaggagctgcactgccaccctgggcaactttgccaagaccacctttgatgccatctccaagacctacagctgcctgacccccgacctctggaagaagactgtgttcaccaagtctccctatgaggaattcactgaccacctcgtcaagacccacaccagagtctccatgcaaaggacccaggctgcagctgtggctgcaacataggggttttatacaagaaaaataaagtgaattatgcctgttaagaaatgttagaggttaaaggtggagatttggagttatcaccagaacagtaaaatttaggattgcagcttgaagagtctatgaaagtatagttgagggagaggaccaggaaagaattttgggaaatttaaggagcaatagagaaagaaagcaaaaaacacaaaaaaaacaaaaactgggggcactagtcaaaggtaggaagtatctcagaagagtggagaggaaagaacttgtcatggggaagttggtcatgttacatacagtccaagcagaatgaatacaaaggaggagactttgggcttggcattagtcatcattgttggcattcaacaaagtggttttggtttgaatgggggcagatgaggaaggcaagggattgccagtgaaatggggcttgggctacctttttcaaaaagtgtgaagccaggcctagtggcttacacctttaatcatagcactttgagaggctgaggcaggaggattgcttgaggccaggagtttgaggctgcagtgagctgtgatcacacctctgcactctaacctggtcagcagagcaaaaccctgtctctaaaataaaagtgtgaagatgaaaggacagaaat

SEQ ID NO: 83114 - DNA, 1090 bp, Homo sapiens
ctggcttttgaagagccaaatattcccaggtacctgaccttccagacagaggtggttgtggagcaaaggcccagaaaacatggagtgtcatggtaaaaggtgtccaggtgctcctgggaaagatgaaggctgaggtaccaaaatgccaggctaaggtcattggaccttatttaatagtcagtgaggattttgagaagcatggaatcttcctgaaacagaagaccaacagtgaaatgaacattgttgcaagttagccttgggcatgagggggtagggggtggtaaggtttttacagggacagggcagctgtgtggtggatgtagggatttaggggtcggttttaagccaggtggcaggagggatggttaagttgtttgacctattgactggtggggccaccagctcatcaacatttaaggaagacttctctggtgccagggagtgtattgacggttgccccttgacctcaagaatcacgttgcctcttaggggagacagacatggggaagatacagtaaagtgtgatacatacaacaactgcaatgtgtgcaaggtgtttctgtaacacaggaatggaagggttgctctgccagccggtttcctaggtagcagggaggtcctggcagagggaagaagctgtgtgcaatcacaggggcatggaagagggcagttgcatcacagattcctccagtggatcacaaagtgcttggggcctgctgaagaacatggattttacctgcaagtagtcagtggagagtcgtggaagagttagggggacatgagaaatttacatttccacaaatgcctcagtgtttacacctctgggctggggctgctcagtgtggtctgttgctggttttcaatagtaagagtacagaaattgaaaataagggttgagtaacttttatgcaatttggcattaatacaggggctagagaggcaatgtctaagagtgagaagtccttataagagggcattgtccatagggggcccagagagaggggaaagaagtcagtgctggaagacatcttgggagcaaaggattgtgaggattgaatttcagagacaaaagggaggtactggctagctg

SEQ ID NO: 83115 - DNA, 1013 bp, Homo sapiens
tgttggagtggattgcaccactgacccctcctagcccccttcctctccattccaaacccctctctctttaaaaacccctgcattccccccacaaattgaagggtggaaatttttggaaagaatctcacccactccttcccttattagcatggataataaaatctccttatcacactttgctcttgttattctgtcatttttgtaccagtggcgagcagacggaccctttgctggttacatgactctgctgactggccttatgtgctatgccataatgacagcagcagcaagcttggatatgcagccagccccttcttctgcccttgtgcaaaggtaagcaagaggagagcacatggtctcatgaccaaccccttagtcttggaccttccttgccgtaggatgctgtcaaaaccagacagatgtgcacgtggaatgttgctcggcacacccaaccaatcagatcagcagacaaagatgctctctggccagcagtgtcctgggttccgtgtttttggtacaatcacatgtagggccttcgagtaagaaacggttatatcatcattcttcaactacacacacaaggttttaataaatttgcaaactgttgaacgtctctcatcccctgtcaacaatccaagccaccatcatctctctgacaaccatgaggtctccccatagcctttttggcctgtctgtaagtgtcaagagctacaaccagtaggagattcggataaattatttacaaatatcgatgctgcagccagagtgatcttctcaaattgcaaatctcatctgtcagaccattacttaggatcctccaagagctttccctcagggtcagaataaaatccaaagcccttgccttgagtggcagcccttaccagacctgtctcctgcctgccccacctctgctcctctctgcactgggcccagctcacaccatggcagggcatttgcactcactgttccttcctcctgtttccttttttaaattattattttatttatttatt

SEQ ID NO: 83116 - DNA, 1118 bp, Homo sapiens
aaaggggttctccaaaggaaaattagggtaggaatgctgagtaagcagaacaaacagatgtctactttagtccttcccaaagggtgagctgcaatacattgcagactatcagaatggtgatgaacacggatgcagtagccaagaaaatagatgtgtgtttgtcgtggtctttttcagtcttcaagatctcagttaaacatgaagtcaaccactcactatgatgttatttgaggtttagctttgaagtggaaatgtaccacaaatagtagagccagataaatacaaataaataattttaacagtccattctaaaagatttctttggtaatattctgttggaattgatttctatcttttcatttgttaggttcctggaaagtgaaaatttcatttctttgtggacaggtacctaaaatgtctcattattcatcaattaatgaaaaacaaatgaaaatttgagagagatattctgaagaataaaaggatcaagttgggtcatttctaaaatgtaagattataaggtttaacttgctaagacttttgaggggttgaattattggtaaattattatagaaccacttatctgaggcttttaaaagtgatgtgttacagagatttagggaactgcaagattgcagataaagaatttatactgtcaactgttctatactttaccttctgctttaaatgcggccttatattttgaagtcaaacatttattttctctcactgcgttctgaatttcctaccacagtgcattttgagaaatgaatataacagcagtcttcatagatgccatattcatggcaactctgtcccccgccaacaccacaccctggaaaaaaaccaactttctattgttggaatgaggtaacattttcaggaaaagggaaccattttctcacaggatatagaacaaattcaaccttttattaaatcaaaatggattctctaatgtttatacatatcatataggatttcatctctttcaatcttggttcaaaggcccagacagtaccattccctagtatttagtccatttgctcataaagcagaagagaaaagctactttgttccgaagggtgttagatttaggattccaaggttatttcaaatta

SEQ ID NO: 83117 - DNA, 1051 bp, Homo sapiens
ttgtgtacctcaatagcaatgcacacacagttggcttcacaaacatattgtacatttctttttttcatatttattcaacaaatgtatattgactacccaccgtgtgacaggtgttatttgttgacggaaccaggcatcatcagcaaacaaaactgacaaagcttcctgccctctgtggaaggcatctgaggaagagactggattttgtagcaacatgttattctcattataaactttatcattggaatactaaagccaaatcatcccccatctccttgatcaggatacccacttaatctaggcagctacacaattgtgagagcctttgtttttttctgctgaaacatccttaaaaagatacctcacaacccaagatttggcttttcttaaatacgatttttaatttttttcatttctatctagagatttaattggaaatggaaaatcatcaattttccaattaaatgtctgttccaatcaacattataccttttaggttgtcattgtcatttttaagtttaagcaactttaaggattttgaatctggctgcctgtaaattaaaggtgaaagtaatcattgtgttggattggaacattttgtcaattgagagtggtttccttgttcttagtgtatgaaaagtttatttttctaatgtagattaataaaggagataaagaaaaacaaaatgagtgatttatgtgtgtgagaaaagaaccatttcctcaaggattaaataaaattcataccttttgtttcttttgaaaagtttttaaaataaattttaatgaatgtgtcctttaaatattcctttaaaaatgtatcctattttaaaatggactctctgagagaaggaattgatacctgtgtttaaaatcaaaaatagcatgcatagagactgtttttctagttggttgaagcttttttccctctcctttacatcagtgaaccagcatcttgcccttcagaccctacagcacactcttgggctcatgaagtgtatgacacatcctccttgggggatcggccatgtcctcgctctcatgaccacat

SEQ ID NO: 83118 - DNA, 1050 bp, Homo sapiens
atttggctatcaaattacattttcttttgttaaaaaattctgtaaattagaaatgtactgaatcatttatttagcagactgaaggtgggtaatgttggctgaacaggtttaagccacagtaatttgaaaatgtaaatacataaaataatgtcatttctcttccactcaatgtttcttcaccaaataaagtccagcctgctctgaatttgttgccagtaggaacaatgttacagtgaatcatggtttaatataccttgaaaatggcacatctgttctgtgatagcttaccaattttagcctctttataaaatacgaagagtttgtcaaccagaataatctagaacctggcaattcaaataccattcaaagcaaatgttttatctaataactggaactaaatgttaggcctcatgacagttcaatatttactaaataagtttaataacagggtaagccctcagtatccagagcagagacaagcacaccatatttacacatacaaattctgcctttagccatctgaaagggccccgaactattgcagcaagcaaagagtctttgcattgtcctaaaatccatacaatactttatattttacacattttaatagctagtttaacaaataacaagtaccatgcttaattctctgcatgcattatttcaactaattattggaataatcttataaagtgggtactttcgtctcagcttacaggtgagaaaacaaaagttaaatagatcgcccagggctctgctggaacgtgttaagcagggatttcagcctgtccagtcagaccccagaagttgtgttcttaaccattagcaacacatcatcccaggcaggccctacatgagcctcataaccaattttatgctggatagtattatccctatttcacagatggcaaaactgaggtccagagactttaagtgacctacccaaaattacagtcatgagcagaggcactggaatgtagggccttgacactctacctcacgtggtcctctttcctgttttgggtagttctccactaccactactcatttctg

SEQ ID NO: 83119 - DNA, 1033 bp, Homo sapiens
cttctctgctccacactgtcttcagcaagggtttctgtatctgtgcattgaggattaaattattcacatggtcagagaagcccatcaccactgatagttattgtaggtatggaaaactaacgactaagaagggagaaaaatataccaagcagttggcttggctgaacacaagtaaagactcttacagtcactggtgtgaactgcttattatcaatgtctgattacagtgctgcatactaatgattatgcatgtcattaaatgtgtcagattaactttgttataaaatttatgacaacattaaattttattcacatgctcagccttcataatttattgcttatgtagcatggttttaacttcagaaaaacctccaagacagtgttgtcttgatgactacactgcttatccgtgagtctagttttcctgttcatttgaaatgttcacattacattcagctctgtctcaagcactgagacagagctggaatcagtgcccagcgattccacttgccgagtgattgaggctgggggattactcccctctctttgtgaattctcttgctgtgtgttattgattaattcaaccaactcttagttgaccctaaccatgcaacatgtattgtgccaggtggtgtggatttagaatatggattagaccctcattctgtcctcaaggagttcctggtctagtagagaatcacatcactttatagttgattgttcaagaaggaagcttgttcaaacatgaataaaagactgtgcatcttctgactttgtaggtgtggaataacaaagatctgttcctttattgggtttccagaaaacatctccaaagctataccagtcatcattttgtgctttcagaaatgagtaacattgtaggatagtacttattgcttgtacttagctttgtgtgctagctgagcatttgtaaatagaaggcattcacgggtaaaatgtgtttcctttagccaaatgcacaatggtagtgcctttctagaatccaagctaaagatgtcgtcacatgccacat

SEQ ID NO: 83120 - DNA, 1070 bp, Homo sapiens
ctggggaggctgaagcaggaggatcacttgagcccaggatgttgaggctgcagtgagctgtgatggtgccactgcactccagcctgggcaacagagtgagatcctgttcccaccccaccaataaattcatgcatacatacatatactcttgaggcgggaaatccccagattcagctcagatgctggggtgacagaaggtgcaaaaagagtgacagatgtccactagaactttctttcagaacaccagaaccctggttaagagcttcctttgatggtatgtccgagacttagcaggaaaagcatggcatgctcaaattgagtaacttgagaattgaataaagggaacatttacaaaggatgggcaggatgcagggaagccaccaggaacagctgcactccaaggccagtaacactggggagcttttaccaccccaggcctgaaggggcaaggagtggggcagttaccagacctggagacagacacagggttgtgtgtgtggagaggtccctggcaggagccaagactgcattagaaagacacagccagccctgggcaattcctcggtagggagtaagtgctccaattcccccttccttccctatggtcccctgctgaggcttcccacaagccccatgcggaagccagagggccagggagccccacttctcaaaatgagcagagtatgttgaagaagggcagagagtggatccggaggaacaagtagaagacaggctgcccatgaggcttcatcatatgtcaccaacatttttctattcattttattcaatatctactttggggatgtcacttcacattttaagtacctgagcccacaagatcgatgtgatcttaaagtgtccttctcctattgaatttaacaagctgctattttcccctcgtttgctattcagaatgctctatcatatggttcaacaatttgtactattaaaggttagcaaatgccagccaaaaattcatttttttccttcctgggcttgggaaaagaggatgtgacatgtgacctgcacaaacacaatgtcaagaatctccctttacaagtctccatgta

SEQ ID NO: 83121 - DNA, 1054 bp, Homo sapiens
aaaatccaagaaatcttcaccaacaggaattaatcactggcatatttgagtcagtcttttttcctatgtatataatatttttaaaactgtatggattaattcttccctttttctaaaagaaaaagcacattattgacttaaccctcccccaccttgtctatcacattaatcacagtaactctccttagtctccagaaatagacactgttctgaacttggtgtgtatgctttcagcccattttgtaaacttttacatgtatattcacatatccttagaaacacataatattgttgatgtgggaatttttaaaaaacatttatataaatgatatcacactgtatgttgttctgcaacttctttccactcgtcatttttgagctgtgcgcattttgataatttacatctagagtcattctataactattatatcctaggaacacaccacagattattcatttcttgctggtggatatttaggttttgtcagtttttcattatttcaaattatgttgcagtgaacgtccttgtacatatcccccagtgcatctgtgcaaatatttctctgtgcagataattttaagattatagaattcactcatcttcaatattactaggtccttccaaagtacctccaacttggctatgatgtagactcccaccagcagcatatgaaagcactcatttccccatacttacaccaacatctgataccgaccaacttaaacattttgcacatttgaagtaagtagcttattgtggttctattttgagtttctgtaattgctagtgacgttcaacatccttccatgttgattggccatttgaatttccttttctgtgaaatccttgaacctattatttatgcttctttgttttgagttgcttatcttactgacttgtaggagttgttcatcatttctggttaacagtcttctcttactaggcatgttgcaaatatttactccctatgtatagcttgtcttttaacctttttatgatgtattttgtcatgcagaagttttaagttttagatttaatgatggcttctaacag

SEQ ID NO: 83122 - DNA, 1006 bp, Homo sapiens
atccttttttatactatttatcatcaactcccccctccacgcccctgcccccccatcatccgcagttaggaaggaagaagccatttatgcaagctaacagtccttcaaacctcatgaaccttaattttaatccttatcagtgcctttttaaatgaataatacagtgaccttcagctttgtcctatattatgtgaggttgattcgtaaagactgctttagttttttaaattaaggcagaagctatatgtattctactcaattctagcattagtgctgtcccaagagtggcatttatgttcttttgcttctttggtataaataaatatcaaagtaggaagaccagtgtgaattctacaaggaataataaactaaaataatatggcattgattttgttcaggatgtctaagtgtgtttttatgattgtgtatttttatagctttttcacacaagtgacatgaattctgggcaattaaaaaggacatgaatttcaaggcatttaggaagagaatctgttttctaatagctgtgtcttttaccaagttgtggtttttgagaaaagcattgtcgatttcagacctccaccttcagaaactggccagttattgccattttgtattgttttacaatattattgccatgagactacattagagaactttgttttggctgctaaagtgcaatatgtggatataacaatctaataaagaagcagagaaagattcctttacactgcatgtgtattatctttttgagtttcttctgaccaagggttcttagactgtagctttgagtcttattagtgaggtctcaacccttcctactgttgagggaggcatgggccccaggagcgtgtgagccttggacagtcacagagacaattcgtttacaaatgggaggggagcccaacgtggatggctttccacatgatgaatttatgacaactcatgttgtcacaaatttcagtaaactaacagtagcagatcctatgctgctgggctaacttct

SEQ ID NO: 83123 - DNA, 1078 bp, Homo sapiens
ctaatgggtttattgtgagtattaaatgagttaatacatgcaaaacaattcacacatagtaagcatgaaataaatactaattattatcattgttacgcactaagaaaggatttttgcaactaaagtgtcaaaagaaatggagatgctaaagaattatttggctttaaaagatgaattccagtacaaaatgaggctgtttaacaaccagattccatattacaatcagaaagttccagcagagtacctcaggcttcatctggggaacatgtttaaaggtaccaataatttttgggtttttttttccaattttaataaatgaaattctcattcctttctgtctgtctctctgttagcgctattgctttatcttactctgtagtctgtatttctcttcctagtttcttttttttttagaactagttgtgaattctttattctctcacatagacatatgacagtggggaaggagggcatgtgtgtttcctaaatgttagcaagaagtctgtcttgccatctccatagagtggaaaattcagcaagtagagtctgttaatgtcattccccttcaaatcacattcaaaagtgtgcttaatgcactgtgtacattaatcagacattttgatcatgagtaatggtgatgccttcagaagtttggggtgggggtgtgggttttgtatatcttggaaggaatcctaagtccttgggtgacttcgaagcagtctgtatgggcgctcctcccacatccattgcatctttgtcagacacatggcccctaggctccactttgtccataggcatggaaaggtgaaagtgcctgggaattaatatctctggggacactctgaagcaatgactgctggttatatgggtataaatactccagctccctcaccccttggctaaagtaattccaaggcacgtactttgcagttttccagagttaccctgtgagattcaactgccatcacccactgtggtagctgacttaataatgcatcctatattgtgtggccgccttcccttccctgtctaacttctccctcactacccagactctctgtatctcccaatacaccac

SEQ ID NO: 83124 - DNA, 1017 bp, Homo sapiens
tgattttgcacaagtggcatcctttatactttgctcataaggcgatctctcaagtgtatttttttttctgaaacacaacacaaatagtctgatgaagtaaaaatgggttgcatgatgggttttgtgctcagcaaaaagaacttggacaaagcagccatgctgatgttcttatttacaaaggttgccgtctgggaaattaatctctgctgttgctcagtaattaggaaaatttaggacccctagtgctccagcatcttgcattaaaggttgtatgtcattggtgttttcatgagagtttgctggatttctgtcattaataacaggcataagcccagcaagcagtagaatatgcattgcatttaatcaatttgctatttgtattcattatgcatgtcatccgttttgagtcatgaaaaattgaaaggccattacgaatagaaagagcatcatggattacaaatgatgtaacaagagcataagcgctattaattggtcaattgtgcttgtcggtacatttaaagtgattaaggcagaaagattagaaaggacacgaatgtgcttgggaaacagaagcatagcaacacaagggctctcccaagtcctttgtgcccaaataaatgcagcaaaatccaatggcatttattccaactaattcattaaacagatattagttgagcacttaccatgtgctgagtacaaggattgtactgagtacagcagaaaacaaaataagtgaagcccttgacctcagggatttaccttccagaggggagggggaagtatgaaatgaacaaatagatatacaatataatatattgtagtagcagagaccatgaagaccaccagaagcagagaggaagccctctttggggaaatgacatttgaacagaggtttaaatgaagaaaataaaaagacagggggtccgagcacagtggctcatgcctgtaatcccagcactttgggaggctgaggtgggaaaatcacttgagcccaggagtttgagacctgggcaacat

SEQ ID NO: 83125 - DNA, 1043 bp, Homo sapiens
aagacctgacggtcaacaatcgtgcttccaaagccacctgcatattatactcccttgggggtcagctgtaatatacctgtgcctaggccccatcctaggccaatggaatcagaatctctgggcctagggctggcacacccatcttttttaagcctcaagtgctgttcatgggcagtcagggctgagaccccctgctggagtagaaggatggtgcataggtagcaaaaccacaaagcaatgggcaaaggccaagtcgcagatggcagttgcgtaagctggaagtggtgacatttctcttcagtgcataaccacagctcagaatgaatatttgtatggatcaggaggccaagtgacctggtattgagcagtagataaacgttgcatctatttatcaccacccccaaaaaacctttttaaaatggcaaataccattcattaaatgtttatttttcctgcatgaggtcaaacaaataatctcaattttctgggtgttggggattcaaacaacacccaaaatgggatgttgtatactaagtcaaataaagaattttaatagagacataatgtctttcctaaccagcaggtatgagagaagggaaaataagagaatctgcctggtaaccatcagggggaatgaattaacatgttctctaagactatgttagaaggtcagagcccagcacagtggtacatgctgtaatcctagcactttgggaggctgaggcaggaggatcacttgagcccaggagatcaaggctgcagtgagacatgatcacgccactgtactccagcctgagcaacagagcgagaccctttctgaaaaataaataaaaaataaataaataaaaggtcagaatttcatgaagtgggatggtaaagttgttgtgaaattctctccctcagataccctctgcctttgatggtgggcattaaaatgcttagactggaaaaaaaaaaagcaaatctttctgggtaattaagtaaagtttatgttattcatttgaagatcaagctttgcttctccccttgaacacaggtgaaaa

SEQ ID NO: 83126 - DNA, 1128 bp, Homo sapiens
ggtggtattttttgttcactgctgaatttccaatgtctggatgttgaattaatttctttctgcttcattcattcatctaacaaattgagcgactactatgtgacagggccctccaggttcttgggatatatcagtgaacacaacagacattctagtgggtgatagggcaatagagataattaataagtgccgtatggaaaacattagaaggcaataattgcggctgggtgcggtggctcatgcctgtaatcccagcactttgggaggctgaggtggccggatcacctgaggttaggagttcgagaccagcctgacaacacggtgaaacaccgtctctactaaaaatacaaaaaattagccaggcgtagcccagctactcgggaggctgaagcaggagaatcactcgcaccattgcactccaacttgggcaataagagcgagactccgtctcaaagaaaaaaatgccagtaattgctatgagggagtggaaagcgatcatggtaagaaggattgggtgggctgaggagaggagttctaattttaaataggggggtcaggatcagcctcactgagaaggtaagtgtgagcaaagctgtgcaggaggtcagggaatgaggtatgtagctatgcaggggtgggcgctaggaatttccagacacatagactggctagtgcaaacatcctaaggtaggagtgtgcctgctttatttgaggaccagaaataaaaggaatggctggaggccgggtgcggcggctcacgcctgtaaccccagccctttgggaggtcgaggtggacagatcatctgaggtcaggagttcaagaccaacctggccaacatggcaaaaccccgtatctaccaaaaatacaaaaattagctgggcgtgctggtacatgcctgtagtcccagctacttgggaggctgaggcaggagaatcgcttgaacccaggaggtggaggtcgcagtgagccaagatcacaccactgcactccagcctgggtgacagagtgagactccatctcgggggaaaaaaaaaaaaaaaaggaatgactggaatggaatgagtggatgatgattggacaattaaattaaacaagtgagtctgaggcttccaggggccatcttgccc

SEQ ID NO: 83127 - DNA, 1038 bp, Homo sapiens
aacccctgctgacccccctggccctctgggaggactgggccactctgagtccttaagccttgaggcctggaggtgccatctgcccttctcctaccctgcaccctgacctctgccttctgctctgtggcatggcgaatttcttctttacaaatgttattcagcaaatccacacagggtgcctgcttgaagttacagctgtgctggccccttgtcttgccatctacaccttaggggtctgaggacaagaaaggccctgctaaagctccttcatcaggggcagatgatgtgactctggccagaggtgtcccaccaggctagcgcttcatcacctgggtgaagaattaactttctcccggggcagggacagaaaagcacccgacctccctgtgcaggggtgagaaggcagagatgggcgccatttgaattcctgtctgtgccttgaaagggctccaagtttcctgagtttaaagggaaaggaatgagtttcaagttggaaaacttaatgggtgtccagcctctctacactgtcctccagcctcacgatcctggcaggggggtaacatgaaaggtgcccgtggaggacagaggcgccagctcgcccaagccccggctggggacagccccaccctcacccactttagaagcccccttggaagcccccaggtaaaacccccacttcctttatcccaagcctcttttttgaggtttgcctgcatttttgatcttaacaagtttccttttcttttttgtcatctttgccagagcttttatgcgatttccttttattttaaaaatggtggctttcaagcctcgtctcatctatgattgtttcatgtttgcaggtttctggaaggtttggagctggtccctgggtgggcaacttcccatctgctccttgctctgcttgtctgcttggaaggggcacacgaagtgacggccccttttcagggattggggcgggccttgaatcgacagcctccttttcagctcccctccagctgggttggtgcggctggagaaagaggcagggtcctcatc

SEQ ID NO: 83128 - DNA, 1036 bp, Homo sapiens
cccaggctgcagccctctccactgtcgctggcttgtttgttcagccaagacagccaacccggggaggaggagcgggcaggggctgcggcgtctgcccccctccctcctcctgccaggcgctcatttgtatgcagaagggattaggcagaatttaccgtggcctcaccctggggagctgctcgcgccctaggaatactctccgatggcggcgtgcagttggtaagattagaacagcccctctgccgccctgcacgccctggtcactctctaggccgccaacatcgaaatcattttcatttataacctttttgatcatccagcctcaaagagggcccgccttgtgtgacagcgggcaccaaaatggcccaattatttggaagaggagggagcagctgaaaacagtcagatatgagagacagggcacttgatctgggctcatagtttttttcctgccttctcccaccaatatttttacagctgttgacatatattgagttacatgtgcctgggctagatccccgtggtactgtttcaaagatctgttcaccgtaaagtgtgctgttctcaagtaaatgactgacttcaagaaagcacagtagtttaaatgttactataaatacaggagctaagacattttaattataatttttgagttatacagtgttctataagtacacgaggcatttacaaaagaatttgtgctgagcttcaagacactgtgctctcttgtggataaagaagtaactgcaggtggctaaattccgcagcccagtggctgaactcttgtttacttgtggccaagaggggtagggggaggctgcagagtctgtggaggtctcagtttgggatgttggaatcaattccacacatatttattgagttcctctctgtgcaaagtactgaactgggggctgtgggggcctccgagttgatagggcagaaatctccgctctcacgtgaatagtcccatgggagaggacagctagcaaatcaatgtgagagacgctgggatagaaaaatctgtatgggagctctg

SEQ ID NO: 83129 - DNA, 1074 bp, Homo sapiens
aggctcctccaagtgtgggccagtgacctacaccatctgcagtgtctcagagtgtgcgagaagtaccaaaggccaggcctcacctggtcctgccaaacaagaatccgtgtttttaaaagagctccaggtgatttgcatgctcagtcaagtttgagaagggctggcttggaagtcgggacacccagggcaaatgctgccggaggtagcacggtgccctccagcctggcctctgtcgaagccccacccactgctagccatacagcttggggatgtggcctgtcctggtttcatttcctcctaggcacagtcgggcctatctccctgtgctgctgaacgaggactggggcagccactcctaacacatgctctgcacttagctcacagcccgggtgttgtgaatgctggccggatgtgatgttagaggcctgaagaacctagagagtgaaggggctgcggcaagtaggaggggaaactgctgatctgagaagctagttttgcgttgggcttgtttagtggagcttaaattaggagctaaatacccgccaggactccccgtggaattattacatgaaatggcagggagacggggagccagagttaatgctggtgatagcagttttttttaaatctaaaaaaaatgtgttgaaagcaagtgaaacccctggtgatcgcaaatgaattgcctaagttctcttagcatatccactttcctgagtgatgcctgggttcgcgtgaatgagccactttcttctcattacgaaggtgcagtgtggctcctgcaatgactcctggttccggctggcagtctggtatgggcccgacccctcgatccgcctgtggaagctgcatccttggtggtggcaggaggggctccatgggcagggccgggcatctgggccttctagcagtttaaatgcctccgattagcaagtcgggtgggaagaggtgctaaaaagaatccttcccacctcctccgctggcatgttttgaagggagttcagttatgagactattaaaatgttattttgataattaagcccacagctgttctgagggcagcaggggcaggcagca

SEQ ID NO: 83130 - DNA, 1046 bp, Homo sapiens
gtggccggtgtgagtgctgtggcttgggtgtgagccggggctgggaatgggggactgcccggcagtgccaaacgggagtccagctgtgcagcatgcccgggtcaggaggtgctgcccgcagccccagccaggtacgcttagggctgcaggcgcagcagggccaggttggaggagaattaggttattgcatttcttctgtaattcttcatcagggctgctgcctggatctgctgcgggaaaatcaatgtgttctgactccataatttcccaggttgccttactccaagtaccttgcgcagggaaaggtgacatctctggtcacgtctgtatggaccaaatatatatatatatatatatattcgccacttcccctttaccccatcccatctccacctcccagcacaagactcaagactcgttggaatttcacaacctttgcatgcttttgtgaaaacactcatttgtgtttgcgccaggccgctaatggcggacgccaaggtctgcggagcctacctctgttcagctctcgttatggcgaggaatgtgccgttaataatgcatctatggaactcagctgtgtgggagccaagtaattatcccactgtagcgttcccggcttcagtgtcatcacaactggggcttcattaaaagtcctaacagagacgatgttgtgtgctgcagcctgtatatatattttttcatttaaattatcagccttgctatggctcagaggtaatttgactttttgaaaccgctgagcccctgtgaattcccctccccttctccctctcgctgctccaccagctgatcagccccagaagaacaaaaggtttatctgaagctatgaagcatatattcaccagcttctggcgtctagataaaaaaaaaaatcaaagtactccattgaacatgttaatactgagcaaaatgcacacagctagacactaaacctttacagggatttgggcatttgaaaagtgatacccagatcaggtcttgagctacgtttcttcgcccagagtagagcgagtagcagaggaggaaga

SEQ ID NO: 83131 - DNA, 1058 bp, Homo sapiens
gagtgggtttgagtttcctgcctgctttgtcttttgtgtaactattctctggttgcacgtggctgactcccggctggtgtgggtgacgaggataggctttacagcgatgccctggcacacagagctgtcttattcacgttttggttcatggcttatggcccaggccagggaaaaagaattcactcctgcaagtgacttctgcaaaagaattctgtcactgtgttttaggggagcctgcattaagaagactctggggtcgaataggtcccaaactgcattttatgctttatttgttgagtagatgatgatgtggtggttgttatcaattttcctaattggctgtgttccttataatttcagctgaactgcccctcctgtttttaaaaaagctgtgttttaaaaaactcaaataatacactttccttacaagaaaaaaaatgctgataaacagaagaaagagatagaaatcacccttaatctcacctcccagggaaaactgctgttaacaatttgatgtttacctttcccaattctgtgtgttcacacatgcatagatacagttttaaaaagcattttgttgtagtttgatatttatacagaaaagtagacatatcaataaatagaaattaaaagcaactgcaaaaacctcaattacttttacaccaacctaatgtaataaccctttattgatgcattacatacagaaaagcttacttgtcataagcagcagatagcttgctgaattttcccagaccaaacccaggtaagcactacatcatgacacagtgtgacccacaccccagaagttcacctcctgcaccttcctgtcccagcccccagaggaccacaaccctgacttctaacagcaaagacagtggtgcctgtttttttttcctgtgtagaaatggaatcactgcctactcttttgcatactcatgtttggtttccagcagagttttaatgtctgtactgtttttgcacacttgtgtttggtttccaatgcagttttaatgcccatactgtttagtttccagtggagttataatgcacagactttt

SEQ ID NO: 83132 - DNA, 2000 bp, Homo sapiens
gtgggcactttattttttaaaatagaattcttacctgtgaatccctccagttgagtgctaaatatgagttgcagatctctccctattaatcagtcaggctaagctggtctgtggctgggaaggcaggaagatgctagtgagtgcgcctgggaatttaagttcaggcaggatcaggggctgtttggagggcagtttagccctggggtttctggaaagatttgaccttgattttcagcctctgtctgtagccactgaagtatgtccagggacaatgtcccagtgtgggtttaccacatgtgagctccatctggagctgggagtggcagggaaaccctaacttcttgagcccctcttttgtactgtcctcattggggaggaaaaccaacaggaggggacacaagagagacccccccacccccacctcagcagcactccctgccctcccgcctttagctgtgacgcagatcgtgctgttggggtcacccgggtgttcagggtgaaaatggccaaggtggtggggtggagaggaatttaaggaccaaaacaagaaagaggatgccaaggagttctgaaagagcctggctgggccttgtctgtgttttgggagcaactgaccaaggtccagttttgtaagaaccagcctccttccgccctcttgctctcccaagacatctgcgttgacagccctgtgtgtgcctgtcgtagctcctgagggtatgtctgtgagcctgagtggtggcctctgtgtatcatgttgttcttgctgctgttggccgtgtgtgctctaatttgtgttatatttgcgcctgtccatctgcatccccgtgagtttgtttcgagtcttctgtttatgggtttagatgtctttgtgcctgtgggtgtttttttgggctaacacattggatgcttctttctgtgctttgtgtttgtctttgagtgtgtttgtggtcttatgtgtttaatgctttgtatttggatctgtgggtttatctgtgtttttgtgtctatcttggagtgtatgtctctatattcctgtctgtgtgttgtgtgtatgttgggtgtgacagtgaacccctcttctgtatgcctgtgtttttctgtttgtgtcagtatgcacttgtgtgtgtgtgtctgtgtgagagaggtaagcattccctctgttgagagaggcctgggggcttcccagcttggaggcagctggctgtgttaccgcaagggtgtggccatctctttccaccaaactttctgatggaaggagaggagagaggaggcagggaagagattccagaggggccagaggggatggcgcatgggagggaagtgtggaatttttaataaagagagagacaactgaaccagggtctaacaccctgcacaatctggaagggaacatttactgctctgggttcttaatccagatatgtccccacttctgtttaccccccagctgaaaggcaggcagctggggggctgaggggaggggatggttctcaaggactcgctttgcactgctagtttttgagttctatcctgacttggtccatccccagtaatctaggacaacatttcctcctgttctcctgcaggggacaggaagctgcctctggggaacctgcgggttccatggggggccaggaggagcctcttacagatagagatttctgctgccttctgagcccctggcagagttcttggtcttctcttcagtagtgtgttgcctccgcggccccctctccccaaccttgtgctttcctaaataagctttactcactttgcaaaggaagtggatttcttccaggtcccacaccagcggtgctggtcttgggggcttctcggagatctaaggccattctcccttctctgtgagcaggcttggggcttgggtgtttcatgtatacagatggagaaacaaaggcacggagggcatatggcttggttgcaggcagagagtcagggtagagtttggaagttgacctgtgggaggtgctacaatcccacca

SEQ ID NO: 83133 - DNA, 1077 bp, Homo sapiens
tgagtgacaggaaccccacaggacacaggcctgcaggatatggttgtgcaggttgtctactgcacaactctaggggacaccatttacattgtggtccctggcggccctgccagagatcactgcagcaggccccagatagtgacagtgatccagaactttgggacagagaggctgcttggtgatgggctggtatcctcccatccagacccttttctcgcaccagtgtttcggaacctcctcctcccatcctccctttctccttggcatttcagggacacgtttctctgcgaaaccgaggtgccagggctccacgcgggcgctgctggggaagcttccgctcctcggtgctgatcgcccgccggcagctccgctgttaacctttggggtttgctcacaaaatagaaactctctttgtaggtcagtttgtcagtaattttggcagccgcggggccaccgagggaatgaggcttggttcccacttgtctcttgtgctcggtttggagacttttgcggagcccttccctgggaggaacactcacccctgccggaaacaagagccggttttctctgacctggttttgaatcggcaggagcaattcctgcatgctggaaacgcatggctgctgagaaggaatttggtccacacccagcctgtgccctgggcctgcggctggagcccaggcacttgttttcctgggcagaaggcacttggatggggctgccgggttttacacttctgctcccacattaggctacctggaggaatctgctgaaactgccccccacccgaaactcgctgagtgtgccctggtctatggacaccttcatgacctgccagctgacctggttctgtgcagcccctcctgaccttcacccccaccctcagcctgggctgtcaaggctgtggacatcttctacggtgaaactcttcgagtgcagaaaagatgaggagggcctcctcacaccctgccttccaggggctggcagcaaaactgagggtgtgggcaattaggccatgagcagcttggggaggactggttgtcagaacagccatcagggagtgctgaagaagtcagg

SEQ ID NO: 83134 - DNA, 1044 bp, Homo sapiens
caattcgagatgaaatttgggtggggacacagagctaaaccgtatcagtcagtaccatctaatgaagcttactcagcaccaggcccttctttccatatctgcaggtgttatcacacttcaccctcacaacaccctgtgagacgtgctgtcattacttccttttatccatggggagttgaggtgtcatgtccaatgttgctagtttcagggtagggacctgaactcagccagtgtgactcggggcctgcgcccttaacccctgcacctgaaggctcatcacgtttggtgggcttgagtgtttgtgataatgtggccttgcacaagatacccatggagatctgagggccagcagggccctgtctggggaagaggatccagcggcatcagcatagatggtgagaacatctgggaggagcctggagagtgaggagtgtagggtggttggtgctgaaggagcagtgtttccaggaatatcaattgggtgcagtgtgaaaagtgcactgggagggaggctgaagagggtctgtgtggctcagcaacaagtggccattgtgtcctgggtgtgagcagggtcagtggcatcagatggaaggggtcaggaggagatgggggtgggcagcagtgtcagtggactttccgggttccaggctgggagaggagggagagaagtgggagctggaaggctccaaaggtaacaggaagtatttgcatttttaagagagagagaccaaagtgtgtttctaggttcgggagagagatccagcagggaggggaagaggaaggatggaagtgagggagatgctgatggagctggtcctggaggggctggcactggagccctggcatcatcttgcttgagccggctcataagcatgttcttctcttcttgctgtcatgtcacatgggcttggtggcctggattgttgaactgactttgttgagcatcctttgatgtcatttggctgcttggcagcagctgatgcatgggcaatttccctcatacctgcttctggctgagccttactggaataacagcagacaaca

SEQ ID NO: 83135 - DNA, 1047 bp, Homo sapiens
cagtggtgtatgagagttggagtttgctccaaatttgtacagccatcaaggttttgtttaaggtttgcattgcaaaggcccttctttagtgaaggtgctctcagggcaggtatgggtcccctggtccctacctagccacagcattggccagtccccctgacccccaacctatctgacagcctctacccccagtgccttggagccagtctcctgcagccactgactcccaatcgtgtgtgtggtggggctcacctggcggagagtggggaggaggggcccaggaagagcaggtgggggctgtgggagcttggcctgacagggagattggtggcttcttaatttctccgtctgaaagccccctgctgaaggataagaaggggcactcccctgtcagtcactggctgctgagagtcctttcacggagtgtcagggaggtgaagatgaagatatctaaaaatgtttgcttttgtagcagatgttaatgcgcgttcctgtttgtaagcatgaagggcgcaagcctggctaattggactgcagtgatttctgaggtgtttctgccccctccctcctctcttctaccttgcctttagtgcagagcctggaagctatgtgtcctcaagtgcaaggcaagggggttgctcttaactagagttgtgggaaacacaaaaggagggtgtgaggggcatttgggcctgtgtatgagctgtgggccgggcttctgagggaaggcgccttggctggggggctggacaggtccccttgcccattcctgccctgcagcgctgtcagctgacctggagcccaggaacgtgggagttggaggcctggagagcaggcagcagggagtggttggttggtccccgagtgcagattccagttcactgcggcatggaaccccgggtgagccagacctccggtggctgggcagtccctctcgctctaacctgcactccctacctgcctgccctccccgagcctcatcaacccagtctaccagaggaccttgactgagcacctatggcatgttgagagttgcagcggtctctg

SEQ ID NO: 83136 - DNA, 1049 bp, Homo sapiens
ctgggcttcagaggtgggttggctgccggaagccttgcagtcgggagctttggagaactgcgagcttcggagagccgcatgcatcccggttgagctgtgccaatggtgccaggggggtcaggtggatcttcacacaatcagcgctgcgggggccagggggtgggggcggggcctaggaccaggctcagccccagctgtgagggacccctcaagaccccccaatcagcctttgttctctctttaagtcttaggatcggcctgggacagcagaggcagcttgtgtggagagccttgtagggaaaccacaggtctgtgatgtgtgtgtgtgtgtgtctgcaggtgaatgtgtgtacatgagcgtgtgcatgtatatttaagtttgtgagtgatagtgtgagtgtgtgggagtgatggtgtgaatgaatgtgtgtgatggtgggtgttgtgtgtgtatgtaggtaggcgtgtgtatgcgcatctgtgtgccagtgttcacccgtgctgggagcatggtgcgcctgccccatcccttcctgaaggtctgggctgcctctgggccaaggttacgtctgggttacgtctgtgaggctcttctgaagactcagccaggctggctggcggctggagaggcgggggcagtggtttatttcctcggggttacaagagcaaggtcagcggagccgaatctgagcttttgtttgtctctcccctgcccgcagcagcctgcggtctgtttcattcattattaagttttaaatccagccgaagagaaacttgagccttggaactcactccctgcccgggctggctctgctcggcccccgccggggaatgtctctagctttattcactgtgtcctgtgtgcctttgttttcccagaaacggcctacccttaggtttgtttagttttcctctgaggctagccgggccagcaaacgaggggggttgtgggggctgtccccagggagggtgggactggctggagtctgtacaaggattgtctcttccttgcctttgcagtggggttaagggtccgcctgggtctgagc

SEQ ID NO: 83137 - DNA, 1058 bp, Homo sapiens
gctgtttccagtcccaggtccacgaacacggccgaatgtgggctctgccgatctccaaagggagtcaagaaaaacagtgattcaaccccgaaagcattttgctttcactcgagtggagcagagcgccctttgctcaggcccttggcggtgttgcttcatgaagctcacggagatgacttcacaaggcgccaactccttgtgaagaggcgggcaggcgatgtcagggtgcgcaggaggtccacgccaggaggctggcaggagaaccttccggagctcctgagctcctcgtgcccctggggagtcccttgtaggggcagacttggggggctcttccttgctggcaggagttgatcactaggctcctctttagcaagtttgatcacagccagctctcgggtgagctgatgagcactggctttttttttttcccctttcctagtctgtttaatttctgcaataaaactcgagctcaattgcattttcaatatcagtgctaagtaaatttgtctaagggatggagctgcctggcaggctgtgtgttctgcgaggtcagaggcttcaaggggaaaggtggacgcgtccttgccctgcatgtccagcagccatgtgggggcgggggagggagtgttctgggagtctgagcctcatcccccaccccctccaccatgagctgagggacccacatccaagccatggatggctcccagtaccttagattctctgtttgtgtaatgagagcgttgggctccatctgtataatgaggggtcttgaagctcctttcagggctgatgtcctgggattgtaaatggcaggggccctctgagaattttggcaggttgagtttgctttgtttgaaaaccatcttgtgcacgggtaactgtaggtttagcttagaccctgttggttatcaatcagggctcagggaggtgacactgtgtcttgtgtcccctcaaaccattccagccattgccagcctctccttgtcctgtgaccaccttatggtgatttgggagccagtagccagtgactattttaggcattatagaacatttgtcat

SEQ ID NO: 83138 - DNA, 1034 bp, Homo sapiens
gatgcaggtgagagtttaacaaaatggagcttacgaagagcttggcactgtgtctggccacagaaagggctctgcagaggctaccagtctgaagttcaaaaagtggttcactatgacaatgccccagacctagaaagatgcaggagacacagggacaccccaaccactcaaatataaacaggtagtgccctgaagtcagggaggatgacagaggcagtcagggaaggcttccgggaggcagtgtcttgaaggatgggcatgtgttagccaggatagagtaggtttggcatgccacagtggcagtacaagcctccaaaagtgttgtccatctccctccctgcaaaggagagagagcatctgcttccctctaagccatcagatggggatgcagctctgcaccccacccacccctttccctggaggtggcaaaggggatgactgaacacttctcagaggctcctgagcatgtccagaccttagctgtaacttctgcagctaaaatgtgtggatgggaaaaatgctatccaaacatgcctaatcccaatcagaggattattttcttacagaaaagcttcacctatacttaatagttttaaattgttccgggtaccaattagacttttaattttgctgttccctccggcggctggaggatgtgtgtggtttgcgtttaatcagagttgaattcttttttttttttttttttttggtggttcttggggagggaaggagatgaggcgcctgttcagggtttccttcaggtcctcccaagacttgtgtagtgggtagaggtgctgggcagctctgagttaggggttctctgtctgggcagcaggggacgcctccagagtggggaccccaagtcccctcccacccgcctgaggttttgccgctgcagccctgcctggagaatccaatgccgcgttaaatatgtggattatccaaaaatttctgcagcaatagggtgagttattattgattcacagagcacgacaaaacatcactgcatgaattagcaaacagctgtttctaat

SEQ ID NO: 83139 - DNA, 1062 bp, Homo sapiens
tcatctcctgcccatcacgggcagggctggggcagccttcagccatgaggctcaacagcccagctacaaagtccacgacgacaattactctaggggtggaaacatgaaaatcgggaaaattggaatttcctctgtcgtgttgtagatttggatgagtttaggggtgagtggggccctcagaggggccgcctggctagcccagcacatccttgaaaatgctctggctcttctcttcctggccctcctcaggccccgggctccttgcagcgcccagcccacctcttctctcctgcctgcctctggccaggcacggtgctggggacacagcagctatgaaggtgcgccctcgtccctgcactgccctgtctggagggggagagggacagaccaagagctgcagtcactgcagtatgggccagggcagcaggacttgcgccacatctagggctgcccagcccagtttctggtggttcatgcatgtttaacccaattacatctttattttaatgggcattacaaaaacatcatactcatgatttcatcaatatcatgatttaggattacacttgggtacctgacattgttagtcctgaggtcgttgaaaggacaaggttgagtaatagtataggacacagaccctgacggtggcctctcagtgacttgagcatggcaaatcctggcaggtgcagattaggggctgtggaggaggctatgcaggctgaaagacatggcttccaagtctgacaccaccatctgtggcagttgtaccttagtcagtgttgcagggaggacccctgaacacagagcctgaagcaaggacttagtgcacatatgtggcgaggaggcactcccaggaagtaggacggaggagacagggccagggaaaggccgattttggggtgcagtgttgagcctgctgctgtagaccactgggcttgaaactgccaaaaccttcgtgtctgcagggtgccccaggaatggtcttcagaggagcccactggctccaggcccttttaggtgaaggttgcccctgggggcatcacctcccctccctttggggtc

SEQ ID NO: 83140 - DNA, 1056 bp, Homo sapiens
cgtgcatataccggcttccacgtgtgactcatctcagcctccatcacctgcacactcacctttggttctgtttttttaaaagttacaagacttaaacatgttaagccttagggttaatttaagctgccttttttcattctaaatctggcactgactagcttgctgaaaagaggcctctctatttctattacaatctcattgactgggacaagaaaataacattgagagagctaacttacagcagccaaggccaagaaattctaagttgctgataagaccctcctcccttctcctccctcctctgccctcctccctcttccctcctccctcctcctttctcctgcctcctccctcctttctgccagagtgactggatcacacaggggactcaggaactcacattttccccccttggtgagactcccagacggtgttcaaccatctgtggtcccgtgggcccagcagagggggcccaaggaggggggtttgcccatcaggagctggttgggtcagatgctcacagagatcctctgcacccaccccgagcaggctgattaattaagcaattgcatcattgattcaaggtttgtgatttggtgccagggcgctggcggctgcgttcctgagcattgcttcccctccctgggctgtgagttgcaggatccctttcctttctccagcctgattttcctccccagtgccaatcctggatgttccatcaggaaaggaacggccccctgtattccagctgcccctccgccccagtcaggaagccctgtgcctcctggggtgtcatgatgggtggggctgtgggccatgagcagacctcaggaggggccttttctgctcccagcaggccctgtgggcttcagcaggggcttggagacggagagggcagggagccctgtggtgctgatttgacatttttagctgaagacctttgttccgaccaatttccaagtagcttggggttggagtgcattctgcttttttctttttctttttttcttcttcttcttcttgttttttttttttttttttttttgaaatcctggg

SEQ ID NO: 83141 - DNA, 1011 bp, Homo sapiens
aacctccctgattattgtggctgcctcagtccgctctggctgctataacaaaatatctgagactgattgtgtgatttacatgcaacagaaatttgtcgttcacagtcctggaggctgggaagtccaaaatcaaggtgccaggagattccgtgtctggtaagggcccactcctcatagatggagacttctatgtgccctctggtgcaagggcaaaaagggactaataagctatgttggggctttttgataaggaaactgatcgcactcgtagggatggaaccctcatgacctaatcacccgccaaaagccccacttcttaataccatcatcttggttaggtttcaacatacaaattttggggggacgtaaacattcagacgatagcagtggcacttgaaaaatgctcctgaagggcggttgctgcccctggctgagagctgctgaactagatgcaccccttgttgagggcggggaccatggtctcgtttccatacctggagtggctggcatcgtacctggcgtggtgtaggaacctgataaacgtgtcttccatgaaaaaaggcagcctctcgggcactaagatgatgtcattgtgaagaacccctgcttcagggaagagtcagatttgtgtgcctctgttacaccgagcagggtggcacctgctgagaacagcagcgtcctgacctcgagggatggttgggggagacaagaggcaggaaatgatggtgcttctgaagtcagctttgtttccttggctttcccccagggctccgaagctccgttttcatatatatatatataaacggctgctgaacgtttgagttttttatgcgtttgtcttttctgggccgagctgctggaggataaggcctgtcttgttcatccttatgtcctcagggcctggtacatagtaggtgtcttgtaaatgtttgctgaaataactatttgaattccttagggaaatcagctcttcccaggagctcagtgatggatctttctgtttcactgaag

SEQ ID NO: 83142 - DNA, 1144 bp, Homo sapiens
aaggaggtaagcaccgggtgcttcgtcataccgtcataccatcatgtgtgaggtgatgaataaatacaattggctcccgcccttcggagcccatgatctcctgggagaatgagccgtctgcagggcacaggaagatgctccggctcctggggatgggatttgagaagcactgctggggcgttaagcaagagacccagagctgggcttcagaagcaactgtgcctggtgggttcactctctcctccttcctttaccacactgccgggctgacttgtctgccctgtgggaggcgtgatggagttgcagggagaaagccactggtcattgactccacacagccagatcacaggggagggatgggggccctggcagcgggggagtgagttactggaagattccctcttcgcccacattctctgggcctgcgtgtctgatcactgactttctgtctctccagtctcacggatggcatctttcacactgcttcctcgaatgcctttttatcacagtctcaacaaacaccttgcagacatatttacttaaaaattctttaaagaatacccccttggtcagggtcccaacagaaaacagatggcgcactcaaaccgggagatggaggagcatttaataaagggcccatttgcagaagcgggcaggggaagaaggggagctgtccaggagtggggcatcatcctgagaacctgccagggtgcggggaggggcatttaggccacctggagagactggctgtagggaggctgctgagggagaggggtgcagcagggcagggcagaggctgggagaataactaccccaaatctgtctcctcccccactgcagtcgctgcaggaacacagagcaggaatggaccaaggtgggggcggatctagaggggacagtggcaaatatcctttgtacccaccccactccctgggctctcttagatcctgcggatgagcaaatgctcagaagtcagattttggagatcagccccagtttatagcagtttcctgtgtgatttgtgtgggggagtgggtggtgccctgtttctcctggaccctgaggctatgtcaggtgactgtgggcttttagcttttggtggtcccttttcctgggacaagccaattgccagcactttggtctt

SEQ ID NO: 83143 - DNA, 1501 bp, Homo sapiens
aggccattctgtgtagttgttagagcagggccccacaccttctgctaagctgtgctttcttgagtccctgcagctcttagaggctgccccttcctccagcccttcaaatcaaggagattctcctgtctttcagtctcacttttaagaatggtggcatttcgggctgggcacgatggctcatgcctgtaatcccagcattttgggaggctgaggcaggcggatcacgatgtcagcagtccaagaccagcctggccaatatggtaaaaccccatgtctactaaaaatacaaaaattacccaggcgtgatggcacatgcctgtagtcccagctacttgggaggctgaggcaaaagaatcgcttgaacccgggagatggaggttgcggtgagccaagatcatgccactgcactctggcctgggtgacagagcgagaccccatctcaaaaaaggaaaataaataaataaataaaagaatggtggcacttctaggtggaaaaaggaaactgggaaactgggctatatgtgagagtctgagccagaaataagaactggtagctaattgtgctttggtccccaggaagaatcctcctcccagtggcaaacccttctctcatcagcctttgactccaggtgaaatccatggcagccctgtttgcagggtccccagctgtccttattgatgctggtggtatccaccgacactcctgcccgcttcctaacaggaccctgctaatgacctccgtggggacgcaggagctaggaatacccccaaatcctggagcattggaagggagtcagaaattccttgaaagaatgagggaaacaaccttgcctaagcgcatccctgagaaattcattaccgcctggtaaaggcatgacccagcctgggatagtttcctagatgtgtgaggagttactttcccccaggtcttcggttcttaggattactcaatgatgggataaaccaccgggaattgcgtatgtattattcaaaacagttccctacctggaatgcctccacacccttccattgtgcagtggttttcgaactgtgttcccagaggtatctctggggctatggtgtggtgtgtttggggtgtaggaagtgagtactggggcctgtcagactgagggggcactgatgtccagtccagtcggagcgattcaccttaaaagtctgttttatacctggggctttagcagatgatgttgtttgaaaattggcctctgatttaaaggtttggaactgatataaatgtgcaatcgcaggctccccctggccaggctgatgggtctgctggactctcaccactggtcactcgatagaagcccaatagagaccgtgtccgagagggccgcgctgggcgcaggctgggcagaccatggtgccctgcagatgtttctgtaggaaccagagggtctgcccacttggcctggagcagagggcctgcttctcaggaatcgtgacctggggtgtgaacaaccctccccttcatagggac

SEQ ID NO: 83144 - DNA, 1038 bp, Homo sapiens
acagcgatgatgcctggcccctgggctctgggctctccattcacaccgcctctgtttatccttggctctgagccaaactccattagcctggccactggttctggttttaggggtacagatccctcctctccctgcttttcttcccctaaccgggatcctttttttgcagccacaaggggggtgatttgcgccccagcatcctagccttgagttctgctccaggactgagagcaattaggagtgtcaggcactagcactggccacaaattagctggatttatcgagctccccacgctgcctgaccatcctccctcccctgcccaccgccggccctgctcccccatctcccccttcccagagacaaaacatgacagcaaggcgagggcagaatggtcactgcctcaggaggtcacgaggaggtaacagtgcacaattttcatggttccagggtggctttgtctgactgttcttcattactgcacgcggcgagatcagttttattaagattgtaaggcttggaggagtgacaccattaactacttgctggaaaaataaatttgattttttcttgcagggggtgtttgaggtttatttttctcccccctgcttccctcctcccctcttccctccctctcatctgccttcttttctttccactcattcctgacccactgtagttgagagctgagtgcaagtgtctgtgaggttggggaagctgccatctctctttaccttccggggattttgtggcagctgagccctgcagggagggtagagtcattcattcgtgcatgtatggaacacccataaaaaacaaggtccttgtgaccaaatgtcagcctgtcctggtcatggagctgtgtatggttctttcatgtgtttgcatctagaacaggggctggcacatagtaggtgctcagtaaatgtttgttgactgattgaagatgtggaggatttgtgtctgacatggttccaacgtttagggagctcactgctgaccagcgcctggtgggcagagacctggagtgaggtcacctg

SEQ ID NO: 83145 - DNA, 1027 bp, Homo sapiens
tcgtcgccgtcgggcctctgtctctcagctctgtgctgtagacacactggcctccgcttggttcttggagtgcacgatgctccatgcctcaggttcctttgtgcttgctgctccccatcactgtcaccatcaccgtctggttccctgcagcttggctcacgctgcttcctcagtgaggctctccctccctcaccactctggctggagctggcgtcttccagcccctgtcacgtcaattattttatttccttggatgcgctgatcactcacagcaatgattttatttctctatttatgcatcttctgtctttttccccactagagggtaaactccctgagaggatctgtccacctcattcccggttttgctctgggacagtccctggcacgttgcagggtctccgtgagtgttttgtgagtgcacagatggccttaaatgcccctgcgcctctcttctggagaggagcgtctggctgaccctgggggctctggccctcctccctgtgtctggctgacacgtcttctgtgactcagtgctggcagttggcagaaagagaggaaggtacctcccagaggagtctgcttcccagaaacacccagcccacttcccccacctgggatcccccaggacagaggaatgcagggacttcttggaaacccctgacttggcccctggagggtgatgacttgaagccccatatttaaatgttagtgacaaaacccaggaagcctcacaattttgtgcctaggaaggggtattggtggaggagaaagaggagaggaagccgccaactgagaattcccagagtaggaatttcctaaacttttccccagatcactgggtgcaaggaagcagccccgatgtgactcaccccgagcagcagcatgataggtgagcttgcacttgcctgcacaggtgtgagtgacagccagagatgggctgttcggcaaggtatgggctgacggcagccttcccttcaaggtcagccccaactctccaccacatggccctttccatctgcacgga

SEQ ID NO: 83146 - DNA, 2026 bp, Homo sapiens
cgtacccatggctggagcagaggtggtgtctgggagctgcagactgtccacggcagagtccagctgtgcgcgagccctcagcgctgaaattgccagcctcgtgcagcccagagccagcctgcggaagtgggccagccgcacctccgtacaggattagagggatgtgtaatggattaaagatcaaaaatgttaattaagaaatggtcttttctaataagatgccttcaagggcacaggcctgaaaaggaggggatttctcattttggcaacacggtttctgttgtaatgaaattggttcacagacagtggggaggacccgacgtaagcctggttttaaagacatctccatccaaattaattagcaataaaatacaaaggcccaagtgtcaggctggcaggcagacagtgcgtattggcctggctggaaggatgcgtggacttcagaggattccttctgtgtcctggtgcctgctggaatgttgtcctcgatgctgtgtttgagggcatgttcttggggtgcctggtggggtctgactctccctgggattaaaggatgaggcctaactcagtgggaacttgctgtgtgacttctgactgcgcatgcccctctctgatcattccactagtttccttttttatcagttgtggatgacagtgaatgacatctaattagatgtcagtgacaatgaacagcgctccatgggctgttggatcaaattgattcctagatcccagtgctgtggaatctcagaatggttcatatgaatcagtgtgatgatggctaagggatagtttggtctttttgtacctgatgcagcctcttggctgggaacaaagatggaggtgccttggcccacttcgagttctgctttccccggccttccctggtctccaggctttgaagtcccccatgttgtttgaatgtctcagaagaccatcacagtctaatggttaagaattgggttctggggccaggcacggtggcctgtaagccccgcactttgggaggccgatgcaggaggataacttgagggcagctgtttgagaccagcctgggcagcatagcgagaccccatctctacaaaaaaaataaaaaaattatctgtgcacgagtggcacacacctgtggtgtaggaggactgcttgagcccaggagttcaagactgcagtgagtgagctgtgtttgcaccactgcactacagcttgggcaacagagtgagaccctgcctctaaaaaaaaaaaagaaagaaagaaaagaaaaaaaaagaattgggttctggggttctggagtttgccaggtcataagtttgcatcccaggacctcctacttgggactttaaccttagtacttgacttgtgagcgtcagtttcctcatctgtaaaatgggatcagaggtcctagtttatagcacagccgggaagtgagaaaggagatagtgctgtgatgagcctggcctctgagggaccgaggctcggtctgcactgctgaagctgttgcttttattgccgagatgcagagaatctgcctgttggtttcagactgggcctcagttagaggctagcagcttccccacggctcaggctcaggctcaggcctgtagtgttttgagtttcctgggcctcccgggatctgaaactttgttttataagaagccaaaggactgggagtcccccagagcctgggacttgctctgaaggtcacaggcttggaaaaagcgtgggtgaggatgtctgaaggagggtctctcagtgctgtggcatcaggtctccctctagctgacggaagcacctgcgttttcttgcctgccacaaaccttgttttcctgggagtgatgttgggagcctgtgtgagcagggagaggagccttcctgtcacttcttgggcaggagatttcctcatccgctgtgcctggctcctcctttaggctcgctggagctgcaaaccttcacttaaaaaaacatgaaacaaccttgtcttatttaatgatatttcccttgaattgcatttggtcctatgttaatatcc

SEQ ID NO: 83147 - DNA, 1048 bp, Homo sapiens
agtgcaccacacaaccctggagttccatgcagtacagcctggagggagctgggcggaggcaatgctgcctttgctgggctgcgtctgggggctggtggggcagctgctggggtaactttcctaagtgcctggttaagtgcaattgaatgggtttctttaaggcaggatctccaagggccctcaacatgcctgtggatgctttgagtcatagagagggttcttaaaactcttgggctcagaatctgtccttcatccctttttttgactaccacctatccctaagcccggaatcttggaacacagtttgggaagctctgtttatgtgcttctcctttgaactgaacaccatgggaggcacctcactcacggtgtcccctcctccccttgcccagactgtcatttggctgtggtttattccgataggcctgggggtcttcatctggcagagcccacccacctgttgcttacttcttactggatgattgcatttactcatcttatctgagtccaatccagcctccaacaggggtgcagttagggaaactgaggctcagaatgcgtagagggctcagggcatgctcacacacatgcatacacctgcatgcacgcacgatcacccactttttgctctgcgtgtgtaggaacgttgttctgtgtctgagatctaaagtctggctggagccccctctccctctcctgcccacctccccctcctggtgggcaggactgggagcctgccccagttaggcctgccagtggccacttactccgtgtctggcgggtgccctgtggagtttccatggtgagctgtcctctgggggccctgggtgggactttccatctgggtggaaacctgacccactggcccagggctggaaggggaggaaatgccttctccaaacgtggaaagaggaagcaaagagaggtggccagcctgggattccagccacagtccctgacttctgcaaagccacagggcctgaggaccccaaggagcctgggaaagagctgcgtaggactcacccatcagggacggccacagctcaga

SEQ ID NO: 83148 - DNA, 1263 bp, Homo sapiens
cccggacaggggccaggtttgacttgcccactcttgtgtccctaggcttcaggagaaagggttagtgggatggagaagggattcacagtgcctggcatgtagttggcatttaggagatattgactgaatgaaggagccgcttgtcccccatcttacctgaattcctgtctcttttttcctgtttctgtcctcctctccactggagcccccacatttcttcttgttctttgaggaagaacaagaacttctccatgagcccatggagctgacttctcttgacagtgttgggattgctggcagggcttctccaagggccacttctgtgaaaaaatccaatctggaggtagggcatgcagtggtgaacctgtgcagcggagtgggctgaggaagggagtctggacacagttcagccgccttcctggctggtaggtgcccgctgaagccagggggcaacatggatgctggtctggacatctggatctgaccctttctgcacaggtttggtcactttgctccaggacagtttttatttttgcatttttatttagagacagggtgtcactttgtcactcatgctggaatgcagtggtgtgatcatagctcactgccacctccaactctcgggctcaaagaaggagggctcgtttacactgctggggactccctctgtccatgagatagtgggatccttccatttcaggggtatctagcccagcccactcctgggaaagcagttccgttgtgaggattgccaatgccagattgtaaggctgatctgggagccagttggtcattctacacaacacagaggtggaaagagttggctgtgattccttcaagtttaacaagcaatctgagtaactgcctggaatagccggcttgaccatccccagggctcagatgacgtgggtctggggacagccacatgatatgggtgctgctgcattgttggtgtgggactggggatagaggagaaaacggcttgctctggctgggttggcaacattggagggtgaatgagggcccagcgggagcagggatcagaccaggaggcgagtggaaccaggctagaaagggtcttgaaggccacaggccagcctgccatgaagcctccctaatttgagtcctcagcctgccaaaaatacggttcattctccctgggggtagagaaagagcctccctgggtctccagacctctcctccatagccggttgtgggacagatgatggcctttctgcgtgtgcgtgggcgggactgtagtgt

SEQ ID NO: 83149 - DNA, 1045 bp, Homo sapiens
ttttgcttttccaggcatcttcccctggtcccctccccctgggtgccttctcaagctccttggcccctcccccagccctcctgggccccctccttcctccttgacccactttagtcccctgttgctgggggaggggagcgcacagccggcggctctgatcctggcgctctcccccagcatcccctggggcgggctctggatggagcctgcaggctgagccggcccggccccagggactggcacacagcgtgctccgagtggcagccaccctgccccctccgtggacagacagttctggacagctgcccctgcccgggcccctgggaagccctgccaggaccaggctccggtttcccccaaccccagggagcagtggctccagaggtccctcctaccaccgcctccttggcgagcgtgcttcccagaggggacgcagggcagggcccagccctggcctccacccattcttcccctaaatctctgctggagaggctggagccggggtcaaatcctttgtctgctgtttatctgtgtgacttggggaactccaccaaccctctctgggcctcatctgtgcattgagggacttggagcagatagctaacctccatcaaacacgcctgtgttcccaggactgctgactacgtttagggtctctttgtattgtcacagcactgtgttcatgctgtctcaatctgtattttcatgatgaggcaactgaggcaccgagagaggaagtcacttgtttgaggttatataggctgtatgtagtggaactgcagggccttaagcccaggcaagcctgatgagatgatttttcttcgccctaacatcctccaattgatcctgaccctggggctgttaactcttcagggacaaccgcccagcccactgaggacttgggatcttcactctgtcctgctcgggtgttggctgggtccccaagcctgccgcctgccctgtgacaggctgtgcgaagccaaggccactgcccgccccagctgggaactcgctccatcctgagttccagttctgtggtccagtg

SEQ ID NO: 83150 - DNA, 1050 bp, Homo sapiens
gggggggtcctcctttctactgtgttttccccacaaggccccaggagtccagttggctcagctaggaatcttagctgtggttgtcggggtaggtggccttgctgagggattcaaaacagggccctgtcctctgggcctctctctgtctccacccaaactgctccttgggcccaggacctggcctggaagcctgcctcttcttcccatcagcattttccccggggcttaagttggaacctgtgggtgtgtgcccctcctgggccccgttttcccggctgcctgtcaactggcaccaacacccgggagcagcagctcctcttcccctccctgctgaaaccttactcccaggcaccggaccctctgcatcctctgcccccccaccacctcctatgcaggcttcctggaacctggggaccctggaggtttctggaccatatcgagttgcttgggtggttgcgtcccttttttttgggccatgccgggtgggggagctgggagagaagctgatgattgggtcaggcccagccaggggtggaggctgcccactggcccgcatctccccggagcagactgtgggcccccagccctgtctctgaggggtctgtggcctggcttcccttcctggctagggggcgtcgctgtttgccatttcctgccttcctcccttttattttgcaccaggtcccccaggaacgcctctgcggggatgtggggcccatgctcacccttcttcccggtgatgaggcctgacttggcctggcaccgccacagtcctgctgagtctgggcccaggatggggttgtctgtattcttctctccaccctcctcagaccccacctcccggctggacagctgggctcaaggccagggctgagccagggggccagcactgattgaaagtgctcctcacagaccccttggctgggggcccatggggtgtgggggctctggaagaggctgagggcctcagagaagagggagccccccaaggccagggggtgggagaaagtgaaggactgactttctggggcaagagccaaggctcagcca

SEQ ID NO: 83151 - DNA, 1050 bp, Homo sapiens
gcttaaaattccttctctggatggatccttcttgacttcattcattcactggatggatagttctgagtttgtgatgggccaaatgctagtgctgggtccttgccttcagggagcttacggcttagtagcaagacagacaataaagagtgagcagctccccggattgtaattgttcattgagagaccgctctggcttatctgacttcgacaaggtcctcccgggagggcactgcagaggaagtgacgtgaccgctggtgtaggaagatgagagggaactgcagaggacagtggctagtctcctctggctctgaactcattcactagggctgcctctgcctgccttgggcccgccccatgtggggaaggagggagaagaagaggccatagtctctgtccacgaggacatgatgggacaaaatctgggggagttttgagtgtgactgtctggaggggcaggggcaagtgctggcaggctctcctggaagggctggagcagggatgaaggaagaggcagggtcgggtactgggagagatggctgggttggggtggcattgcaggtggcctgttgatgcgtgcacacagcatggtgcatggttctttctggggagtccccagggaaagccaccggggccttgtgcttaaatgacccctaaggtttgcacaacctctgtgcactgtgtggttccagaggctctcacaggcacctccaagtttccagggagtaggttgtgggggtctggggaggggttgtccctcttcatttgccagttgaggaaaggagtttcagagacgcacacagccttgccctggctcacacagccacgtgtagcagggcctgtgtccagctggcaggcaggctgctcctttccaaggtctccatatcccatggacagggaccctgacccccaggcctcagctcgccagggccccctctgtacattactggggtgggaggtggagggagatgctccatcactgtcacccacgtccctcagcctggctttgcacactgagctgcccccatcccccagacatcaaaccaggccag

SEQ ID NO: 83152 - DNA, 1038 bp, Homo sapiens
ccttggggaggggagggggttggaggaaacatactctgactttgggcaagacagttccttctatgggcctcagtttcctagttttctatgttttcctagtttctcagttttctatgaaataggatagaactagtagggttagctacatgagttaagtttccaatcttggttagttgcacatcagtatcatcctaggcacttaaaaaataacattacctgggctccaccatagatgaaataatccagaatctctgaggatgggggtaattggaatgtgcagccagggttaggaaccattagtctaggagatagcacctagagtatataaatctgttccatgttaatagccataaggaggtctacagaatcgttgcaccagactttatttacagtcttccattggtgaacatttagttgcttccagttttttgctgttttaaatgatgatgcagggagtatcctcatttataacctttgtgttcttgtttgagtgtttctttggctggattcctagaagtgaaattgttgggtcaaagggtattcactcgaaaaatctgataaatatttccaaattgccttccacaaagtctgtaccaatttacccttcaataatagggcatgaatgcacatttctcctaatccttgcccgtatgtgatgatgttttgttttttctttttccttttttttttttttttgagacggagtcttgctctgttgccaggctggagtgcaatggcgtgatcttgcctcactgcaacctccgcctcccgggttcaagtgattctcctgcctcagcctcccgagtagctgggactagaggcacatgccagtacgcccggctaattttttatttttatttttagtggagatagggtttcaccatgttggccaggatggtctcaatctcttgaccttgtgatccacctgccttgggctcccaaagtgctggaattacaggcgtgagctacggcgcccagcctttttctctttccgttttctttttggcaatctggcaggcaaaaaatggcacattgttt

SEQ ID NO: 83153 - DNA, 1003 bp, Homo sapiens
ctggcctcaatcttctgggtcattatgtctaaaagatttgttttttttttttttttttttttttttttgagatggagtttcgctcttgatgcccaggcttgagtgcaatggcgcgaactctgctcactgcaacctctgcctcctgggttcaaatgattctcctgcctcagcctcatgagtagctgggattacaggcatgtgccaccacacgtggctaattttgtatttttagtagagacagagtttctccatttggccaggctggacttgatctcccgacctcaggtgtacacccttctcagcctcccagagtgctgggattacaggcgtgagccacagggcctcgccaatatttattaaatgaatgagtgaatgtgtgaattgttgaaggaataaatatgaatggggaataaatatgaatgggtgaacaagtgaatgaatgaatgagtgactagtgagtaaatgactcgatgagtaaatggattcataagtgatgagtggataagtgagtgggtgaactgagagggagcacaggcctttgcaggacttgggttcaccgtgagagtcagtctttgtgggcccctcccgctgccccagcctctgttcctgatgaggaggtgggagctgcaggacacccggctgggagaggctgatgccggttctccttcatactcagggtacattgtgctgtgagattgcagctgctgtttatcgagggctttgtgtcatggattgtgttaggcttgtaaaacattgcttttaaaatgataaaagcaatgtgagatttttgtactaatttaattttaattatttattttcttaaagtttggatcttgctctgctacccaggctggagtacattgatgttatcatagctcactgccacctcaaactcctgggctcaagctatcctccttccttagcctcctgagttgctgggactataggtgcgagtcaccatgtccgcctctttttttttttttttttaacagatggagttctt

SEQ ID NO: 83154 - DNA, 1025 bp, Homo sapiens
gggcgctcggctgtgagatgggagatgatcgaggaaggggggaacgatgagagcggctaagtctacggagccaaaagcccccaggcccttgtcttctcccatctcccctgatgacctctggcctgagcccagttctgctctgaaaagttcatttcctggaggcctgcgcgggaaggcgctggggccccgctcccttcctgccagccttgcgcctggctggaatggctggaactgaatctggcaaggaggatcttgagacactcgtcagttctgtcctcctgaagtccccggagggactgcccccggcccagcagagatcctccccgtcatattagaaggagaccaactgagtccaaacggagcgcccggcccgttcctactcctccttttccctgagagaagttggtcttgttcgcctcaccctggctggtctcccaatccgggacagcctggcctgctccacagaactgggggttcagagggtgttctgattgggggacagggaaaccagaagagagactccaagaagaggacgggaaagaagggtggatgtttctcttttgctgatggaagggctgtacggcttgaaataatactggatttcttttctctttccctggctcactgctcactccttcaggagccacttaagaggcgacccagaagaaaatgtggaattggaatttctggttggaaaaacagttttatttaactcaggcagttgattttgagtttgcaaagcttgcttacctagacttccaatccacttctccaaacctccttacgttagacggcgagacccagaaagcaaaaggagagcagtttgcagtgaacagatgggtgggtgtttcaaagttgcttgaaccgagttctaaaaccactctgtggatctctgagaaggactcaagaattggtcttcagcctttcatgaaatgagccttgaaatgatttttagtgagtgcctctctcaaatgtgtatgtgtgtatgtgtagcagacagttcaagcaggttggtaggagaaagg

SEQ ID NO: 83155 - DNA, 1469 bp, Homo sapiens
ccagacgcggggggcggtgcctcagctccctgagtccccacaaacctagagggtcgacctcctcgccagcttctatttttattttcttttcactggcagacacttgcacttcgtgcattgcagcctgctaattcatttcatttcattctcacagccccgcgagttgtatccctgattcctgcggtggtttccggtaactgccaaggttaggaagtgctgctcggtgttttaaagtttaaagcacaccactgcggaaaggataccccaccactcactcggagcagcttagacgcccctgtcttctagaactaggcgctgcctgggtgccacgaagatcacctgtaccccttcggagggggcaaggggaatgtctttccacacccactcgctatcagtgtcaagaagtctagtaaggccagacggcgtagccattaattaaatataagagctggaaaccggaggcgggtaattgcagtcaggtagacctcgaagactttgatgttaggcactacgtggttctaataggaagttcttggttcccagagagctaaaactcgacctgattttaattttatttgcaaccctgaaaatgttcgcttttggcgctggccgaggctgctgcttatttctcccaataccatttatgaagcttctaaaagtaaatcagcaagttttcttatatgagaaattggaattaaagagccctaattttttgtcaagtgcttaaaaagctgtcatagtaaatgaaataaacagtgcagtgatacatggaagttagtgtgtaagacctgaagcagttaagagtatctcacatgtcgtcttaatgttaggtaaatactctgacatttcgtcagacgagtaagagtggctaattagaaaattgacatctttatacctagatctcaaggcttttgagaggagacttactgaatatattcattgtttgcaacctgctactggacgctggagaagtaagttcctgaatgttattttaagggaaaactaacaattgatacttttatcctaatataggaatgatttgcttttatgtaaaatgtttgtttaaatttatttaacattgtagacaatgccttatgaagaaatttttaagaaaaggaaattataactggccttctcaaaagaacagtctatttcgtgtggttgtttttgtttttccattaaaaaacatattttttggccaggcgccgtagctcacgcctgtaatcccagcactttaggaagcccaggcaggcggatcacctaaggtcagaagttcaagactagcgtggccaacacggtgaaacgccgtctctactaaaaatacgaaattagccggtcgtggtgacgctgcctgtgatcccagctactcaggaggctgaggtgggagaatcgcttgaacccgggaggcggggattgcagtgagccgagattgcgccattgcactccagcctgggcgacaagagtaaaac

SEQ ID NO: 83156 - DNA, 1677 bp, Homo sapiens
tggaggttgcagtgacctgagaatgtgtcattgcactccagcctgggtgacaagagtgaaactctgtctcaaaaaaaaaaaaaacagggaaggtaactaaatcaagtttgatttgtgttttcattgagaccagaggcctcatcttcactcattcaatgcagagttcagtaaatatttttgatagggttgttttttgattataggaatgaatttgtaatagttcaagtatttgaaatgaatggagggaatactgctatatttatcttgctttatagaagatagcctatacatttttatttttacaacgcagcaatacagagaactaagattattagaagtcttcaaatcctcatggtttatatgataaaaaatattatatatatttatgtacaagtggggaggtaggaatcagccatcctaagatttttaacatttttatattttcatctcttcttttacaggtgtccttcttcacatcattatggaatcacccatttttcaccattagctgtatcactctaataggcttgttctttgctggaatacacaagagagtagttgcaccatcaatgtatcctttaccaaggattaaattccattctctgaagtgctttgttgatctaggtaatggttaaaagcttactcttgccgggcgtggtggctcacgcctgtaatcccagcactttgggaggctgaggtgggtggatttcctgagctcaggagtttgagaccagcctgggcaacatggtgaaaccccatctctactaaaatacaaaaaattagccaggtgtggtggtctgtgcctgtagtcccagctactcgggaggctgaggtgggagaatcgcttgaacccgggaggcagaggttgcagtgagctgaaatcacgccactgcactccagcctgggcgacagagcaagactgcgtctcaaaaaaaaaaaaaagagtacgctttgtgttttttttttgagacagagtcttgctctgtcgcccaggctggagtgcagtggcgcgatctcggattagccaggatggtctcgatctcctgaccttgtgatccgaccgcctcggcctcccaaagtgctgggattacaggcttgagccaccgcacccggcctaaaagcatactcttgaaatgagaaattttcctttgaccacatgtattcagtatagctgctcgatgtcgaacggtattagcagaatacaatatgtcttgtgatgatgtaagtatttttttggttagaaaattatagacctgcatgaaaacactgaaatttttggctttagaaaggtagacattttattagcaataaattttctctgtggaatgaatagtgagaatatacttagagcattgattctaaggtacttttacatttaacatctttggcattgagatccatcttacagtcaatgagatctgacaaattgggagagttgacaatttaatctttcttaatgacataaaatcatgatgcatcttataactgatgcatcttagattcagtgaagtacagtggttgtttgttattgaccaaaaatggctcagcggatattggttttataaactactgttatttatcaagtgatatgctatatatgttatttgtaaatatagagtcatagattaatttgtggactatggacatatgaacctattgtgtttttaaaagtagatg

SEQ ID NO: 83157 - DNA, 2146 bp, Homo sapiens
aaaaatgaaaagaggagaaaaaaagatgtatgtagtattttaaaataaagagctcagaaggaagctccacacaaaggaagctctgaaagcataactattaattgtttaatcttgactatagagaagcgttcttattccttgcacataccctttaaggtttataaataagcagtggtatttttactagaactgtgtattgaaaaaattctgtcttttcatttttgcagacaggaaaactaattttgaaacctaggcctcatgttcaatgacaatcttcactcattgttatgggacttaaaatagcctttcttcgaataagtgatacagcaaaaagccataaaggattccttttgcggttggatatgtaaaggtcatagcagcaactgacaagaagtgtgcaatatttacctggattatcttgatgatggtgactcattatcagtgctttggtacttttgattacctgtgtttcagtattagtgtcactttagtacttcagatcctgcaaatatttttgcagatgaagtatgtatgtatgttactaagttaaacttagaaacagaacctcattcagtttttataatgtatttttgcaaactactgtaaatagcaaatcaatgccaatgttaaacaaagaggaaaacgttgtgtggactttgttctcttgcaccagtatttcaggaacatctgcttgccatccccacagctctttaaaactggctattatgtgtgcctttcattcttacatttctaatcatactgcaggaaaaacattggattcagcttagactgaggaaaactctccattatgttgtaagaaattatagatgttttgagagacactttttgttaaaccagatattgaactccagcaactattgtggttatatttttagttcattgttctcatttaatgctaaatatcctttatattgctttaataattttcttttttttttttttttttttagacggagtctcgctctgttgccaggctggagggcagtggcacgatcttggctttctgcaacctctgcctcccaggttcaagcgattctcctgcttcagccttctgagtagctgggactacaggcgcatgccaccatgcccagctaatttttttgtatttttagtagagacggggtttcaccacgttggccaggatggtttcgatctcctgacctcgtgatcctcctgcctcatcctcccaaaatgctgggattacaggcataagccaccgtgcctggcctctttaataatttttaaaataccctaaaggcttgtgaatatacaagtctactgataaattatgtattgtctgggaatttgatagtcattgttttagataactggattttacgctgtggtagacaggctgtgacactagtgttgcacaggtgtaattggtcatcctatgccttcaccagaataacttgggagtggtgccagaaactagagtctacaattctcactgtttagagagtgttaatgacatactgtgtatgcataatagccgcatgtactataatagcccttaaaattaaactattgggattgctgtaaatattttaaagtactggaggtgccttttacctgtttattagattttgaaaaggtttaaattatttcatgagcaatcttttaaatttcatttaacataaagctgaaaattcaataacaggataaaaaagctttttaacaaggctgccatttaacttaaatgtgttcatcttagctttcacttgtataaaatttgattctttgaactgcagcaataaaaccctcagctcctaagaagtcttaagagggtattctatatattctgctttgttttattttctgtaaattttgtaggtaaatatgtgcattaaaaataaatactttatatataactcgtgattggactttttctttattgttaagtttgtaactctgaaaaaaatgttaaaacatattgtctgtatcagatataagctagttctagatgagatattttactttagctctgtgtccaagacagcaaattttaagtagcacgtgtaggtacccagtttattaggttatgattacttttaatatgtcttattcatcatagtctaataacacttggctgttaatcaggaaatacaggttttgtcatattgct

SEQ ID NO: 83158 - DNA, 1446 bp, Homo sapiens
ccggcttcaacgtcccaagtagctgggactacacacacacgccactatgcccagataatttttaatttttttggtggggaggacagggagtggagtgttttcctatgttgcccaagatggtctcgaacttctggcctcaagtgatcctctcgcccgggtcggcgttactattctagtccaacctcctacttacccggtaaacccacaaggctccgcccctttgccgaagctggccccgcctatgccctcttccacgcctgcgcgctccgtgcgccagttccccccaccccgccccgccccaaccccgacccggcagacgacgcgccgtgcgcctgcgcacggcttgcccatgtgtgctgcagccgtcagccggcccagctgagcagcagcaacggaccttgttaacggcgcggcagcctccaccgcctgctgttgccctcctctctcggtggtctgtccgcccagcgcacgtcaccatgggcaagagccggacgaagcgcttcaagcgacctcagttctcccctacgggcgactgtcaggccgaggcggctgcggcggcgaatgggaccggaggcgaggaggacgacgggccggcggcggagctgctggaaaaggtgaggcgagggctccgtcgggccgggaggcgagacgaggttgccccgcgcgcgtgcgcattgcgcgccttctgacccttttcgctctcatccgcagctccagcacccgagcgccgaggtccgcgagtgcgcctgcgcagggctggcccggctggtgcagcagcggccggcactcccgggcctggcgcgacgagacgccgtgcgccgcctcgggccgctgctgctagaccccagcctggccgtcagggagactgcagccggcgcgctgaggtgagccaggaagggtgcggggcggtgcccaccgctggcctcccccgcgtctgggctgcgggcggtcgcagcggtcacccagcgccttctgtgtgccatcaggcactggcccggtctcccgtttgcagagatttgaagccagtctccaggctccggagaagcccagtatccccgcatctcatctgtccacctggctgcttcacctgcagcgtccacctgctcaggcgtcctgccctcacgccttgcgcacgttttacactctccaaaagccctccttagggtcccttgcttggatgaactcttcagttcatgtgtcaggaatcgttctagatgcaggggactttgagcagccaagacttttgagcgagatctgttgacagccaagatccctgtcttggcacaagtcatgttgatggggagacagacaggaagctagtaaaaaggtaaaacataatattaaatagtgagaattgctgtgggaaaacgagatgatgatgagttgggggtgggaagtttgaattgggtgctcttgggccgggcgcggtggcacacacctgtaatc

SEQ ID NO: 83159 - DNA, 1035 bp, Homo sapiens
ctttgtcttctatctaaacatcttatggaaatttcattccttttcctggaaacaccaatctgctctcattattgatactaatctctattattttgtagctttatttttatgatagttggaaaagactttcctaaaattgtacagactcactcctttagatgttaaacttcttacaataaaaataattagtatttagtcattgcttatttatgtgccaggtattattttcatgttttggatattatataatttaatcctcacagtattctatgaggcaggtattattcccattttacagatgacaaagccgaggcacagacattaggaacttgtgaagattacagtaagttctcatgtttgatctcattccagtcttattgcatgacatagtcaagaggttaaggagctctgtctctggagtgcctctggtcctctattctgtactgatgggtaattttcacttaaggctacataaaggatatccagttttgatgagaggcatcagtcattttagagcagtgattctcaactgggtatgatcttgcttcacagggcataactggcaatgtctggagacattggttgttacagagcttgtggggtttgccactggcatccagtgggtagaggccagggatgctgctaaacatccccaaatgcacacgacagcccttccttccccaacaaagaattttctggtggagaatttcagtagtacctggattgagaagccctgctttagagggtctcctgggctgtactagaggggcttaagagcaccagctttggagtcaaatgctagggcctgaatcccagcttcaccacatgctaatctaacaccttcagcagcctccctgtacctcactttcccatttgcagctggagattggggataataatagttcacctacctcataggtttattgtgaggattaaatgacttgatacatgtaaaatgcttagaatagtactttagaaggcgctatgtaataaacagaaggtgctaggtagaagctcttatttcatcttttgttg

SEQ ID NO: 83160 - DNA, 2531 bp, Homo sapiens
tcacttgaggtcgggagtttgagaccagcctggccaacactgtgaaaccccgtctctaccaaaaatattaaaaaattagccgagtgtggtggtacatgcccataatcccagctactcgggaggctgaggcaggagaatcgcttgaaccctggaggcagagcttgcagtgagccaagatcgtgccactgcactccagcctgggggacagggcgaaattcctgtctcaaaaaaaaaaaagacttggtaagaggcaggatcaagtgacctaagatcaaccctccttcccagtccgttttcttactgcatcactacatcttttgttttacggctttcctctccagtcattgcatctgacaaaagataggaggaatcatgaccattagcacctgtggctcctcctttcccccgacttcttgtacaccctgagcagaatttgtctttaagctggtcagtcccacatgcaggtgcagctttggtttggcctctagactgagatggggaccacagaccttggctggtgcttttctttctctttcctggcacttactgtctgattgggaagtagatgcctaagaagagctcccttggccccaggaggaagaaggccactctccattctgtgattgtagcagtggtgagggtggagtggacttgccgctaggaatggaaatggctagaaacacaacctggatttacttttttctgccccattttatgtcccacatttctagcaagactctgtcacagtttcttatcttcagtcagcagcaattacagtggctgacctaaaagcacagatgtttcttagaatacaagattaagttggatcctgaaatgcctacgtggcaatctgaccttgcctgtgatttcattttaatgaatgcattccaccagaaatattagagagatcagatctgaggaaatggcatttgagcaaaaactgatgggtgctgtttttctgtgcaccagataactttaagtcatagaaattgttgcatttggaagtttttaaaaaatttccttgaaaagaatctgaatatatctccaaggtgatttctcttttctgaatacctatgagccctgtctgtatcactgagttactataacttttaacatttttgtttcatcatttatatttcaaattatctttacacatatatgccttgtcttcctgactagactgtgggctccttcatgctgccataactagataggtaggtaggtaggtagatagaagatatgaaatatttttcattacataacagatttagtttaataatttagtcagctctgttagcgtgtcatgtgtgtatgttatatgtatggaggaaacatgtacaacatggatatttcctctggaaacatggatacaattattacaattagccttgttaactcgtatttaatgtgtttgcttattcataacactgaaagctgagtcttttattaaaaggtagtataatttaaaaaatacttattgtaatttctctattgtagactgcaaattctgcttgatgaaattataattgcactctaaaaggcttgaataaaatataattttattttcctttaaatgtgtgtttttgttaatgttctaaaatatagtaggttaaaaaataaaaaataaatttgtgtttttgtgtgataaatatagaggccttttatcctcctttaacttgttatcattgtggtatggaggaaagaaaaaacagtagcctggacccagggaacctaggtactgggcctggctctaccactaacaaaatgtgtgctctttgatgggccactttaccacttggggcctgggtcttcacatttataaaatggggagttgaattaaacgatttacaagatctcttccagctctaaccttctataaggaaactggcatcatggcaaagagattgatgaaaaggtcccattgtgatagaaataaaatatagatagccagttctcatgtacagtgaatgtgaatgggtgttagttccttcatcgataaaaatggtgggtgtttgattccaactccttggtttataaagcctcgtttgtttttttatggattgctatggttgatttcctactgttaaaatgtgaatagtaaaacttttttttcccccttcaatttagtgaatgcagtagtagagcagtgtctatattcaacaaagaagggtgtttggagattgtgttaaagtatttaagtaggtttcctaccaatgttgacctggctatttcagtaggtaagtgaagaaaaggtgatgacttattaagaatgtgtagccttattcaaaaatttttatgcagctttggcgtgtttattccactggagtgattttttgtttcgttgtatgtgaatgtgtagctcagcacctgttttttctgggtcttaaatctgtgattaatattaattctttacctactcattcagtttttctgcttttgactctgaaagggagaaaggtaattatgtgaggatatgtggtttctagcctgtttccattcttagcagcctttattaattcttgaagttttca

SEQ ID NO: 83161 - DNA, 1695 bp, Homo sapiens
aggagagcagcttaggttacaatgaaagaaagtgatgccactcactttgtcattttaaaagaaacttgatcagtgttctctgggtctgctgataatgcagtgtatcagagaaaggcattgtgtgccaaggaagggagatgattgtgcagggttataactaagggcactgcctcagtgcagaactcattgatatttaataaataatgaacaaaggcagtagggctgagattttttgaaattacactggccttaaaagctccagtcttgtgaaaacttaaacttagtaaaatatttcacaggcatttcttatccttatgcttgtttttttcccaggcacaatttggaatctaaaggacattattccatgcaagagtcaagcagaaatcataaatgccttactaaagatcttatctgaagttttgggaatggatgctggtgaaatggttattcaaatgaaagaggctgaaacgcaaaggttaaaaactgctgcagaggctgaggaaatattagagaacactaatggggatgatttgattgaagatgatgaaatggaaggaatttctcataaaagaagagtcagaaggaaaactttcgtttcagatttacttccggtaagtcaggttgctgttctcaaatatggattaatacagctgttttttttttccagcagttatccttggctttgcagaaaaatgttatagcaaaattagctataaagtgcgttttggtaaaaatgagtcatattttcctgttgattctctttatgtcattaaaaatctcctaaagggggaaaaaaatctcttgtctaaagtgaatcgttttatatgcaggagaaggtttcagagatgggatagacctatccttttggaacactttagaaatagatgatcaccttcgtaactcttgcttctccccacttctgttacatactgtctgccagactgtcttcaaactaaaggaatttgtactttgcctgaattgtcccttgcattcttgcctcttattttagtatgtagccttatcaaggtggcaaaccaaaccttcatttatccagtactgatccaaagaggttgggtgactgtgagatgaatgatggtttgtagttttcttggagtcggtgatggtggcatacttgtgctggtggtgtgatattgcagtaaaggggaacaatcttgggtgcaggaagcatttcagctgacacagtctgcagagagagaaagttctcccaaagtgttttgggagaacactttgttaaggaggagagcaaataggaagacggggcacagtgagtgaggctttattcattcaggttcacatttactgtgctcctaatgtatgccaggcactgtgctagacgctggtgataaaaagatgattaagatgtaatttccagccttcaggaacttcctccatgttgggaagacagacacataaaaccatggctctaaggcctacgctgagaacagtgccgtggccatgcacagatttctaagaaaatagtatctgtggagtaagcccttgtgactcagcccctgtgggagagctagggaagaggctgccagagagagccgtttagacagaacacctggggcgtcataaaggagggggtgagaaaaagcaggttagtgtttggagagatcactcaggcagctggaggaagggagagcacaggggcctggcagcaggaggaccagt

SEQ ID NO: 83162 - DNA, 1069 bp, Homo sapiens
tcctacaaactgacagttagatctacagactagattcgattcagatcagtcctattttacgttttttagagatgaggtcttgctccattgccgaggctggtcttgaactcctgggctcgagcgaccctcccgccttagcctcacaaagttctgaacttacaggtgtgagccacttgcaactggcctaaagtgtttttcttatgcttttaaaagcagattttttgttgttgtcgttgttgttacagataatatttctatgcatcttgacatcatggagaaatcctttttgagagaggtagaggggaaaatttagtgatttccaaaatcatacatcatttatggattttaattcactttatttatgaatataaactataatatgtttaatttatcttgcttatacttggtatgtttataagtatttaagtctaatctcttgaagttttaatttttccctggcatttgtatataaaatagtatgcatgagttattgccacattcaaagttggtacttgttttggagactggtgttagtcatactaaatgtgttttgttgtttccagaacattgggtgctttctgcttgaagttaccaccaaagatccttcccttgtggtagcaggagaagctttggatgccctctttgatgtttttgcagatggtaaagaagccgaaagagcctcgattcaaattaaattattatctgctctgaaagaattccagccggtctttaaaatgaaggtttgtagccatttaacttataaatacataagtctgaacattctgtggggacaagggtgtgtgtagttaccgctgtgcaactcagaagcatgtgcatgacgaatccccatatgtagcacagcatccccagtactttgtaaaatgttcgttgactgagtcatagctcaacagtgtgactactgaatcattgaaactgaagctaaaatggtatctgacaagttcttctttttttaagtttagtaattttgacaatgcttcatatatgtcagtattatactctgtattttgcaaagcactttcatacacattttgcatttatttaattttac

SEQ ID NO: 83163 - DNA, 1001 bp, Homo sapiens
catactaactaggaaaatcaatctgaacagcagacctttcagaggttaggggttattttcccaattcatggtttacataattcctttctatagtttatataactcctaccacctgccattcagtcacctttgtaactatcatttttaataatgcacattctcagtttattctttacttaccgagttccatttaccttggaagtaaaaacattttttccaaattcttacagctatctgcttcagcaaatggttaaatacaccctaaattaaatactttatttaaatgaattaatcatatctaccaagtcatatatgattttttgttttttgtttgcagatacgtaaagaagggagaggtaactatagcacagatcagctgtgtgttcttgacaatgtgaaaatgaatttgcgaagatttattgcttatcaagaaactgttgagaaaagactgacttcttaaacaatccaaaaaagaaaccagttcttcccccaaagtattcaatgcttagaatactaaaaggttttctttgaatgtatatgtttctgaaagtcattttttaatgattacattctgtacattctgtaaaaacttcaaaacctggccaggcatggtggctcacgcctataatcccagcaccttgggagaccgaggcgggtggatcacttgaggtcaggagtttgaggccagcctggccaacatggtgaaaccgcatgcataagcatggtggcacatgcctgtgatcccagctactcgggaggctgagggaggagagtcggttgaacctgggagacagaggttgcagtgagctgagatcacgctactgcactccagcctgggtgacagagggagaccctgtctccaaaaaaaaaaaaaaaaaaaaacttcaaaacctgtcagaaactctgttgctggtttttttgtgtgtgtgttttgtttgtttgttttgttttgttgtttttttcttttttgagatggagtctcactgctgcccaggctgtat

SEQ ID NO: 83164 - DNA, 1067 bp, Homo sapiens
gtttttggttttttggtttgtttttttttttcagtagagacgggtttcaccgtgttggccaggctggtctcaaattcctgacctcaagtgatccgcctgccctggcctcccaaagtgctgggattacaggcatgagccaccgtgcctggccagaaactcttttttaagtgatgagatctgtgtggcatttctagcgctctctaaattatgtctctggcatattttaatcactggaaactcaaagagtggaagagtggaagtgcgaaggaatctcaggtagctcttaactaattcgccagcagtgaagaaacttcaaccaatcatgttttccttgaattttgcaaagaaagaaaatccaaagcattgcttggatgttcttttaaggcattttatatcagttgaaccttaaactgaaatatgaagacaagctttataaactagttttttgatatgaagtatatcaattatgtttgccttttgtgaagaagtaaatgagttgaatttctatttcacttactagattatactaatgagctaatggggtcattgccatcctccctactcatgactttgatgagttattgctgtaacatcacttcttgatttaatttgatatggaatcagaattgggagaaggtatttttaaataaacaactttttaatggaaagttttgtgtcttacaaaatcttttttaagataccaaataaagggttattagtagaaaatgagatgatactattcgtggatatttgtttgctaatgcatattgcttggaatatatgtgagacattaaaaaaatgacagcacgactttgcagcattacctctcagtgtcttcgaagtactaggtgacagctggggctcgagggagtttccctgtgcatcattgtctcggctgggcctctgaaccggcttcattgtccatccgtttgcctgatgagaagggaaatttgaaaatttctgtacagttgatctcagttgccctgacaaaaggcccaatccccagtacaggacttaattttaattcactgcttccacagcagcacaaaatgagctagtagtgttag

SEQ ID NO: 83165 - DNA, 1542 bp, Homo sapiens
cctggccggtgcgaatgcgcagccgggcacacgcccacagaggggggttgtgagggtctaggagcggccacccccacggcctgccttcgctgctgttgcacgggggtgctgctggccatccccaaccccccagtcgttcacacctttccccaagcctccttagccgtccacaccctccgtctcctgtcctcccttagtcgtccacaccttcctcccctccctcttaaccgtccacaccttccccaggcccccccctttatccattcactctcctcccatcccccttagttaaacacatctacccttgaccaccaccccgcctccagccctccacacctttttccccatcatcacaactcaagatgagaccgcttagcacgggcctatcattcattccctgagaacattggtgtgtgagtgttttttgatggtgcaggacccggaggtgctttccttgccaagaatagaaacatccagaatgctcctccccatcccccaatcccagacagcaattatgtcagccctgtaaggcattgcctgctcttgaccctttggcccatctttttatttttaaaaaattcccatgtcacagatgccctgtctatgcagagggtggcgtgggatgggtgaccactaagtttaggctggtgaaggtggtgagcccttctgaggccctgatagaactttccaggagttcatggtccgcggctccagcttctcactgtaaagttgtcatcctggcagaggcagccaatgcttttcattctagggggtagagatttatgctaatgagtgaatattgcaccactagtgactttctgtttaaagttcagctcttagaaaatggaatcttacctgacccctagtgaattatgtacataagcagggaatgtttccaactagatctcccttcagaagagtccctgtgctggaataggtcactgaatcttatttgttttgtaaaacaaagcttttgggtctcgtgggtgtgtgtgtgtgtgtgtgtgtgtgtgtgtgtgtgtgtgtagcttgagtatggagaaccggctttcaaattgcttttcatttttcaggttgtgttttacattgagggctttagcatgcaaatgaaattaccaattagtaatcccatgtgaaccttttcctggatttattcattcagatctgccctgctttggctgagagagagagttctgtgtacctttttgaaggtctggataaaatgagttggtgggttccatctgcttccagtgggctggtgtctgctctatgctactattacaactcctaccttttgtggaaaatgcagtcaagcgttctaggactggtgctgtggtacatgtcaaacctgccctcacattccagaaagggaacccttttagggttgagtcctctgttgctaagcttcaagggtgctctccatggtcatcacgttttattaaaggcttgtggttccatcctgttagcatttccaagtctacgcgtaaacctgtggtttagtgacaagcaaattgatgttgagggtttctggtagtttcattt

SEQ ID NO: 83166 - DNA, 1042 bp, Homo sapiens
tctctcgctctcgctccctccctctctctctctttctgttttttttttttttttagacggagtttcacttgtgttgcccaggttggagtgcagtggcgcgatcttggctcattgcaacctctgactcccgggttcaagcaattctcctgcctcagcctcccaagtagctgggattacaggcatgtgccaccatgcctaattttgtatctttagtagagatggggtttctccatgttggtcaggctggtgtcaaactcccaacatcaggtgatctacctgcctcggccgcccaaagtgctgggattacaggcatgagccaccgcgcccggcctctctctgcttatttctacacagtgttaccaatgagattggtgttactgctgggctccaaagcaatcagacagattaaagtagattgaatatgaaagaatttagaggcctttttccaagtgatttgtgctctatttaatttctgtgcatttgcagatatagcccacagtaattcttagtgaactagaaccttcaggttattgaattttactgatttgggtactgacatgcgcttttaagaagacattaggttttctatagtgtagattgtacactaacaatataattcatatttaagaatgtctcaaaatttagtatactgtgttcaactaacttaactttctttgttttttttgttttgttttgtttttgttttttgagacggagtcttgctatgccacccaggctggagtgcagtggcgtgatcttggcttactgcaacttcaacactcctgggttcaagtgattttcctgcctcagcctcctgagtagctgggattacaggcacccgccaccacaccggctaatttttgtatttttagtagagacggggtttcgccgtgttggccaggctggtcttggactcctgactcaaatgatctgcctgccttggcctcccacagtgctaggattacagacatgagccactgcgcccggccgctaacttaactttcattccacaacttccatcttttatccaaaatctgtgatc

SEQ ID NO: 83167 - DNA, 1429 bp, Homo sapiens
taagattacacgtaattgtttttttgtaagagattatatatattcaagttgaggatggctttgagttagactttccttaatttggaatcacacagcagatgatacatttatttccatctgataagttacttgatgatgtaaaaagacatttgagttaaagatttttgggaaaaaagctgaatgttgagccatttatgttgtgtactggttccctattcacttggacaattttaagtcttaaaacaatcttaaccatgtgcacaagagatttcacatagtatttggtaattaaattaaggaattctagctcaagtcatgctttttgctgaaatagttgtatatatttagtgcggaaacctgtgttttcaaattaatgtaataaaagtttcaataaaatggaagcctttattaccgtgtttcaaatgctatgctaaaccttttccatttgttattatattaacctcctcatacatagccctactaatttttttactttctattttgaaataattacagatttataggaagttgtgaaaaatagtacagagcccatgttcccttcaccaagtttcacctaatggtagtagctcacataacgataatttaatgtcaagaaccaggaaattgtcatcgttgcaatccataagccttttttagatttcaccagtttcacatgtatttgtgtgtgtgtgtatatatataattgtatgcaattttatcatgtgtagatctggatagccactgtaacagtctatagttctatatacagagctactccatcacctcagggctccctatgctaccactttatagccgcacgcacccttccagcaaccactaatctgtttgcatctctgtaattttgccattttgagaatgttatataaatggaatcatacagaatgtaactttggctttttttcttttaccatacttcctttgagagccatccaaattgctgcatgtatcagtagttcatttctttttactattgagtagtagtccatagtatggctgaaccacacaatttgtttaaccatttacttattgaaggacataccagaagggtggtttccagttttttggctattgcaaataaagctgctataaacattcatgtatataaatatttttatgtgaatataaagttttcattttgggggaataaatgcccaaatgtttggattgtatggtaagtgcatgtttggtttttagagaaactgctgaactatttattttctagaatgactatatcctcttatattcctatcaacaatatatgagatatccagtttctctgcatccttgctagcatttagtgttaccacttttttatttgagcggttctaatatgtgtagtgatagcctgttttgccttatattaatcaataaaaatagcctcatctaatcttaactttttttattttaa

SEQ ID NO: 83168 - DNA, 1092 bp, Homo sapiens
atttttgtatttttattagagacgggatttcaccatggttggtcaggttggtctcgaactcctaaccttgtgatctgcctgcctcagcctcccagagtgctgggattacaggcatgagccactgtgcccagccttcacatattttttgaaataataggccagttgcggtggttcatgcctgtaatctcacactttgggaggccgaggtgggcagatcacttgaggccaggagttcaaggccaccctggccaacatggcgaaaccctgtttctactaaaaatacaaaaaaattagccgggtatgatggcatgtgcctgtggtcccagctactctggaagttgaggcatgagaatcgctttaacttaggaggtggaggttgcagtgaggcaagatcgtgcccctgcactccagcctgggtgacagagcgagactccatctcaaaaaaaaaaaaaaaaatcgtatgcagtaaaggttgaaaactgctgcccaaaggcgctattaaactataggttcccaaacctggccaattgtcaaaatccctcaagaaggggcagtggggtctaagggaccccattgctgtagaggagattagtagtccaagagtgagatgaactgttggaagtcctcaaacttccaaactattaaaatagaatagttttgcttccttaaaatagaatagttttcttcctcactgatttttctgtattgattagaaccataacaagtgaattaaacaactacaaaatagttatgtgggccacagacattattgtaatgaagtgaagtttggctcaggccttgtaacacaattgctttttggattaaaagtaaaaatattaaattgtgaaattatgtgtaagttttaaaaaattggtcttgtacaaaagtgttgggtttttctttgtttttaactggatttgtttttaagcaagacagaatatttatattgttggagagtcacaaaggaggtgtgtttgtggatttaaatgtggagacagtgtgccttgaaatgccctttatcagtctgattcaagccacctgcaatcatggatttgaacttttttttttttttcccctgagatagggttgcct

SEQ ID NO: 83169 - DNA, 1049 bp, Homo sapiens
gctttgttgaatctgtggtctctgtcttaactacaactgagaaagccattgacaatatatagatgaatgtacatgactattctaataaaactgtgtacactgtaatttgaattgcacataattttcatgtgtctcctgtataattcttcttttgacttcttttcaaccattaaaaaatgtaaaaacaggccaggcgtggtggctcatgcttgtaatcccagcactttgggaggctgggtggattgctggagcccaggagcttgagatcagcctgagcaatgtgatgaaaccctgtctctacaaaaaattagctgggcatggtgttatgtgcctgtggtcccagctacttgggaggctgaggtaggaggattgcctgaacccgaggaagtcaaggctacagtggtttgtgccactgcactctagcctaggtgacagagtgagaccctgtctcagtgaatgaatgaatacattattagcttgtggactatacaaaaatcagaggctggaggtgagctgggtatggccattgggtgtggtttgctgacttctggtagagaggaattaggagatgttaaaggtggtggaactgtcagatacttgcattcttttagaaatactttggagttagctttttggttcaggcaaaggaccaaagggttaggagagtcaggccggtaaagaggagtggtgggcccatagcagcagttcctggagttttttttttttttttttttttgtgagacggagttttgctctgtcgcccaggctggagtgcagtggcacgatctcggctcactgcaacctctgcctcctgggctcaagcaattctcctgcctcagcctcccgagtagctgggactacaggtgcccaccgccacgcccggccaatttttttctatttttagtagagatgggatttcaccgtgtttgctaggatggtctcgatctcctgacctcgtgatccacctgcctcggcctcccaaagtgttgggattacaggtgtgagtcaccgcgcctggccaggtcctggagtctttaagaggaggtttg

SEQ ID NO: 83170 - DNA, 1823 bp, Homo sapiens
gaggagctaatatttgagctgagtgagaaggtgattcttgaaaaagcaaggcgtgccctggtccagttctgtggggctgtcgtagaagagggctcggaagctcttgggagtgaggctagaaaggtaggcagtgttaccataaggaggttggaagtgacacagataggctaaggaaggggacttcagtaatcatgcagcaatggcctggaaaagggagaggctcatagtagggagaccagtttggaggctgccatagtgttctactgagagagaaaaagacttgaactcagagcacggtcagggaaggtggaggggcagggtctgatttggaagtgttttgttttttggttttgggaacaaggatttggaaacctcttggctccgtagatgaagaaaggtgaaccaaggaagactgaagtttccactcaaggaaacagtaactcagggaagaaaacacaggagtaggaataggtttaagagaatgacaagcagttgtgttttggacttgtttagttcgaggtgacatctttgtagggatgtctagctggtagctgcaagtataggaggaggctggatgtgtgcatgagtttcttggtaaagatccatctgcagtctcctgaagatgtcacccagattgccctgccatcaccccagggccttgagtcactcgcttctcttggtgtctaggcaggcttgaagaaaatcaaacagtacaaaatcatgcaaattcagacctctattccaccccagaggaaagtcctgctagcagtttttgtgtattcttccagaaatttgccttgcaacgcgtttgagtatataaataatcccagaaaggatgggccagacactagcagaaactcaccacacacactgcactgggcatgcagaaactttgcaaaatgtactggtgtgtgctgtcactgcattcctgggtttggaggtcttctgtgtccccagctgtcagtattgcccacaggctgaccactgagctccttccacagccggcccatatcaccctctttcgaagtgtgtctgcaaggctagattattagagtaatttaagtgtttctgctttgtgttttctttaatgaatttttttatgatgaagttcttgttttaaaaatatacagtggtaattaacatgtatgcatttttcttaaaatgacccccccagtccctcttcggatgtgatcactgttaacagtatcgtatatagaccctgttctgtgtggggcgggcagagggctggttagtgggtggaacatgcatactcacaaccatatttttcacatgggaaaatataaaggtgacaacaaatctcctggactataatctcatcaagcagacaataatctctgtttcaaaagtggacaaatacatgctgattttttaaaaaaaattataatagtacagaaagatacaaaaataagttaaagtcttcctaactctcctgcctgtgccctccactgggcaaaagtccctgtccctaaggtaatatctgttaacagttctccttccagaaaacttgcaatgcaaataggaacattttgtgtgtctgcctctgtgtgtatgtgtttacatgtcttttttttttttttttttttttttttttttttttttttttttttttttttgagacagagtcttgctctgttatccaggctggagtgcagtggcatgatctcagcttgctgtgatctctgcctcctgggttcaagtgattctcatgcctcagcctcccgagtagctggaattacaggcgcctgccaccacacccagctaatttttgtatttttagtagagatggggtttcgccatgttgg

SEQ ID NO: 83171 - DNA, 1030 bp, Homo sapiens
gaatcattcatctggaagctgcctgtggcagaatagtacagaacatatgcattgcacacactacaaaactgctttaaataagtgttccttttcattgttagatggaagtgacccagggcaaggatcatgttttatgagccagttttctcctagtgccttgaacataggcacttggtagtgtttagagaatgaattgtcttttttttttttgagacaaagtctcactccattgcccaggctggattgcagtggcacggtgtcagctcactgcagcctccacctcccaagttgaagtgatttttgtgcctcatcctcccgaggagctggaattacaggcatgcgccaccacacccagctaatttttatatttttagtagagatggggttttgcgtgttggccagatggtctccaactcctggcctcaggcgatctgcctgcctcagcctcccaaagtgctgggattacaggcgtgagccactgcgcctggccagagaatgaattcttaataagtttcttatgacttcagattgactggcagttgtgctaaatattttttgcctttatttgaattagaaaattcgtaagggggccttgagagtagatgcagtcacatttaggagatttttcccccccattggttaaaatgcagtttttctatggatctgctttagaactacaaataaactccgatcactcacagcagactacgcaatgagataagaagcagtccatttgttctgtcgtttattcatggccctcatctttgccagccaacctgtgcagaagagcacagcaaagcataagcttcctaacagctattcccattcagctgctgtcttcaagaagcagaagggtttagataaccttagagaacataatcaaacctgggaaactcaaatcaaaacaaaacttcgaaacggaagttgaaggtcctgaggtacccagaggcatagcaaggaaaacgtccccactgggatatcttctggattcacctacagacctctctggagttttaagatccacgtttta

SEQ ID NO: 83172 - DNA, 1018 bp, Homo sapiens
atttgacacttaattcactgagcaaacattatgaaagatgtactgtttgctactgtgaggaatggatccccaagagataagagggtcagtccctactgccaggaaacttgcctgtgtcacctgggttcagtatcttgtgtctattagatcagaagtggaaaggcagaggccagcccgtatgcttgttttattttatttaaatcaccagcaccccagcaagtgttttgcacaggaaatttctcattatttaattattttgggttttttgattaaattctgtacattcccattttagcttatcttgagttataacattaaaattaaggtagtcatcagctgaattataagacttaattagataagattatttaagatagtgatttctcattagattggccctgttcatattaacttttctgtttttttcttcagtctgcatgaagaaatcagtgatttttatgaatacatgtctccaagacctgaggaggagaagatgcggatggaggtggtgaacaggatcgagagtgtaattaaggagctctggcccagcgctgacgtgagtcccttcctgggtagcttatgcttcggacagtccttgtccacgggctagaagcctatctgctggtatctcatgctagtcctcacatgcaagtagaagtgctctgtagagttgtggtctaattaaattttaaaggcaaacaattttctgcagtctttagaattgaggcttcctaactattttcattggattggatgactaacaactattttttttttgtagtgctaatagcaactactaaaggcaagctatccttagaaattattagtgtaaagagaagaaagacaaatcaaacctcattgttgtagtggtctgttattggatatgatatatcaaaacctcattactacttagttccagcctgccagggtaaacattatataattgtttacagctaaatgaaaatgtcaagtaagaacttttgtcacttgaagttcatttcctttggctaatgcacgc

SEQ ID NO: 83173 - DNA, 1027 bp, Homo sapiens
tattttaaaaatacagtataacaactatttaggtagcatttacatcatacttggtattataggtattataagtaatctaaagatgatgtaaagtacatgggaggactagcataggttgcatgcaaatactctaccattttatagcagggactcaagcatcttcagattttggcatggtgggactggaaccaatctcctgccgataccaagggacaactgtattttggtctatgtgtttcatattgaaccagataagtttaaattatattcagaatgtctgcttgtgaaacagaatccccgcttcatgaagcttggggttagaaaaaaatgctcttgtcataccaaaaagtaccagtagagggtagcaaaaactgacatttctccatatcttggtgactcaatatgataacaacttctgataactcaatataataacaacttctttttctgtttcaggtccagatatttggaagttttaaaactggactttatttacctactaggttagtacactcatgaatctttcaaaggacttttcttagagtgtattcattttggctgtcaaatttgtaaggagtagaaacaaaacaaatttataaaacaaaatggggctgggcatggtggctcatgcctgtaatcctagcacttcgggaggccaaggagggtggatcatttgaggtcaggagttcaagaccagcctggccaacatggtaaaaccccatctctactagaaatacaagaattagccaggcgtagcagtgcgcacctgtaatcccagctactcaggaggctgaggcaggagaattgcttgaacccgggaggtgaaggttgcagtgagccgagatcgcgccactgcactccagcctgggcgacagagcaagactctgtctcaaaaaataagtaagtaaataaataaaggatttaccagcatttaatttgatttaccttgaagtagaatatcacttcacatcatcttaccaagacatagatggtacagagagatggaaaagggatcatgttgcaatgg

SEQ ID NO: 83174 - DNA, 1647 bp, Homo sapiens
caggttgttttttgggctatttgcaaaactgaccagtaatgcaagtgggttgtagtgtacaccttaagaatccagcaattttcttattagaaacagtttgatgatacaaaacatttaatacctggcattcctagttcttcatcttatactcagaaagtgttctccaaattattgaggaaggtttttgttcattttaaaattatcattataactatatgtcaactaataaatgagatgatgggcatattaatttatttaactgtagtaatcacttcagtatgtatatcaagataagtatatcaaaacatgtacaccttaaatataaacaataaaaataaataataaaaaattggacaccaaacaaaattctcggttgatagaaattatactgtaatatactgtatgggacccagtgctaaatatgcagcatatagtatttgtagcagaccaggtttactggggtgtgccatatttagaatactcagtgttcttatgctctcatgagatgatggagacctcatgtctagtaggcttccatcccctgattttatcatttaatctggttaaagcatttacattttacctttcttctctttataggtacctattattaaattaacagattcttttactgaagtgaaagttgatatcagctttaatgtacagaatggcgtgagagcagctgacctcatcaaagattttaccaaggtcagagaatttagcgtttatacaacaaaactattagaaacgtaattttaagattctgttgtggtggtgttctaatatttttatatgcatgttgctgtctctctctctctcttttaaatagagctagggtctcactctgtcacctaggctggagtgcagtggctggatcatggcccgctgcagcctcaaactcctgggttcaagtggtcatctcacctcagcctcccaagtagctgggactacagacgtgagccactacacctggctattttttgtattttttttttttttttagtgttggggtctcgctgtgttggccaggctggtctcttaactcctggccttagcctcccaaagcactgggattacaggcatgagccaccatgctcagcctgcaccttacttttgtatgcaacggttttgctttctttgaatctgcttgtaatgatcagtgattaacttataatgtgacctcaagtaagaattaaaagttgagaaagcttttgaagaaattgtctgctctagatccttccttgtagagacagaagagatggaattctactacacagttgattccatctgtttttaaccttcaggagttcagattaagaacctttcctttaacccatttcccatatgccccaagaatactgtgcgggcagtgagctgcactttttttttttcttttttcgaggcagagtctctctctgtcacccgggctggagtgcagtggcacgatcttggttcactgccacctccgcctcccgggttcaagcaattcttctgcctcagtctcatgagtacctgggactcgtgcctgggacgagtaccaggcacctgccaccatgcctggctaatttttgtatttttattagagatggggtttcaccatattggccaggctggtctcgaactcctgaccttgtgatccgcctacct

SEQ ID NO: 83175 - DNA, 1077 bp, Homo sapiens
aggcccagacaggcagatcatttgagcttaggagttcaagaccagcccgggcaatgtggtgaaaccctgtctctacaaaaatacaaaaattagctgggcatggtgggctgaggtcggaggatcacttgagcccaggagctggagattgcaatgagccaagattgtgctactgtactccagcctgggtgacagaatgagggggaaaaaaatggaaatcactagtaattttaccaccctaagtaataatagctgttaagacttctttgaagatgttgtgcctgctttgtttccctccgtggccccagcctatggcatggtttacagaggagtgaatgaatatgtgcacagcaaaaggtggactcattctgtacatacttgcccactcaggtgttctctcgggtagccctgcctcattccctgtgaagcgtggaagggaggggtggtctgtgtgtagtcatcagcccatgtgcaagtcagcaggcaggactcttgtttgccccagggctgtggcagaataatctaaaggtcgctagtctacagtggtacatcaccaagaaaagtgattcttaaaaatctcactgatttagtgctttaagatgttggttactttgtccttgtactctttctattctctgtttacaaatgaatattagagggtcatggtcacaaatgagcatcatcagttacatgctgttagtgtttctatcctatagcaagtacttttttttttttttgagatggagtcttgctctgtcacccaggctggggtgcaatggcacgatctcgcctcactacatcctctgcctcccgggttcaagtgattctcctgcctcagcctcccaagtagctgggattacaggctcccaccaccactcctggctattttttgtatttttagtagagataggcgtttcaccatgttggccaggctggtctcgaactcctgacctcaggtgatctgcccgccttggtctcccaaagtgctaggattacaggcatgagccaccatgcccagccctgtagcaagtacttagatactattattcatttgtacatgtcttacaatttaagtataag

SEQ ID NO: 83176 - DNA, 1035 bp, Homo sapiens
aagtgctgggattacaggcgtgagccaccacgcctggccaaatttttttttagttgagatatagttaacataaaattcagcattaaaaatgtacaattcagtggtttttagaacatattcacaatgttgtgcagccatctccagtaattctagaacatttccatcaccccaagaagaaaccctgcatttagcagtagtttcttctaattcttccttccctcccttaacctctggtaacctctaatctactttctctttctatcctgatagaattttttttgttcccccatcctgatagaatttatgtgtcaattataatgtaagttaccttttaaaatcaaagtgaatttgtagtgtactgatttgagatctaaagcaggcttacctgtttgagtttaactttattaagtgtaggacatgaaaagtaatctaaatattgtatgttgttgatgatgaccatgtgtcaatatggaatcataaatcctcctgtgcagaatctccctgtgtgcttttttggttcctagagcagtatgctttggaggacagaagccaagctagatgtcacagacacagggagatggagtgttggggactgagagaatgtgactctgacatgctgggtagagtgccagggccagggtggagacctgcagagagacgtagcattgtcatggcccatgcagcccagaaataggtggagctcagcccactgtcgcgggaagtccacccccacccacaccagtatgtttggttagaatgatcactgatttgtcatcacagactctcagagattgaaccccttaaacccatcatcttgtgtctggctgaagccagggactaggacctaggttcctcactctttaccatactctttcattttctataaataaaaaaacaaataaacttagacctctgtgagctccttcaaggtcagatgtgggcagtggatttaacaatgaacagaagctctctgataaaatcagtcattttaaatgtttggaggaaaatttaaacaaacagttaattttttgtgtg

SEQ ID NO: 83177 - DNA, 1732 bp, Homo sapiens
ttattttgtaaaaaaaaaaaaatgtactatgtacttttgtgtaaacactgaaaaatctctggtcatctccgagaattaacttgcaactgttttctatagtgctgtcgtcttgggcaatgggcaattacatgactttgtgtttgcttcctttgcagtcttttttttttccccccatttcttcctaataggaaaaaaaaaaaaaaaaaggtcacccatgtctggtctcattcctgttgcagtgaaacttcgagttccacagactttgcatgctggcttctctaaccctgtgtgctgcgtgtgcctgtttctcatctcttattctttttaaaattcatgcttaactactgtgggagaataactgtaaacagctttaattaaatcatacttataaaaaactattttcttatattccactctatgcttttggtattgttgatctttacaaattaaatggtctttgataatggatctattttgtattgccttattaagaccaaatacttcttgtcatcccattctttatcctcttctttcatggaattgttatcgttaattaaaacttttttaaacattggcttgtttcaatcatactgtaaattttggttgtagtcagctttgagtgcaatgagatgtataattctgttatcattacctgttgagtttgaaactcagttgggaatatttaatataatagaatgtaagtgacatttctgaaaatgctttctttcagggtgaaagctcttatgtttagcatcaatgtgtatggctctgttaaatgcagccatttctgagacgagattcttttatatatatatacatataaagtactattggcttttaggagtttcttttatatacatttatgaaatactgaagaccaatcagaccattaatggacacttagtgtaactttttataaagaaaataatgctaaagtaagaccaaaactgatgtcatcactgaaattaacaattttcaatatgttcatattttaattcacaatggaaaaatgtgttccaaaactggaaactcatagtactcgtgtaaactgtggaagatttcaaatgtgatgttattttgacaatgttttaaattttagagtcacattttattctgatcagaatttttattgagatgttgagcttttgtttttgaaactagtttgtcataacattgtgcataatcacagtatttattttctaggacaattgtgaatgtgtagacttatgtttactgctaagggaacaattatttataaaataatattaaatccagtattagctgcctatttcagacacttaatacttgcagagatctatgttacatttaccacactgaagttttttttgttgttttttgtttgtttttaaagaatcaccctcattgttgaaagtaaatgtactcttagggtgcgaatattagtgttccaataagcatgtgattatattaaggtggtggtagcgggaagataattctgattccattgggaatcttaggttttcgtaaatttattgggaaaatagtttttcctgtactgctgaagtttctttttggtaaacagtatctttctaaaagaaaaaagcatgaaggagaaattgaggtgtgtatacatttcctcaaatgaccagcattgtattcgtgaatactgtgtatcttgcagtgaacagtgtggaagctgttcatttttcaatctgaagtaaaatactttcaagaacttttagtttgcctgctc

SEQ ID NO: 83178 - DNA, 1061 bp, Homo sapiens
tagctgtgtgtgcttgggccagcaatgtggtgtctctgagccttggtgccttattctacagagggatgatagcagggccttcctcagtggggctgccagggagtgccatgaggctgtgtgtgtaaagtcctgggtgatgcctgtgtggatcccagggagcattgacctgtgtgtgctcagatcctgcctgccgggacctcctagacagcgtgaggggtggggtgtcaagtggtggctggtggctgcggctgcggggagcagctggtttgaggcagtgctgaggctgcagcagggaagagactcaccgccacatcttccaaggagaaagctgggcgggcagcctgggagggcaggaggtattgctcagtgggacaggaaccttgattatcaaacggcagggtttactgtgcccctctcattatcaaactgcagggtttgttatcatacagcctctgctgtatggccagtttatcttcacacactccctgctctatggccggtgctggaaagcccagggccccataagctcccagcaggcagtggggaacccccctcctgtgtccaggcatctacatgtgtcctctccaagctgccccttttctcaagccgagatcatcttgcagaaatgttggtcagggtgggtcgctccccacctgccattcccctggacttgccctgcctcctatgccccttccccttggcccccgatatctcccccagcggctccatctccacgccgcgctttcctcagggtttgagcatgtgtctcatcagcctctcgcccactgggccaggtcagatctgttctttttcctgaatctactgagcatccagcaccatgccctcctgcatacgcaaacgggtatccctcaatacccatttaaaaatggacgggtaatttacatacaggcaagtgcacaaaccttcaatgtacagggtaatgagtgtacttaggcactcgcctgtataaccagcacccacagggagatttagaacctcctcagcccccagaagtttcctgtgtgcccctttccaatcagcggcctccctagaggcaaccg

SEQ ID NO: 83179 - DNA, 1123 bp, Homo sapiens
agatgtgatcagtgagttcattccccccaggcctcacggtgcccggcttgttccaggagctggccaaggtccctggatgggctgaagtccttgtgcccatgttgtccactgtccacctgcgcctgcctgccgttgcccagaaagtggcctaatgagttccttgagaggcgtgtttaccaggcctgtgttcccacgggcccttgggactctctcagctggttcctccctttcctcgtggtggcccagcctggctttgtgtgcctggagcgggtgtgtccacacactctcacacttgcactttcatgcacgtgtctggccgcctcagctctggtctgggggctttgcctgggagatggagcagttgtggggagtggcctcagccctctggtgtttggagcttctcagcctggctgtcctggtgcactggtgtttggcagcaggccaggggtcaggtgggtttgctgtttgtgtgctgtggcatctggctcagtcccccgggatgtcagtgggcaagcctgggctgaggagccctggtttgggagctggcagacctgggtttgcatcccagcctatctgtccaccagctccagcagtgtgatcttaggcaaccactctgcctctctgggctcagttctgcatctgtgagacggtggtgccaccttggcctttgccggttgtgaagatgagagtgaatgtgtgtgcaggtgccgggggtgacaggaactgctgctgttattactgcaaagggctattttggggtggggggtgctgaattgaatgtatctcaggcagggaccttatcttgtttggcaacccccacagcacagggttggatgtatatggttagcacacagtaaatgcctcttgtggaatacagactgattagtttagatttagaggttgtaaactagtgggctgcaaatattgaaaaatttgaaatcagctgccaacatttaaaaatcatcatttcacgtagaaatcagatttgtagcctgtctgagcactttgggcactttgacagctcttggccacatccctgaagggttgcccctcgttgaacaggtgccaaggcctgtagacacctgcccaggcactgaaggggatggggcccccagcaaatgac

SEQ ID NO: 83180 - DNA, 1072 bp, Homo sapiens
cagagaggcccagtgcactaatgtgtttctatgttatattagcaacagaaaccttcctgacttgccaggagagcccccgccgggcagccctggtcactgctagatcttgagagcacagatttcagtatagtattcatgtgaaaccagcccttcatgtaaaaagttttggtgtgtaaaaaaggcaacttaagcgaggctaattgcccttaccagcattgttgccatgaaattcctttatacagcaagttcttctattcatactgattccacttatgtgcagcacatgagagctgccactagtctacccagcacctttgtgcaaattagaatacacctgcccttcctcgggctgataaagccacacgacacagcacaggcagacaggttcaattttcgttccctccaccgccacccccgcacttagctgtactcttaatttgcagcccggggcaactcatcccaggaccccaacaagtctggtcagtcacccaatctgcaaccctgtataatcatcttgtaaaggctcctgtatgcaagactttgtgtagaactttacggggttcatggggacacctagctaagaatccctgctatgtagggaaactgagtgcattagaaatcctggcgatgctctggtgatgaggccaccggttaagtcttccggttatgaagtccattcagaaaaagtcacgggcagtttggtcatttctcaccctgttgttacagttaggttgactttcaattccttgggaagttgaagcacagtaagacacatccccaaaacctggctttttgcatttgccttgactcacgcagtttcagagcaagaacggctcagcatttgtgagggggcgggcttcccagatccaggagcctctgcatgcacccatgcggagtagatccttctagttttgaagctctccagagttagctgtgaagactaaaggaaagaagagatgcactcacaggttgtccaagttgtctctaaacagactccattcctttctggtaagaaaagtaagatacagttgaaggacggcaggggagaacgcaaagatgtgtgagtaatcaa

SEQ ID NO: 83181 - DNA, 2148 bp, Homo sapiens
acagaaggtacgtgccctgttttctctgggaaagcagaaagctatggtgactatagtcatccctcagtgtctgcccgagattggtatcaggacctcggatttggtatttaccccacaaagatagcaaaatctgtagatgctcaagtccctaacataaaaggtatttgcctataccctacacacaacctccagtatacttcaaatcatctctacttatatacttcatagaatgtagttaatagactgtattttttatatttttttcattgtttgttgtatttttttaattgggttttttccccaaatatttttaattggcagttggttgaatctgcagatgtggaacccatggataagaagggtcaactgtaaaaggaacatttatctgtttttaatgtataaactactcttagttttctttttatcttgtctaaagaattaataaagatttcctgtgtgcagaagagccacaatgatcacctgataatgcgcgtagtcttcagccttggatgtggtgaagaagggctctcagcagttatgcttctggatggcagcttgactttcatgtcccctttttaattaaaaggtaaaaacaatgttgaattaagtgatgtctttttctttcagacactgaagaacctaaaaagacggatgttgctgagtgtggacctggtggaagttgaggctgcctggtatttgattatatattatgtacatactttttcattcttaacttagaaatgcttttcagaagatattaaatatttgtaaattgtgtttttaattaaactttggaacagcgaatttggatgttccagaggttggacttgtattaggtaataaagctggacctgggactcgtgaggaaggaatgtgcttggggctgttgccatacctgtgcagcattctttcaaaatagtgccttccaatgcttcttccttatgtcccacagacaggatcatcactaagaagcgttcttaaaacggccccatccagtgagattttccgttatacgaacatacttgaaataattttagaatttactactgtggttctgcccctgcatacccagtgggaatgatgcccttgtatgggtaattaggcacctcccacccacccctgacaaaagcacactgggagttttatagcactgtcacatggctagtgttcttttttggttttttccgttttttaaagaaagaggagttacttagtactatagcaaagtaataagccaaataagataaactaagtcatccttgaatagatcagggaattaccagattaccaaaaggtgacatttctactttacttactgtttatctgaaatacaaaggtcaagtacccaaggagttgaactctaagtaggagaccacaagattcatggcccccttttatcagcaagctgagataaatggtgattttgctgaatcggtatagaacctgttatacacaagggaaaaaaatcaggatggagatagatagatagatagccttgttcagtgaacaaattaagtttgaaggcccttatacaatccttctataaatcacccaggcaggaagccatttgatttctattattttcctgactttgaaaattaattagtatttaggaagaacaaatagggtaaaggaaaattaattccctcaaaagacttaaaatcttatgctaaaagagtcaaattttcaagttgtttgagtctacttttaatctctagtgagttcatgaggaccacgaaaataaaataccttcagatatttgagtttttcaaattgctaatttaatgtataaaaagcagctaaacactggtactttataaaaatgaaacagcattttgaaacaaatgttacagatctataaatattcattatatagaataaaccctagttacttgcatgcaccacctcaaatcatatttctttacactgacctattatatacacaaagtatacagtggttaatgatcttctcttctgtttgtttgtttgtttgtttgttaggaaatttcctcaataagccagaaaaccttaggtattattttcacaaaagttaactcaggagaaattgtaaggaagtccttgacccatggagaaggtcactgtttgtttgtttgttagatacgtgtgtctgtcataaaacaaaatgac

SEQ ID NO: 83182 - DNA, 2048 bp, Homo sapiens
gaatattgctgtgttcatgcacagtaatccctagaactccttcctgtcttctcgtcagggatttttctgataaaaacagataccatttatttacatatttataagttatttaccaaataccttcttaaacatgtatatagcttttgatcaggcatggaaataacatcaccagtaataagtaccccagctcacagaatcctctcaaaatgctaataattatatttagtcattttggcctgaaaaattatattccagtagtccatatttgtattcattttctcttgccaagaaactcctgacagttttctcttttccttgatattcgccttcatgtgttttcctaaaaagctgtttttcttcatccttatagtcattgcctgaagatgaaggccatactaggacacttgacacagcaaaagaaatggaggtgattttattttacactttacaagaaatatttaaatggaaaataaggggagtaagagaagtcttgagaatgggaaggcccattgggtaagaaggaaaaaggttagtgagtagagttgtgagggcctagctgaaatggcaaaccataaatgcatatcagtgccaagttgcacaattatacagtttctcccccacaagtttttagcccatatgtaggtagagaaatcaggtggatcaatggagttagagttggagagccataccatagtataaatggaaccattagcttttgattgcttaatatctgggttgatctattcctaaaaagtaatgttgaggttatggaaacccctgagtcttaatgattctgaaaataaaaactccatctttttttttttttttttttttttttttttgagatggagtcccgctctgttgcccaggctggagtgcagtggcacaatctcggctcactacaacctccgcctcctgggttcaagcagttctcttgcctctgcctcccgagtagctgtgattacaggtgcatgccaccatgcccagctaaattttttttttgtatttttagtagagacagggtttcactatgttggccaggctggtttcaaactcctaatgtcaggtgatccgcccacctcggcctcccgaagtcctgggattacaggcatgagccactgcgccaggccaactccatcctttttaagattttgtttctctcatgcaatactgacagcctagtttggaggcctggagaagacccgggaagtgtatcaataggaatgcaagtatacggactagatggactgaaatatgaaatagtctttgaatctcgaaaacacaaggcattgtcatcaccaaaagctcttcacagtttaagcaacaacaaggctctcattacttcatctttagaatagttgccatactaaacaaatgatataaattgtataagatacatcattacatttcacagaagtatggatttattgaatacctgtttttgccaagatttgggaatagcattttaaaagggtgttctggaaattcattttctgtaagcatcaaaattaggactccatagtaaataggtagaataactttgcctgtaaatacatgccatctgagtaatttctagttaacactgctgtggcttagcaagcgccagtaattgcctgtttttccttttgaagcagattacagaagtagagccaccagggcgtttggactccagtactcaagacaggctcatagcgctgaaagcagtaacaaattttggcgttccagttgaagtttttgactctgaaggtaagtgtctccagagggtttgattgaaacactgcatgatgtaggcagtcaagatttcatgtctcataagtacagattaacatagccattcaccacaggaagatcttggcttaccaagttaaatgaatgggtatggcgtgttgatgtcatttcaagcggattactcttttgaagggagaaggctaaccaataattagcaaagccctagagcctaggattcggtttactgcacaagatcaaacagaagtgtgtctgttttcttaccacacagaagctgaaatattccagaagaaacttgatga

SEQ ID NO: 83183 - DNA, 1643 bp, Homo sapiens
tcacagggattcattcctggctaatgcctgttctcgttgcactaaaagtatgcctttcatagatactcatttatccttcatgtgttagtagcccttttgtctttaatgcaggtgttttccctcagtcttttactaacctttgtactggttaactttcatcttaacattaaaagtcccagcttttaaaagtttttgtggcttttgtttttaataaaaattaattttttaagtgaagtgtacatgattataaagaattccaggaagcaggagagtgtaatgaacaggtctgagttttggtcctggctatagttctgcctttctgagctttgattttcttataaaagtggatgtagtaagcgcttcccagcctccttcacggtcatgcagatgacatgcagtggtttgtgcggagtcactcggcagagggccccgtgggtcatggccatgtaggcctccttcactgtgctctgttttatgttgtagagccaggctactgccctgtgagactgggaatgacaactggaagacttcagtctggagtgaatactttgcaggggttcaaagaggataaaaggaacaaagtcactccaggtgaggctcctgcataggagtcattttttctcttctctgttttgggatattagggaaaggaagcacgattatgctttattcactaggtgggcaccagtatcttggtggtatttttgcaacattaattagctattttattaacttcagaagagactggaaaattgggtattagtattcaaaatgaattttgttctttcttgttcctctccctctcccttgtagggaagaattcacttgagttgtaactttacaagtacctgtttgagagaaaatatcttagatttgcaaaccagccaatgaagtagtaaagttaggagagaataaataatcttttggtaaaacaaaatagattgacatgcaagttaaagaatagtgttacagtatttgattttttcaacagtgttatatttgaattatgggccctacagttcttatgcaccgcattatgactccacatttgcaaatatcagcaaggatgattctgatttaatctattcaacctatggggaagactctgatcttccaagtgatttcaggtgagtttccagttaatattctgattacatttgtttaaaaacattaaagtacatacatgatttgtggatagactgacaaagctggccgagtagtaaaaaaaaatgtgctcagtaatttttttttaagctgacaataatggattcatagttactattatcctttagtggagagagagagcatgtctccctgatagtagcatctgcagtattttaatttttaaaaaatatatttttaaagagactgtacctcagccagtactaaagtgtaggaacttgttacttcaaaacgttgatgtgccatctgctgtcttataacatgttgtgtgtcagtgagttatggtccaaacttgatcagtttgggaacctacagtgcattttccccaagaaaggaggcaggataggatggctctattccataggcagcccacataaaagcctttttgaccaatcacatgccaggtagaccattgcagttaaactcaaccattctttattgcatgtttctgtgggaagatc

SEQ ID NO: 83184 - DNA, 1059 bp, Homo sapiens
ctgccaactttggggagggttgtagttagcagtttgggatttttgctgtcataatgcaaagaaagtaaactagtgacaagtttttctttgttctaagatttacacacttaagtgcttgttttaaattttaaaaatcaaactttaaaagaacaatggtatattgttctcccttcaaagtaatgtttgaggtagaactaatttttttgtaagttcccagaaaaacgtttaacacaagtaacactggacagaaaaaggtagggaaataacatgttaggtgtgccttactgtttctgttcttaaattagagacccttaacaggtcatcaaggaagtaagtttcaatgagtgactgtagtacaaatgtctccactttagttgtattcatatttagaattcatttgaatgttttcatcttacttatctttgttttttttttacttagtattaatgtatattttcaggaaagacaaagatatgcttgaagataagtttaaaagcaataatttagagagagagcaggagcagcttgaccgcatcgtgaaggaatctggaggaaagctgaccaggcggcttgtgaacagtcaggtgattgagctttgccttttcttttctctacctactgatttggggcatctgaaacttttagtttttaaattgcttgcgtatttttaatccatatctgccatagagctcttcatcagtataatacttagcagaaaaacaattaataatggacagacaattccctacaatgggtttatcagggtgttaaatgcattttcaactcatgatattttcaacttacagtgggcgtgttggatgtaactccattgtaagttgaggaccatctgtgttcatttgtaaagtacatgattaatcttaccctcttttactggatttttaaaaaatgaagttataatatgttctaaaattggaacatgaactacagaatttaaatttacaggaaaacatttgtattctggtcttttgaaatcatattgtttagcatgttggttttatttaattttagattcaaggggtacatacaccattttgttac

SEQ ID NO: 83185 - DNA, 1044 bp, Homo sapiens
acccagtgataactttcagagtacaggcaaggtagtcagtagaaacaaatatgccttcttaaaatttacggagaaacctcaagcccttaactacaatgaaaatttcacagcacatcattgcagcgaaaaattaagcacatgtttcacagaatagaaacaagacttctttggttagcgaaaccattctgcactctgaggaaggaactgtgccaccaactgtcttctcctcaaggcttgttgttttcacacagagtgaaatgccagcgtcatccgtgagcacactgggctaccagaacagagagggacttcacacgctcacatgccctaggctttgatacacctaacagttcttaactgtcaaaagataagcctgtctgttaaacacaaaatgttaacacaccattaaactaaattttagtcttccaattcagtacttcaaagaatacttagtcttaattcatactttctcctctgttaaatttctgatagggcaataaagttgtaaagctttctatgaagttggaaattaaattttaagaattgaaggtgtaggcattatcatggtttccaaatacaatactctcttggtatatgattacatttaattgtttttcttccctggttaatgacaggataagtataaactcctgtggggaaaaaaatgcattactttaaaagttaatgacaaacatataataagaatattttcgaatatgtttaggaaagaattcagagcctgaagcagagcatagacttcatggctgacttgcagaaaactcgaaagcagaaagatggaacagacacctcacagagtggggaggacggaggctgctggcagagagagagagaggactctggagatgccgaagcacacgccttcaagagtcccagcaaagaaaataaaaagtaaaagatctttgggatgttaaggtcaaactgtcttcttcaagctagtaagggggaaaaatacttattcggggcctgacttgggaagaccaagtgctagtgtgtcggtggtggtggtgttttggcatgaaagtccat

SEQ ID NO: 83186 - DNA, 1062 bp, Homo sapiens
gtggtctccaagatgatttctagcattactgttctgattctagataagaggtagagtagagaggatactatgaaaaagaaccacaagataggacagggattttgcaaagaagaaatgagtgggtataagacactggtagaaggagaaaggaatcagagtccagagcttgagctcacattcaggggagttaaaggatgataaaaatgagtcgtgcatctgcatgtggtttttcgatttttatggtgattcatttttctgtattacagttttacatttaaagaaatgccttggtgtgcagatgtctgagtgtctgtatgcttggctgagagattcttggattcacttaactagagaaagaaaaacatgtttggattgttgattattcttgcgctcctaatatttagacaactttggttcccaccctttcctaaagacttgggaaactaatggaagccagttacccatctttgacaacattcgcagaggaaagaggaatatgaaatgtttacccattctttgcaggaagactctcagaatctagaaccatgccatattccaggtttaaagacatggaaatgcttcttgttaatgtatttgaagtaaaaatgcatttgtcaaatgcagcctttagtcactccaaaatatgtacattgaattgggtggtgggagcctaatttttaatgacctttgatttaccacttccttaagtaatgtagttaatacaacaagcaaaagattccattatctcttgaattttactggcgtgtggaatggttgaaagcacagaaaataaaattttcttcactttcccttccctctctccctctttctttctctctgttgtcttcctttttttcagatcttttgctgttgaggagccccacccatcctgtgttattagcttcctattgactgttctctccaccctacaggggaggggtcgtcacaacagtgatttttaaacgtttaaatttagaccttttgagttaactcttctaatagtttgtgctccaagagagcccagcacacccttccgtgaatggtgtcttttcaaagataact

SEQ ID NO: 83187 - DNA, 1050 bp, Homo sapiens
gggccctcggcggctctgccgggcttccgctctttcccagtggctccggggcggcccggggcccttccttcccacggcaggcccaggccggcgaagggggcgcgtcctgccggaggccgcgctgccccccgtgcggccgcggcattcgaacccgggtccccctggtccggtgggtctctggtggggagacgtgaggcgggcccgggaggcctgggagcgttcggggcgggcggcgccgccgcacccccgggccggggtccgtcattcaacaggtgcttcgcggagcgcccaaagccgcctcgggcttgctgcgccttggcgctctgcatccttagcactccctggagagccccgattttaatcgacgcgctttcctttcttttcttttctttttttaagagtatgtagagaagcccttgaagctggtcctcaaagtaggagggaacgaagtcaccgaactctccacgggcagctcggggcacgactccagcctcttcgaagacaaaaacgatcatgacaaacacaaggacagaaagcggaaaaagagaaagaaaggagagaagcagattccaggggaagaaaaggggagaaaacggagaagagttaaggtacaagtggttacattgctttggctttgcggacggcactgcctcttccaggtgccaacctcattttattttctttgtatctggggaaaacaaacgcctctaagatctggctcgtttgaggaggagcaggacagaatagagacatgaatcatctatgagtttcagcaagtcgtttttggattatactcttaggcaattgtactcgcacatcaggtgaggaagcagctaagtccaaattttgaggagctgcttcaaagaatggtttttccatctaggcagggtaaaaagtcatgctcaagaaagcctcagtgttcaaggattgtcaaaaatagtcatttcagaagcgagtgggatctactggggtttaaagtttgttctgaaataaatattataatgccaaatctgtaatgagcaactttaaatcttttaaaacagtgttgta

SEQ ID NO: 83188 - DNA, 1048 bp, Homo sapiens
ggggcgtgattgccgtttgtcagaagaagatgttgagaggggacatcacatttgattgctcaggagttcccctgagatgattgctccccatttatagatgggaaaacccagccctagggaggtttcaggggcttctctaggtgtcttggagttagtttggtttagctgtgagtgccttttacactctgatctcgggacacccctcacttattttataagctgtacctcctccttggccaaggacaggccacaggtgacagctcccttgtgtgttatggccctttggcagagtccccgatctcaactgagtcctttctggccccagatcccagccatggctccgctacctgcctggctggacaccaggtctggggtggtgggtattgttctggtagaaatgtgaactggtgctttgctttgagtatattaagacacaaagtccctgtggttaacagcaaattaatcacagtgttaaggagggcctgtctcgggtagacatgacttcatgagcttgtcataaaactggcctctgccatatttcactccccaagatttttgactttcagaaaaggaaccgcagatagagttaccaagttttacagaaatatttttactgggcagaagattgctttatggcgagagccagttatttcaggagacaagcaaagagccctttattctcacgttctgtgggaggaaaatatgatgccagaaagcccgcttcttggatgggccctttgagggggtgggctgcatttttttggagttgggagtgggtgacatgaattggcttgcgaaggcctggggggcccctgagcacccgcctaccttttcttaaccatctctggggatttggggcttattttgcaagcacacggaagcctaagggtgttgaacagggaagagacgtggttagcactgggcttgaaaccaggaccgcatatcagagaggggaagaaactgagagtggtaggccagcctatggggggccccagctggagacacaggaagtccaggttagagctggtgctgccatttcccagccatg

SEQ ID NO: 83189 - DNA, 1019 bp, Homo sapiens
ctacacacatgcactctctcagtcccacaggctaccagctacacacgcactgtcttggtcccaccggctagtcgctacacatgcactctaacccactaagcatgcaccccaacccgctacacatgcactctctcagtcccgtggactatgtcttcctttgctggcctctccaggtgggctttctgtttttagttttgatttgagaatgaattctatttctgaaaaggaccttagggagtgttgtcatgacaccatgatggatccccttgatggactggccattctggcctcacactgtgtgctcaccccttcccacacatgccagggcctgcccaaggagaggcgagggcccagtgcttagagcggtgccttagcaaaggcaaagtctgcgtctttgggaggccctcaatgcaactggcataatagcaggtacacgcagggaatgcagtacacacgctcagtgaatgcaagagaaagcactcaagagaataagggtactcaaacccttgtcaaagggttccctggccagagaagcttgggaaacgggtggcagcaccagtcgaatgagcgttactctgtcatttttggcagaaattgcaacctggtgagctgactctagctcccaggaatgttttgtttgaccctttcaattttttaaacaatttgagccaacatttaaaaatgaggaatttcactcagaactccagatttctgacttctttttaaaaattggaaaagctaatatcattggcatcaacctcttagcctggcaatattcaagtggagctgaatgtggctgtgctcttggacagggcctgtgtcccccagagcccctgcagtgcccaccaaccctgtttctcatttttctctctgtttttttcatcattgcctttgcacattggttttctatagaactatattgcttttaaataaatgtttctatttctctcataggaaacaattgctatcaaagatggaagagaaaagatgaaccaaaatggttgttttctgaaaaatta

SEQ ID NO: 83190 - DNA, 1050 bp, Homo sapiens
taggctgtgctcaggtgggtggcacctttgaggaggccaaaatgtcaacacagaaggcagtgagactgcagaaaatggccatggtccctaagctccctcgctgggctccagaagcacccctccactctcatccatctgccctctggcctgacactgctctgggtggctgtgtgcctccatagggcagaagtcataggctggtgggggcctgagggggccccccacggtgcaagtgggtgcaccatgttgggggaaggtcttcccaggcagtaccaggtgccagagtagtgtgatgttgaccccagcaaatgggcagggcaggagcgggcccagccccctggcgagaatgtccaggccaggcatggaggacaaaggtgcagtgagcatggctgcccggcgtctggaccctgctcctaatgctccctcgcctgcctccccgacagtggccctgcctcctgagaagactgacgggctgggcagcggagatgagaagaagatggagagagtgagcgaaccctgcccaggctccaagaagcagctgaagtttgaagtaagtttccttttggtgctgggtcctgaggagatgagatgggttttctcagcttggggctttgggaggagggaagctgaggctcttccagacaggaaggcccctcccctgcatgaacagcaccctctgtgggaggttccttctgccacatctggggccgtcctggctcagggcagaccccagggactcaccgctgcccaccccctcagcccagccccagcccctccatgcgggctgtgcccagcagcttgggagagggcatgagagtagacgagggaggcaggactctggcccttctgttgctgtcacctctctgggcctcagtttcctcggtgaaaccttcccttccaactcttgaggctgttctgggggtgcctgtgggggatctcaggtgggatggatgaacaggaggtacgggcaggaccctgacgctctctgggcctgagtttccccatgtgggcaccaccaaggatgtgcctccgtgtggctctgtgcagtgc

SEQ ID NO: 83191 - DNA, 1050 bp, Homo sapiens
ggcacagcagagggcagtgacatgcccagggtcacacagctgtggaggggcctgcaggggctggatcccggggctgaccgacacccgaacccctcatgctcatgctgtcctaccctggcatcctcctggggctcccaaattgccgctcctttgccttctagttgcttcttgcccttggtccaagttcagcttttctgaggccacagtgcctcttctcagaaccccctgtgtttcctttgtctttgaagacccacagaccaccaggcacccctgcaggcatccctccccaggccaaacctcccctgcccgggctctggctgccctcctgggccagttctgtcttggccaaagtgctccctgtccactcaaggtctggggagggcagaggacaggtggccgccccttggcctggcctctaggcccaggcttccactacccagtcagtgttgccacagataggggaccagccccgcccatctctctgcatccaggagctccagtgcgacgtgtccatggaggaggacagccggcaggagtggaccttcaccctgtatgactttgacaacaacggcaaggtcacccgagaggtgagtgcacctgcctggcctcttgccgtgtatcatacccgcaggcacagggcctgggcacagcaccctgccactgccacttctctcccctgcatcggtcctgcccctcagggaaggccgtaacagccagggagttgctgggagctcctgcgagatctggaggggcatcccagagctgctggcaagtgggaagagaagacagggagggaaggcagctcccctgctctcagcccaggcactgtccctcccgggaaagaagttggggggggcaggtgcagagccctagggcctctctggagatggccccaaggccctaaccgagtcctgtcctgcttccctctctccacagtcccagagctctaggggtggggctggcaccaccacaggccacctcccttgctcagccatgctgcccaggagcttgggggtgggggcacaaagaggccacacagcgccttgtttt

SEQ ID NO: 83192 - DNA, 1014 bp, Homo sapiens
attcaattagtgatgtctaaaaagggtagaaaaaaaaaaaaaaagaaaaaagaaagagcaccgcaatcaattagtgatgtctgaaatggagcagaccaggagagcaccacgaattttgccctccataggttagctcatctctgaggtctttccctgctctgacatacttttgttccatgattacctccagcctggtggggaacaacattggcagtgtgggtgcccaagccttggcactgatgctggcaaagaacgtcatgctagaagaactctggtgagtttgggggattctctgctctggggaagtggatcacaatctctgttgatcccctggcctcatccataggagcggttgtgtggacagacaaaggtggatgattgagtgattgactgattgattgattgtgtttgtctttatatgtactgagtggtatgaagcttatagagcctggtatgtacatgctaatttttttatttaataaaatatatgggtttgctggtttggtgactgcctccacatggcataagtgttaagagcacagactctgtaatcaagcaggccgtgatcttaggcaagttaaataacaatttcagaatctcaagtttcatgtctgtaaaatgagggtaagaatacttccaaccataaaggatttttgcaagaattagataaagtagtgcctgtgaagaccttaatatagtgcctggcatatttgtaagtgctccataaatgttaaattagaataatggcagggttactactactattactgctgctgctgctgctgctgctgctacaactactatagtactgtgactactactactaataaagttttgttattttaaagtgattttgagttcctaggagcactgggtattcaagtcttaggtcattttggaaggtgtaatggagttttgatagttgaaagaggaaccatgaatcatgcttatactgttgacctgaagcagattctaagtttctcatcctttagatgccactagtatagttttctg

SEQ ID NO: 83193 - DNA, 1048 bp, Homo sapiens
acttctctcattctgcatccttacctgtacaatggtgttaatagtacatgacttgtagtgtttttgtggtacattgatgcaggatttaagcacagtgactgacaataagtgcttaatgaatggagctaacattactgctattttaaagtaacattttctttttataaccaaattaatgttagaatcacaacgtggaattcagcctagctttctcatgatagagttatgaattgaaattatcagataatattatttcagcatcagatacaacttcttattttttaaaacactctaaatccaacagaaactgctaataattgtatttcttattatatgtatcatttagaaattttccagagtgattttcctgaaatccctagagtgaaccccttttcctatggatcgtctttctatatctatttctttcccttctctcttaaaaactaggaagaaggtcgtggtcaaggtttcactgacggggtgtaccaagggaaacagctttttcagtgtgatgaagattgtggcgtgtttgttgcattggacaagctagaactcatagaagatgatgacactgcattggaaagtgattacgcaggtcctggggacacaatgcaggtcgaacttcctcctttggaaataaactccagagtttctttgaaggttggagaaacaatagaatctggaacagttatattctgtgatgttttgccaggaaaagaaagcttaggatattttgttggtgtggacatggtaagaaaattttggattaaatatctttgtgatatatatattagtttatatatatatgtatatatatatataaacatatatatacacacatatatatacacacatatatatgtatagtttatatatatatgtattagttttaggaccaatttacttgcaaattgaacactttgaatatttaacatgatctaatttggagtactttaaagaacatgttctaatttatctttggtaaaggagcattgaaatagaacaggggtctagatacagattacatttacttttttttcccatttga

SEQ ID NO: 83194 - DNA, 1048 bp, Homo sapiens
atttaaatatatttctttttttttttttcttgtttgtttccatgctagtgaatactatcttatggggcatggtggggaggcaagaatgagggttaaaataaatagccttctccttccctgcctgttttaatgcttgtagaaatggtgcgggaaagcccgtttaaccaggggaggttgaagcatatattctgaaaggaaatacaagaaggacttcatgctggattaaggaagtcacttcttaaatcagtagctgtgggctgaagcactgattactcaactcctttttcttgatgaggttctcagtacaggtgcgaagagggagtggtgagaaagggtatactagaaacaggtcttagaaaccttagttctttgtatactatctctgtaaggcacggtataatgcatattgaagcatttctttttcaggaagatgagtgtgcaggctgtacggatggaaccttcagaggcactcggtatttcacctgtgccctgaagaaggcgctgtttgtgaaactgaagagctgcaggcctgactctaggtttgcatcattgcagccggtttccaatcagattgagcgctgtaactctttaggtatttggatgctttttgtttacttaacaacctggaatgactctaattctaatctcatatcatgttatattaggtgatggtgacagtgttttaatatatttcttgccaacgctcattaagctttaaatcagtaaaaatgttgcatggtgtataagaaagttgttttaagaggggacatcttaaaaaagtattaggacgtgcgtttgggacttataaagtgaataatagtgtggtttgtttttctcttcctgttgatgacagacatttagttttcagcaatactagtggtagaaattgaaatgtaaccttcttttttttttttactgacttccctcacagtgtcttgtttacagcagtgagtgtatcttacaaagaaatcagcattttagtgtaagaagtagatttcaactgattgctggaggacagctctcctcatcatgtgtaattggtggcagt

SEQ ID NO: 83195 - DNA, 1049 bp, Homo sapiens
gcaacttcagataaatagtgaaatatttgggaaacatattttacttgacagatgctttttacacataatactctaaagtgtgtttttaaatcttggaggaaatgaagttgaaaatgaacaatagcaatttttataagccaagtcaaatagcagttaaccaaagcctactttccacttaaagaaaaaattttgcatcaaaatacaaaaacattttaaaatgaaaaaatatttatgggaatacatattgtaatagtttaaaagaattcttttcatttactttttttaaaaaaatcttttcagcatttggaggctacttaagtgaagtagtagaagaaaatactccaccaaaaatggaaaaagaaggcttggagataatgattgggaagaagaaaggcatccagggtcattacaattcttgttacttagactcaaccttattctggtaagtttaaaaagaatgcaataggtatagatagtgccatgaggcagggacacataccggtgtgtgtgtgtgtgtgcgtgtgagtgtgtgtgaaagaaactgccatctgcctctgagtagagaaactggatgactgtgggtcaggattgaaagggagatttgctttttatgacatactccttttaagcttttgaatgttgtctcatgtttctgtgtccagaaaggtgaatgatattggtacaatggaatagatatacagagggtatctgggaaatctttgtgcatgtctcaaacaacataacttgcagtaaagccattggctgttatgtgctgtatttcttttagtaggtaaaggcagtcataaaactactgtctttaaaaaaacgattttcagtagcagcactgctgccctcatatatgcaattttttccaaagtggaacaacttaagattttttttttttttttttttttttttgagacagagtctcactctgtcccccaggctggaatgcagcggcacaatctgggctcattgcaacctctgcctcccaggttcaagcgattctcttgactcagcctcctgagtagctgggattacaggtgtga

SEQ ID NO: 83196 - DNA, 1048 bp, Homo sapiens
gagccaccgcacctggcctgttagtcactcataagtgattttagcatttaaagaaatttattaatgtaatagatctttgcaaaggggcatggggagagggaagtggggcactgaatagtgcttgcctcgggaagtcgtttccaaatgctgtcctctgttgtctgtttgtaatttgactgatatttgtagtctctctatcaacttttgcaaagaagttttctttcttaatattctgttggcacgttgttatcctttaacactgccaatctgccgtttgctttctcagtattattggtgttgtccttaacatggaaggatctgtaggtcctgatgattgaaccatgggtatcttcacaggggtcctggtacctgtgttaatgaaaaacacaaattgttatgttatttgttctccagactttacttattttcctcttctaattctgttaaaaatctgtttcttgaaaaatatgtttacagcatgaagaaaattatcctttttcttttgcagcttatttgcttttagttctgttctggacactgtgttacttagacccaaagaaaagaacgatgtagaatattatagtgaaacccaagagctactgaggacagaaattgttaatcctctgagaatgtaagtagaaaacaaattgctattttgcctttacatggtgttctatttgctgttttctggtatagtaattaatttataccttgtcttcatgtaataagagatgggtgaaaattagttcttatggtaaaatattacgtttttaaacctttggtccttgtacttttttgcttatttaatttcttaaatgtggccaaggtgtagaacatagcatattccatgaaatgatttaacctattttgctagagtaaactataatttagcaattgcagtatgtttaggaaagctaatacataatacttaggattcttatcttttgaaatagtttattccaacacttctgctacaagtaatcatgcttattagttaaattggtgtagtctagcttcttaaatctgaaagaaaaggagaaagggaaat

SEQ ID NO: 83197 - DNA, 1011 bp, Homo sapiens
atgagtagtatccttctgtgatgacattttctgtattatatttgcaaaaacaatctgtccaaaacctttaataaatataaacccaaataaaatgccatgattttatttgagactcaagattattgaactctgtgacctctaggtgctggtgtgcccctgcgatcatgagccacttgaagacttgtggcttattggtgtcctctgtccacagcccatggtcacgtgtggatcctgtttcataggacaccaatattaaggcagaactgttttgtttgacagccatgactattttggtttcatagggaaaagtgttttttttaacactttgattctaaaaatatctgtcttttttataggcaccatcatgtctgattattcagatgcctcgatttggaaaagactttaaactatttaaaaaaatttttccttctctggaattaaatataacagatttacttgaagacagtaagtatgagatttttttagtttgttttgttggttttgtggaaattgtcagataattctcatcagttgtgggttagactctaactggacacagtatttcccaaggcaattcagtatctgaagagcctggaaatatgaaaccagtcattttatttctaggaatttattctgagaaaacacaaatgaaaataaatatttgatatgcaaatatacttattattatatgattaagaaattagaaacaacttgaatgttaaccagaggagaatggttaaatgagtgtgtatctaacaattaaactactgccattaaaattcatggttttgaagaccaatgtgtatgaaatggtcatgatgtaatattaagtggaaaggtaagtacgttgatatattctacaaaaggagccatatacacacacacacacacacacacacacacacacatgcatatatacctatgtaaatattcagtatgaaattattagagaaaattcataatcatattgacagtggttatcttctgccaactaaaattgtagatgctttt

SEQ ID NO: 83198 - DNA, 1114 bp, Homo sapiens
ccaggctggagtgcagcagcgtgatcttggctcattgcaacctccacctctcaggttcaagcaatcctcccacctcagcctcctgagtagctgggactacacgcatatgccaccatgcctggctaatttttgtatttttagtagagatgggcttctgccatgttgcccaagctggtctcaaattcctggcctcaagtgattaaccctccttttcctctcgatgtgctgggattacaagaggagccagtgcacccagcctcatattgtgatattttgacatgcatatgctctttttttaaaaaaaagaatcctaaaattcttatttcagccctgagggatcttatttccagcttcgctgtcttctttcaggcccctctcatttttgtaggagccacggtagctgtttattgagcaccattaagtcattctacctaaatcctggcaagatggggattattcctgtttttctgttattaaagctgaggtttaaggggcttgaggtattgtagtttgtgtttaactcagtctttctgatctcagtgcatatgtttttttgtactaaaccatgttatcttccaattgccaaaagctgagagcagaagtaaacatccttttcagaaaagtaaagcctcttctgcatgtagtatctttctccctgaagtggggaataggctgcagttgccaggccactttctaggatgcttaatcattatttaactaatgcttaatgaatgccaggcaggatagtgggttgtaggtaagaaatgtttgttaaagcagccctgcctctacctataaggagtttgcaggttaagaccaggcctgggcaaggttgtgaggtgtgactctcatgttcctccattcttataccctatttttcctttagctgctctctcagatccagcccccacggccttctggtgtggccctccagtagcctaagacattccctgtggcagcctcttgaacagaggcccaggccctagatcaagagttctccaccttttctcagttctctgatgcttgagggatacatcccagccccatctgtagatgtgcccccaacccagttaacatttgcactaaacagcgtaacacaacagcataggtttgg

SEQ ID NO: 83199 - DNA, 1062 bp, Homo sapiens
gatctgccagaaagtagagccaacaagaggagcaaagaaccaaaacacagaggggaagtccaagatccaataaccaactttctgagctaatcatgcctgaatttatatctaactttggcattttagttccatacatcaaccttttttgtttaagtgagtctgcagtgggcttctgccccgttagaattctttctactgtcacgtttgccatgccaggagttgatggcttgagtctaagcaggagaccacacaacaccatagtgtccaaaacccacctgttctgtgctcagtactatgtttggacctgatacacagagagtaagtctccatccctcctctcaagattctccctttgagctgtggagccaaggactcaggaaacaagataaaccatgcttccagggaatctcatttatgatggttttttttctttctttcttttttatttttattagagctctgtcggctttactctgaccttcagatctttttctattgtatatgggttagccagctctgccttagctctcctaatacagttggattttttttctgtatgtctgggtgctcaattgatattgttaaaaaaatcactctgattaattgaggtcagtggatcttcagttatggccccaagaggactggtttcagcctggaggagcttgggatccgcttctttatggaactatctgagtatggggagaatacactctttgtctactagtgtcatacagacataaactatgctgctctcttttcctttaagatggtcagaattgtcttaggagctgctgggaactctgagggatggtatggtgggaaaatctcaggctcttctattctcttcccagttctgaccactcgccaccttctgattttgggcaatagccttctttgggtttgatgcctcatttcttaaaggagtgatttgagcttgatcaggtttgacattatttatgtctcacttatcccacacatttctagctgatctctatgctctttattgctgagcctaaacacagccttagaatccttctccacaccaagctagatgatctcaaa

SEQ ID NO: 83200 - DNA, 1042 bp, Homo sapiens
ttgtgttgcccagactgatcgtgaactcctggcctcaagtgatcctcttgtctgagcttcccaaagtgctggttaggattgcaggcatgtcatgttttatgcggcaataatcatgcctaggtcatgacgtgctttatgtggtaatcagttggaagtgtaagaaaattaaattagggattaaaaaaattaataattaaaatgttatcatctgctaataattcttacgctttagaacgattccaatctatgcatatgtaaatgccactcatttacatgttgggcactccccagagtggtgaggtggccatgcctcatagggaaagtcaaggtcatctaaggtcatatgttgcttacgaaaaatcactcacaagttcatggatgctgtctgccatatatgtttcaagcaacaggctgggaaccctaagtgtctcctggatatccatattacaaaaaggagctttgtagcatgtctctggtgcctttttctcattacattccctttccaagaggacactcagctcagagcagtctacactagttttccttggcaaaaatctggcaagacattctgggaaacaagcttcccccttgctgttcttgtgatagtgaatgagttctcacaagatctgattgtttgaaaatgtatggcacttccccttcttctctccctctctctctcctgctgtgccatggtaagagatgcttgattcccttatatcttctgccgtgagtgtaagtttcctgaggccccctagtcatgcttcctattaaacctgtggaattgtaagtcaattaaagcactttccttcataagttgcccagtctgaagtagttctttatagcagtgtgaaaatggactaacacagaaaattggtaccaggagagtggggcattgctataaagatatctgaaaatgtggaagtgactttggaactgggtatggggcagaagttggaacagtttggagagctcagaaaaagacaggaagatgagggaaggtttggaacgtccaagagacttgttgaatgatttggactaaaat

SEQ ID NO: 83201 - DNA, 1057 bp, Homo sapiens
aattttctctccgaattttaaaaccactattctagtggcttccagtgttgctgaggaaaactccattgcctcgctgattctcaatttcttatatatgtgacctggatttttgttgttgttgttgttactgtttaattttgatttttgtttctctttggaagattttgggctttttgctgtatttctggtgctctgaaatttcactgggacaccccttggtgtggttggctgttcatttgttgttaggcactcagtgagccctttcagtcagaacaccaaagtctgtactttctgggaagttttcttgcattatttctttaataattttccatcctctgtagctttatttcttttcttttctttttctttttctttttcttttttttttttttttttgtctctggactggaatatctattattcagatggcaaacctaaacgaatccactaattttcttatcctttctctgctctcctccattatttttggccttttctttcttaatttctgggggttccttttttatagttttgtgtttctatttcatggatggaatatcttttcttatctgagtataacagaagctgcagtgcccaccaatgtccttttgggccttaccattttagcgcacacaggcaaacttcttatcacgtaaggagagtgtgatacccacataataaaacaccaagaattggtcactgctgttagttgcattttcaacttttacagtgttataaaattattttgatggtagaaggactgatttcattatcaacctccccaaataataaatatcccatcttctgggaagcaagaggagtggtccctggctgcagatggtgggagagggactctgattccaattcagactttccatcaatcctcctggctttagccctacctgaactctcacctccccagaagcctttccagggtatcatggctcagaactgctcaattcttttttttttttaattatactttaagttctagggtacatgtgcacaacatgcaggtttgttacatatgtgtacatgtgccatgttggtgtgctgc

SEQ ID NO: 83202 - DNA, 1022 bp, Homo sapiens
atttggttgaatctgtcctctcaaaatccatgccttgctgtttccaccaatcctgacctgttgaatcatgattttacccaatcctgatcaagtccttgcattgagacgtcctccttaaaccaaagttccaattctcaatacattctaacttagcttcccctccctcatcctacacccctctgtgagacaccatcaaaactctgccaatggtggtgtctccgttgctgcagtcaacaacaaattcagctttgtcttagcagcagttgggttggtgataatatttggggagctagattttgatactttctctctttccaatcacctgcctgagtgaaatctctgttggttgctagcttgtctttgatgcctctcttgttttttccaatctccttttcaaacaaagatcaggtctcaggctcagagctttgaacaggcaaccatgtccagtgaaaattgaaacaaattgctttgtgttaattgaattatttttaattcgttgcaagcatgatgtcaaaatgatacacaattgtttcatatatagctgtatagtgcaaggctcatagtgaacgaggcttatcataaacagcaggcccctggggttggcccactcaaccccagaatgttagctccctaaaacaaccactgtcaatttttataactgtgtcttctatattttttccctctgtacttttaaatgatatgtttatgctactttctcctgatttttcagacatcacacgtagatattattaatttcccaatatgaatgagtggtcatgtctttctcatatatatctcccctctttccaactccccaccaaaagtttattgcattgtattttattaatccagatttagtgttttattatgatgaatgggtacagactattcccagcttagttgagtggtgttttaggatgtcattctttcctggcccctgcttccttttgctgggctttctttgactgtctgggtgactcttcccacaccctccaggagctctgtacaaaggccttcaatct

SEQ ID NO: 83203 - DNA, 1033 bp, Homo sapiens
atgggatgcctgcttttagatttaatcaagggctgacagacaggtaggacgccggcatattttagttggagtctctttcttttcaggaaagaatgaaactacttaatattcagtgtatcctccccccatcacccacccagccccactattccacagtaccttgtgatctctcacgcctttttctcatttctgatgacattacaaagtacaaaggtcatccaactgcaagcaaatccatttcttaacatatttttcactctattcttcccttacaaaaaaaattatagaggtgtgcagtgtgtgtgtgtgtgtgtgtgtgtatatggttaaaaaaataaaacaagggctgttaaatcaccaagagcacacccaaatctccatttacatagacacagacataaataaacgatttaacaatttgggagtcatgagtctctgacctcatgctttctcaactaacctttttaaaagattttgatatcaattgtttctcttttttccccagaagcataatacatggtaaccttagcatgcacaatctgtttcaacagagggatacagacaagtgcaaccaatggtggattttaatgtcatggtagagcttatattaccttgctcgaaacaaaatctcccccccacccccttcaaatgcaagtccaatgacaccccctttggagatcatttgttatgcagagtttcgtgaggcaatcaaaattaattcacagtgatcttttcacccagagcctccagtttctaataatggtctttctcaacaggtgttcattgtggcagtctgacttcaaatcgccagactaaaggttttattctttagtcatttcttttttaatctcgaacttgtaatttactaatctgcagcagctgccaagaagggcgcagctgcttactgagaggggaagtgtacctccgaggaggcaagggcagggaagaacttcacttccagaggaagaggaggaagaaattgaaattcatggcctggagagaggtacagtcctgggactggagacctgacatt

SEQ ID NO: 83204 - DNA, 1027 bp, Homo sapiens
ggtcctgcagatcagctggagatacctgaagctggctttgcgctttgagtttttacatcccaatcttcacaggccaggtctattcaaatggctttttagggagtggagggagggcattttttttttttaattacaagaaaaaaatgtcttcaaacagaaaattcttaatgatttgcagttgacataaatttctagcagtagattatttgcttattgtttttggcatgtcgtgaatgtcaagaatgagagagcaaaaaaaaaaaaaaaagctcctactctgttaaaacttagcagtcctgttagaaaaataaagcaatggattatttgctaggagttacacactccatcccaaatgaaacaaatgtcagagtgggtaacaaagtggaaaaaagtataaagtgaatttcaaagggctccacagtaaagcgcaatctgagattcacagaaaagtagagacggataagacaggaattaggtcatctcgtccagaccccaggaaatatgtctagatcaaagcctgctctgttagaataaacaaaacaggacccattgggccctaccaatattttcatctcagtgctaagagctgctaatctaaccagctctatttgatgaaagggagtaaaaattacaactgtaaaaatgacgacgtaataaatgtcctctcaactcttagaggaagataaagatttagatttgagctaaaaagtaacaagatccaggcccagatcaacacaaacttcctggaattttagcactaagtaaattatctaatcctagccattgttccctccctgctgccacccctcacccccacccatcccgtgtaccccatgcaattgagtatgccagatgatttacattaaaaatttgttaaattttaactgcagtctgaggacattgcagggggcctttggggttcccttcttttgcattccttaaagacccaccggttttctgtcccccaccaaccccaatgtggcctgcccccctggcagttgttggggtagcaggctggacttctttg

SEQ ID NO: 83205 - DNA, 1896 bp, Homo sapiens
gacggggtcggcggctctctgtggatggccccatgacatttctaggaggcaatcccgtcaagttcccagaaatgttccagaaggatttggcggcaagatcaggaagtggggatccttccagcttctggaatcagtatgcagcagcgctctccaacgggctggcgatgaaggccaacgagatctccgtcattcagaacggtggcatccctccaattcctggaagcctcggcagtgggaacagctcacctgttagtgggctgacgggaaacctggagaggctccagaactcagagcccaatgctcccctggccggcctggagaaaatggcaagcagtgagaacggaaccaacttccgcttcacccgcttcgtggaggacagcaaggagatcgtcacgagttaaagcagctcgggctggagacatagcattcattcctgttcagaatgcgacctatggtggcctcctactccttgccccccaccccgccccgccccttccttctgttccccagatctatgaactacaacattatgaagacattcttttgtaccttgttcaactttagagttctaagaaagcttatttattagcgatataaccttgctttgcaaacagaatgcaagcgttaactttggtcttctgtattttggactaaatactaattgactagagtgctgtaaacttgctgtaacatttatggcaattgcaagttgccctgctaggcagttgtaatctggcattaacttattttctatatccagtttaatatgaatctggtgttgatgcaatgcctcagtgatgcattagatctctaataaagtctgtatatacatgtacactttgatcctgctggaaaattttatcagcaaacacattgtctaatctttcaaaacagatttaaggaaaggactgaaagtacagactgaacagtgtggttctttgaaaggtttggttttttaatttttattctaaaattcaacctttttttttgtcgatttaaccatttccattttgaactgctatttgtattgtgctttttacttgagtcgtcttcaatgttaataagtttctgtacagtaataagcacgcagaattctttagagaaaaagaaaacaagcgttgttttggtagttgaaactgagacgtaacattttgccttgtaggtatattcacgatagaaaatgtgtgctggaatttcacaatgctgctaagtatagcatcttgaacaaccttcagtggagaaaatgtagatgctcttgtatatacaataagaaatatcactttcattcaaatgtacatatgttccttacaagagcaaatgcttcttcttgatcaagagagcaggtatagtgtttgtttattttgtcttaggtatggaagaaaaaaattggactgttacatgcactttcttggaaagttgaaaggaaagggggggtccaatttctttaacatttaatacttactaacaacagagatactgtaattttactcaagtaatcaaatacattttttttgcaacagataaaacaaaatactgtgtctgtgtttttagagtgcatttccatttagccaggccccaaatgcgttttaacatttccccaggcagcagtcaattgtgtatgtgagtgtgtatccctctttaaatgaggaattgtaaaaggcataacaaacggctttgcatgggcctgcgttttcttttattttgaaatttggaggccctagatattttcccagtatctatgatttatttaggaatggattttatagactccactcgctacccaccccacccccaagaaaagcaaaacaacgaaatgacataaaaagatgttgttggaggttttaacccaacaggtaagtttcttttaagcaagatatttatgccgatttagatttc

SEQ ID NO: 83206 - DNA, 5274 bp, Homo sapiens
ggattctaatcaacttcggcatcactcaaggcaaatagagttaaggaatttccagaagttagtatttaggtattaattttattttctggaatgcaaaactagtcaagtttttaaaaatgtttactacaaaaaagcaaacagctgaccctttccaacggacttttaagtttactgaaaaaagcagcattttgattttacatttattcatatctgcaattactttgttttctgcaagttttctgggagattcaatttggaagtcatggaaactacctattatctgattcagttctgcagaaaagcatgcagggaggtaatccttgaattaaacagttttttttttttcttcacagccttcgtagatgaccacacaccatttgtacaacagaagttggtgttccccatgctgggcaaacaatgggaagccatcctgtctttgaataggatgttagcttggagttagagatttttctgtttaatttacaaatggatcttagtgagaagacatctgagcaaccaatggaaacaaacatgaaataaagggatttttataataaaatgttcaggacaatctgttaaacgattgataacagttaagagcaaactgtttttaaaggcattcagacaaggagagctgcaaagcattttcaaactctaaaccaagaattatttcttaggagatgggagcacttctcaactgcacatccttcttgaagttgatgtttaatcagaaatgtaaatcttgtgccagtttttatagacatagagagcacttttgatgaaatatttagaggcataatgttgccattcggagcatggtggcatatattctttgattagtggaatggtagccggagttacatctttaattttaaaaataaacatgccatggggtgatatataggtgccaggcaagccttgtaatggattaggatcattgtgtttctcttcattgtgtgtgttgccatccctttgtgttcaagtgagttttgaggaacggtctggaggatttgttactgatgtgactaaagtgcgtttgtcagggatcagacttagcgcaggttcgaggtaggggcttgaggtgattttcaagttgtcagtctacagcttggtgatatgcatttttttcccccttgtcaacaactgattggaacctgaatgactacaaattagtttagtgacagaacaaactgtcacagatatctttgagtcggttgaaaatgaataaggttgacagaaactcaagagcctaataagtcctcagaatggtttgtggaccctctccggacaagtagacaataaggtgtataaaagattggaaatcaatattttgctatggaatttcatcatgcaccaatgtctcccatttgtagtattttatattttgatgaattatatgaaggccatgactctctgaaataccggatggataggaattcctccatacccttacaaattaattatggatgttcttaggtaatattgattggttttcaagggctacagttttgagttttgcaggtggaaaaccattgattagcctttttttttttaagtcataggtgactgtgtgtcctggccccttttctaatcctgcacctttttgacatttgtaggagacacagaaaagggtcaaccgagtcgccctactaagagcaaggatgcccacgtctgtggccggtgctgtgccgagttctttgaattatcagatcttctgctccacaagaagaactgtactaaaaatcaattagttttaatcgtaaatgaaaatccagcctccccacccgaaaccttctcccccagcccccctcctgataatcctgatgaacaaatgaatgacacagttaacaaaacagatcaagtggactgcagcgacctttcagaacacaacggacttgacagggaagagtccatggaggtggaggccccggttgctaacaaaagcggcagcggcacttccagcggcagccacagcagtaccgccccaagcagcagcagcagcagcagcagcagcagcggcggcggcggcagctcctccacaggtacctcagcgatcacaacctctctacctcaactcggggacctgacaacactgggcaacttctccgtaatcaacagcaacgtcatcatcgagaacctccagagcaccaaggtggcggtggcccagttctcccaggaagcgaggtgcggcggggcctctgggggcaagctggccgtcccagccctcatggaacaactcctagctctgcagcagcagcagatccaccagctgcaattgatcgaacagattcgtcaccaaatattgctgttggcttctcagaatgcagacttgccaacatcttctagtccttctcaaggtactttacgaacatctgccaaccccttgtccacgctaagttcccatttatctcagcagctggcagcagcagctggattggcacagagcctcgccagccaatctgccagcattagtggtgtgaaacagctacccccaatccagctacctcagagcagttctggcaacaccatcattccatccaacagcggctcttctcccaatatgaacatattggcagcggcagttaccaccccgtcctctgaaaaagtggcttcaagtgctggggcctcccatgtcagcaacccagcggtctcatcatcgtcctcaccagcttttgcaataagcagtttattaagtcctgcgtctaatccacttctacctcagcaagcctccgctaactcggttttccccagccctttgcccaacatcggaacaactgcagaggatttaaactccttgtctgccttggcccagcaaagaaaaagcaagccaccaaatgtcactgcctttgaagcgaaaagtacttccgatgaggcattcttcaaacacaagtgcaggttctgcgcgaaggtctttgggagtgacagtgccttgcagatccacttgcgttcccataccggagagaggccattcaagtgcaacatctgcgggaacaggttctccaccaaggggaatctgaaagtccactttcagcgccacaaagagaaataccctcatatccagatgaacccctatcctgtgcctgagcatttggacaatatccccacgagtactggcatcccatatggcatgtccatccctccagagaagccagtcaccagctggctagacaccaaaccagtcctgcctactctgaccacttcagtcggcctgccgttgcccccaaccctcccaagcctcatacccttcatcaagacggaagagccagcccccatccccatcagccattctgccaccagccccccaggctcagtcaaaagtgactccgggggccctgagtcagccacaagaaacctaggtgggctcccagaggaagccgaagggtccactctgccaccctctggtggcaaaagcgaagagagtggcatggtcaccaactcagtcccgacggcgagcagtagcgtcctgagctccccagcggcagactgcggccccgcgggcagtgccaccaccttcaccaaccctttgttgccgctcatgtccgagcagttcaaggccaagtttccttttgggggactcctggactcagctcaggcatcagagacgtccaagcttcagcaactggtagaaaacattgacaagaaggccactgaccccaatgagtgcatcatctgccaccgggttctcagctgccagagcgccttgaaaatgcactacaggacacacactggggagaggccctttaagtgtaagatctgtggccgggctttcaccacgaaagggaatcttaaaacccactacagtgtccatcgtgctatgcccccgctcagagtccagcattcctgccccatctgccagaagaagttcacgaacgctgtggtcctgcagcagcacatccgaatgcatatgggaggccagatccccaacaccccagtccccgacagctactctgagtccatggagtctgacacaggttcctttgatgagaaaaattttgatgacctagacaacttctctgatgaaaacatggaagactgtcctgagggcagcatccctgatacacctaagtctgcagacgcctcccaagacagcttatcctcttcgcctttgcccctcgagatgtcgagcatcgctgctttggaaaatcagatgaagatgatcaatgctggcctggcagagcagctacaggccagcctgaagtcagtggagaatgggtccatcgagggggatgtcctgaccaatgattcatcctcagtgggtggtgacatggaaagccaaagtgctggcagcccagccatctcagagtctacctcttccatgcaggctctgtccccgtccaacagcacgcaggagttccacaagtcacccagcattgaggagaaaccacagagagcggtcccaagcgagtttgccaatggtttgtctcccaccccagtgaatggtggggctttggatttgacatctagtcacgcagagaaaatcatcaaagaagattctttggggatcctcttcccttttagagaccggggtaaatttaaaaacactgcttgtgacatttgtggcaaaacatttgcttgtcagagtgccttggacattcactatagaagtcataccaaagagagaccatttatttgcacagtttgcaatcgtggcttttccacaaagggtaatttgaagcagcacatgttgacacatcagatgcgagatctgccatcccagctctttgagcccagttccaaccttggccccaatcagaactcagcggtgattcccgccaactcgttgtcatctctcatcaagacagaggtcaacggcttcgtgcatgtttctcctcaggacagtaaggacacccccaccagtcacgtcccgtctgggcctctgtcttcctctgccacatccccagttctgctccctgctctgcccaggagaactcccaagcagcactactgcaacacatgtggcaaaaccttctcctcatcgagtgccctgcagattcacgagagaactcacactggagagaaaccctttgcttgcactatttgtggaagagctttcacgactaaaggcaatcttaaggtaccttgctctctctgcaccatacctgctccatcaaccctgtcccactgccattgattatctataatgcatgcccccagagtcatcagcccagatattcagggagagagctcttgcaagggaacctgctgcacatggttgacgggggagaaatgggggagagggtgcctgggagggtcaggatcatggcagggacaagg

SEQ ID NO: 83207 - DNA, 2317 bp, Homo sapiens
ttgttattttttcagagatttcacttgtattcttccacaagagaatactctaatccccgtcagaacagtgagtgaacttgaagggtaccaggaaatttgtcatttggtggcatatcacatagaggaaactttagacatcacagaaaatatgcacagcatatgtcgtagtgtttaaaatttctttggaatcctaagttggattcagacttttccatttggattcagacttttcccaggtcgatgcagaaaaaaaaaaaaagaaaaagaaaaaaaaaaaaaagaccaatcaatcaaatatgtttgtgataaaaaaaggaacaggctgttaaaattaaggactcctaaaccactatcatgagaaattctattagggagtgtaaatgcaatcttaagataatgggaagtacagtgaagtgtctttctgaagagctccaaaaaagaaaactaaacctagtagagtaaggtggttgcatttgttttttgttttgttttttcccttcctggctggctaaacctttctgtgtgggacatagttttatttttattttctcagtagacagatatggtagaacacttcaattttctgcttccgactctgcagtttggttcagatgatgaaaaactgacaaatttgaattaggcatcaggtacctaaatagtacaacaggaactaaagcatctgggattttagtataaatttggtggaggtataagatcactcttcccgcccccccaacaaaaggcccagaaaattccaaatatctgtttgtgtgcacatacttagaaaaccactgcttcttaaattttgctatctgactagggttgcttacaaaataatctgtatgcaaaatccatagaaaaggaacaggaatgttattttcaccatagtacaaggaacaaggcaactgtatttactataatggggtcaccagttgcaatcttgtgtaacagattactgagagagatacaagatagcagacaatcagaaaaattaattataacatgttcgtgtgtacgtgtgtgtgtgtgtgtgtgtgtgtgtatgtgtgtgtgagagagagaatgtgtgtgtatgtgtgtgtgtgtatcttactacaaattaaaatattccctttggtaaagagtccaactagtcctcatgttttgtctttttttttttttaagtaaaagactgtttccttggaattttgttccgaatgcagatagatttcaagttaagaattattgcagtgtagcgacacctgcttttgaaataaatcaaaatagataccagtattttggggatgtgggggtgttcataaacatcaggaaattaaattagttcactctacagtgagatcaaatgtcagcttattaaaaatgttgtgaaaacctaagctaaaatatggacaactttttaacacagtctcttaaaagcaagcaggcatttgcatttatttttaaacatctatattttccatccagttagcacaatcctaaatataaaaatgtttagattgaaaaacttgaaaattctcaagtgagtctcgaggcagcacaaatgcagaatttgagtgcaggaaagtaataatcagctaaatcctgtaaagtaaccttccttttattttctctgtatattatgagaatatcagatgtttgcaagttataaagaattaaaatctcttttaatcgtgagcacagatgtgctaaatatttgaagcaactacattgtaatgtgtacaattgatgaagtcagttttctgatttcccttgctagttatttagttctgaatctgtcattatttgtctaagcccagctgaccaagcaaaactgtgttttaaagtggctttatgttttgataaatgtgagctggttgaaaagtattttccactgaatgcagagcttaatagaacatgctgacataatagttttaatgcattttgttgaaaatgtgtgaacaaacagaatagcttttgttccttcataattggctgtaaaagtagatggaaacataaccattacatatggaaatgtgcaaagagaaagaaataacatttctgttgaatatattaggaattgcatttcctagtttaaaataagcatctgaaatggatgcatcatttaaaattgattgtcaaaataagaagctttaaagagaatttttgtcacattatttttgtcccaagttaagcaatataacttcagcaaatttcatctaatattttgtttatatgattttaaggcaggggagaagcagaaagggcttaaaacagcaccttccatgtgcataggaatccagtgccaattagaatgcttaaacattaaattaaaaccaaa

SEQ ID NO: 83208 - DNA, 2482 bp, Homo sapiens
cggcctctgcgatttctcagtccgctgaaaagagcccctgaaccccgctttccaccccaagcgaaagcgagcacgcggggtagatggaggtgagatgacccaaggccgcagcagctgcgccgagtatttttccgggttttctcagcttagtttcttctgcttcccgcagtcacactcatctttcctaaagtttctggtgagaccttttgcaccggaaaactgttcaggttaacagtttgtacacaaaaaagcaaactagagataagagagcattatatagtgtgttttgtaaatttgtactggttttctacatttaaaaaaaaaaagtctcggccttcgaggagaaatgatgcgtggaagatctttgccttttgccttcagtatcaggaatttttaatagttaagtcttctcataaagcaataatataaaaggagttcactacctcttaccattattctttattagtactatttttttcaatttagtttatttgagctttgaggtaagttaagtaactcaatcaagtttcctttctttctcttttctctccttcttttgatttctttctcttccttcctttcttttttcttcgcaaaagctggtacattgtcctaaagaagcagtaaactgttaggggctccctaggaaacaccccctcccagccttctttcctcacctctccccaccccctcctctttttcttcagtagtaatggttttaggttatgactgtttttacatggttgaacaataagtttgggagaagttgcctagagggtagattttgtaatagggtttcaggatttagtgtgttgtaataatattagtacacaagtaatcctcccccaacgctggacatacaggagggcctaacatactccagttcttttatttgggagtagttctgaaataaatggcattgaaagttcatgacataactcaaggttaccttttaaaagtcaccttttctgcagtgagttcagcaatctcattcttctccccacatataacccatacttctaggagtagctggattttctgttttgttttgttttttacgtaaagaaacattgttatatttttagaaggcaagccccttttcaaacattctgattactttttcttatgtcttgagatggtctttgaaatatgacaaatgaaatatgaaacataccaaattaaatctagttcatgcacttctcatttatcagcacctcagattgtatgacttctacccagagtgagacctagaaaagtttgtagacctaagttacaggagccctaaagaagcagctcccaaagctgaaagcagctagggctgcttggtgttgtgtgtcctgcctgtgtgtgtttgagtgtgtgtgtgcttacaaagaaaatccagaccatgctaaggagccacacagacagcttcatctgaagcaaatgcaaacaaaatacaaaaacaaaaacaaaaatgagtatttggtcgatttcaggatgctggtattttattttactttagtgtacagctgctatgccagaaacactctaaacttggtaatttttctgcttcttatgaaaccaagattatggcaaatatgacttgtctcctaaatgatattcaacaagtcttgaattacttgcagaaagatgactgctactggaaagactgtttatcaagttaaataattctgaggaaagggaatattacaatctaatgattttatatgtgggctctttactacaaattgggatttcagttatgtgttttgtgtgcgtaagtgcatgtgtgcatgtgtgtgtgtgtgtgtgtgtgtgtgtgttggagttcttcctttggtggcgtttttaagattcctgtaacttctacatggatggcccatttagactccattcatttatttaaaaagtattttggtgctcagttttttcaaggaaaagataatattggaagaatgaaacaccatgaattgcagataaaacactaacaatcatatgaagtatcataaaaattcctcttatttatattaataatgaaattctattatttaaccgaagtaatttgctcattttgagcagcttcatagcaacacattgatctctgggcccaaaaggttagcgagaactgtaattaattgctttttttaaaaaaaaccaacacctgcaagataaggcagttggaaagaattcatgtttaatcagagctgttttaagtttgtcataatggaagattctgaatgagaaaatgcaaactgttttttttgtgatttgcttcaggccacacatactttgtaaaatattaaaaaacaaacacataaatgagcaaagtctagttaggcatgagggtagtatgtgtgaaagtgaatatgtgatactgaatgttttgtggtttattttacatcacatttcccctagagttcattggcacaagtgccaacgtataggttcttctttgggggctctatttgttttctttatacttttggaggtagcaagttgt

SEQ ID NO: 83209 - DNA, 1049 bp, Homo sapiens
ctcccgggggaaggagggcgggcatgccggcctggcttctccgtccctgcttttccggggatcccagccgcggccaagacccgggagccccatgaggcgtgggtgcgggtggaggtcgccccggcctgaccgcacggggcccctagcgctcccggcgccggccccagggcacccggcccggcctccgccgcccggccttgctgccagcggtaaggaagtttacttcgggcgctgggctgaactccgagcgtgggggagttcgctgcgcccccctgcccccacgcacactccccctcggcctgcgaggcagaaccgggtgtctttggaggttcagagctgcaagaagatggggactggtgtcggggcgccagcgcctgacccgctggggttgcggccggggtggagagtgctgctggccgccagttgttccggagacggtgcaaacggacggggaaagtgtcggggtctggctcgcaaaatttatctccgcatctcttcccacaacacttgcaccctctgccccccaaaatctttctggtcggtatgcgccctctgcggatcgtggtgctccctacttccaggggggtcagggaagaagtcatagaatagttttccaggtttgcgggtggccagccagagtggaatcccccctgaaacaggggcacttgttttctccgatggaggcgacaactgtgggtcccgaaggggctgaacaagtccagaacaaagtttgtgtgtgggggctatggcagagagtggaagagatccgggcagggagttggggtacaaagggaggacacctggaatccctccttgctcctaaaggtgtttcacggtaccggcctcaaagctcccaggcctagcgcccgaggcggtgtagcggcgcccggactcgggtccccgggtcgtcccggcacgatgctggcctctcggctgtgggaggacgcacaaggagcaatctcggcggggtctcagcggctccggatgccactcgggatgcccacgccctaggcggcattttggggtgtgaaggagggagctgggccccg

SEQ ID NO: 83210 - DNA, 1050 bp, Homo sapiens
ggcgtggggctggctcttccccactcgcttatttttttttttaatgggggtgggggtgggctgctttctggtagctcttaaagaaacgaagaaacactcacgaaacgggacgccctcccccctgatcccgccgcgggactccctccccccgcgggccggcgcgcctcgcccccgagttgggaagttcgcagcgcgccggcagcccgggtccccagccctcgccgcccggccccaccccccacccggggcggctcaattccggggagggcatgctaatttgggtcggcccagcccgggattgtgggggggggcgaaggagggagggaagagggaggggagagggagagagcggggggcgcctgccggggcgccgggcccgcagtggagaggaggccggcccccggcggccgggccgcggagtcccgggcggtcgcaaagagggttaacccagtgtcgggcggcgcggcgcgcagagccagccccgcggccggcttattgggccagcgcgcggagagacaggggtctgcagcaaatcacgaactaattgattaaggcgagcgggtttgaatagcgctggcccggtgccaatcgcctttcaaagagcccctctatgattaatcgcaatgcattattgataatcataattatagcaggacacatgcgcgctgcgcccggggccggggagccggggagggggcgggcgggccggcgggcggggggagccgccgccgccgccgccgctcgatttccgtaattttgagaagatttttttttagtaattttttattctgccccagctgatgtttgagccagcatgtcgcggaggaagcaagcgaagcctcaacatttccaatccgaccccgaagtggcctcgctcccccggcgagatggtgagtgctccggcccgcgccgtggacacacacacacgcactcacactcacgcacactcggacccactcacacgcggctggcccccgcgccccctacctcaccgccgccgcggccccgattgcttcttccactcggcgtaattttttttttctttttaat

SEQ ID NO: 83211 - DNA, 1050 bp, Homo sapiens
aaataagcgagtggggaagagccagccccacgccggtccgcctcccgcccacggctcggcctccctcccgcctggctcggcgctcctccgccccgagttctccatcccctggatcccgggctcgcgggggcgcggagaagaggatccaggaaaggtttgggaacctgatgggtttgtggctggggggaggggcagttctcccgccaccccatcccctccccgccaggggcactgatcctccagcttcttgcttgctccctcgctccctttctctacctcggacattcccaggacaattagggctgaagttttcgggagaagcagccccgagcccgtgggataagggggcggcccggctccgcccaggacccctcccggacctcccccccggctgccccggttggctgcagggcgcgtcactccgcggggaggcggcggcagcggtggcgccgcagagccccgggcgggcggagagcggggaccggcctgggctccgagttcagctccggccggggggaggggaggggctgcggctcacactgagcgcagcagcgagcaccggcctagggagacacagcccgggcggacccggcactggactgggccagtccctgggacccctgggcaccccgccctggggagggggccgcgccccagccttccgggacgaggtggcggcgcagagccggaaagcggggtggggggagggcggtggggaggtgttctgtccgaggctgcctggcggcgccgaagctcgcctccactttttgggcacttgccgagcgcggcgcccgaacttttcgctctatcaccatctccctcaagctgagatgcaacctccctaccctcgccccagagcccagagccaggagcccgatccctctgccgggctcaggcgcccgcgaacctgagactcggtacgcggctcagcctagctctttcccctcgcgcctcggggtctcctcgctccaaggttctcgaagtcttgcgcccgaaggactaaactaaactaaacttcggctgagtaatgggggaggaggggggtgcaga

SEQ ID NO: 83212 - DNA, 1054 bp, Homo sapiens
gattgactaaactttcttaattattgcactataatttctttctttcaatttttatctttgtctcttcagccacattaacaatattgttctcttcaactcaacatccagtttgacatagagttttacatttaagacaccaacatttcccaaccccaaacccgtgtctccctgttttcttatgccttcttaaaacagaagcaattatccctgaagccataatcccaaacccacacactaatgttagcaactagttccagtcttttcttcctcttcatgtttataaattctccttctgtcctggcctcccctctttcatcctggctttcctcacttccccaagactctttgacatgttttgtagtaaattccaatcctcgagaagattcacccagaagtttgctcagggtgtaatatctgtaacttttgctgagaactgggcccaggtcttgctgtggactttgctcatgctgtaatggatgcctgggaactaaacaagggaagatgccagcacattcctccttctccaaccaaagcaaaatgatttcaagagaactggggtgcagcccacattttccaggtttgtttttgtttcctctttctttcctggaccccacaacacgttcagtttgggagaacagtgctgaataacccagttcctattatctccaccccatggacaatctctcctctgcagatctcacatatttgctgtggactcgcttgattccacatgtgctacttgggagttgagcgtgcagactcacagtcaggttatttgggtgcacattctggctctgccatttaacactggccagggaacgcagccctaagcttgcctctgcggatcggggagccttgttcaaattaagatcgccactttgggaggccaaggcgggcggatcacgaggtcaggggatcaagaccatcctggctaacacagtgaaaccccatgtctactaaaaatacaaaaagcctgggcatggtggcacgtgcctatagtcccagctacttgggaagctgaggtagaagaatcacttggacccaggaggcagag

SEQ ID NO: 83213 - DNA, 1391 bp, Homo sapiens
tgagaaggtatgaactatgtcaagatttgggaaacattccaggccaagaacagggcaagtgcaaagatcctgaggtgggaatgagggcagagaagtgggatccttttttattttcctttttccttgttattatactttcaggaggattaaaaaagttaaatttcctttttcaaaactggtttttgcaattgcatagtaaacagtttcattcagtggagtactactcagcaatataaaaggaatgaagtaccgatacttgcaatgatgtagataaatctcaaaagtattatgcttagtaacagaagccagtagcaaaagagtacacacagtgtaattccatttatgtaaaattcctagaaaacacaaatgaatccataggggcagaaatcaaattagtggtttcacggttgcctggagtggaaggggagggagggagattgtcaagggtcacagggaaattctgcagggagatagaaatgtttgttatcttgattgtattcatgtttttacagttatatacctatttcaaaactgatcaagcctggcatggtggctcatgcctataatcccagcactttgggaagccgaggcaggcagatcgcttgagcccaggagttcgagaccagcctgggcaacatagtgagaccctatctctgcaaaaaatttaaaaattagctaagaagggtagtgtgcccctttagtcccagctacttgggaggctgaggtgggaggattgcttgagtccagggggcagaggaactgatcaaattgtacatttgacatatgtgtatttccacaatatcttgataaaattgaaaagttaagtttctcatttccgaatctgtttggaaatggtcattgtacataaagaatttaaagggaaaaggaaaattgccactgtcatatttcagcgtttgaacgctaaaagttctctggggcctggttgcatttgatgtgggaacaaagctagggtggggacaggatggggctggcactgagccacctacattgactctggagacagcataaagttttccttgtgtttctgagtagtagtaacttattctgttattctgcctggaggcaaaaagacctttggctgtcaggtactaatctagtctcacaattagatgacctgtctgtggtgagagtgaaggccacagcccccagtggcagacatatccagggggaattcaaggtctgaagctgaaacatgactcagaacccccaaactgacataactcaccattggatgattcttttggtatgctatggattggttgtggtgaaggactaattggttttcttttttttccaaatgtattgtggaccaatgttttggggaatacattagaaaaatattacttgaaaaaaagtgaaatagaaaacag

SEQ ID NO: 83214 - DNA, 1740 bp, Homo sapiens
tttatctgggtagtcaccagctgggcgggggtggtggccagaggccaccagactgtcagccccacatgggcaggacatgtggtaggcattcgagaaatatttatcaaatgggtgaatccagagagtgaagggatgctacggtccatctgtgcacactttaacatgctgacagatgctagcagccttggattcttaccacagagcagtatctcagactttagtgcattcacagataacctggagaacttgttagaatgaagattctgaattgcaaggtcaagggtggggcccgagattctgaattccttaatgagctctggggtgctgctgtggctgtggatcacggaccactctttgtgtagtgagagtataaatgagtggccagtgagtccacaagtacatgtgtggttgagtgggatagggcaggggtcaccttgactagtgattttccagtaggagcatgactcagttctccagcccatcctgtgtcaagaaacatccccagtctgacaacacaggactgtcagcgaagaaagagcacactctctgtttcccctgcagcagtgagggcagcctggccatgctacttcttgtttgccatatttggtgaacatgatggctgtggctgtctgttactgtgagtcaccagcccgtggcaccagcattaattgccatgaatacttgttagagatggtgggtgtccagtaccaggcatatggttggtatgtgataggcactcaagaaacaatagctgctgtgatgaggatgatgatggtgatgatgattattttatgaagtcctttcacatctcatttagtgttctcaggaacacaatgacatgggtaataattgtgcagtgtttgtttatctctggatcctggatataccaggcttgttcccacctccacacctttgctgggagcaatggttttcagatgggagcaacttccatccccagggacatttcgcaatatctgaagacattttgggttgtcatgactgaggggtgctactggcacctagtgggtggagaccagggaggctgctgaacaccctacactgcacaggacagccccccctccaaagcaaagaattaggccacaaatgttaacagtgccgagagtgagaaaccctggcttagatggttcttcctatagagattacttccccaattctaccgtggaatattctataagcttgctaaactgactttggagtgaacacgtgttatgatgttgtcttaatttttaaagcctagagtctcttagtggtacaagtttaaactagaggcctgcagaggcttcctcactgtcccctcaccctataccccccacccccaacttttacagtagggacatgagagggacaatttcatattcccatttaagatgtgaatggagggttggagaaaggagcctcagtgggtatatgcttgtgtcatcaatttcagaactagaccacagttctttgttcgctatctaccctccctaaccaagaccagcaagggatgccagcccaaacaaggaggcagaactcttaggcccaccttggctgtaacatccacaatagtttttgttttttccaaacacagcaaaagggactaaaaaaaaattagcattgtaaggaactagtttggcaaaataatgcattttcctctccaaaaaataaagaaggactgatgaggtatggcctccctctaggaatttaatatggaatggatcttgacagcacatgggtttt

SEQ ID NO: 83215 - DNA, 2096 bp, Homo sapiens
tccttttgttttctttacttaaatagataaaataatcaaatgagattatggatgcaagagtccagctactgcagttcgtgctttacaaaggaaagggataaccatcagcaccgctgtatacatatattcttggaggactccagttaaacagtttaactacctatgacattcaagacaccactcaaacaacagaggggtattccccctcatgtcttctgacactggatctcaagcagatctgaacaatttggattgctttttctgtataggcaaggtaaagtaaagtgtgagaggtcatcaatgactacagacctaccattctaggaagtctccctcaaatccattaagagtctcaatatctgagtttaattattatgataattatcagttcccatgtttttagcagttttctgacccaaggaagttgcaaatatatcagaataagatcttttcctttctgcccttggacgccgccgaagaagcatcgttaaagtctctcttcaccctgccgtcatgtctaagtcagagtctcctaaagagcccgaacagctgaggaagctcttcattggagggttgagctttgaaacaactgatgagagcctgaggagccattttgagcaatggggaacgctcacggactgtgtggtaatgagagatccaaacacgaagcgctccaggggctttgggtttgtcacatatgccactgtggaggaggtggatgcagctatgaatgcaaggccacacaaggtggatggaagagttgtggaaccaaagagagctgtctccagagaagattctcaaagaccagatgcccacttaactgtgaaaaagatatttgttggtggcattaaagaagacactgaagaacatcacctaagagattattttgaacagtatggaaaaattgaagtgattgaaatcatgactgacagaggcagtggcaagaaaaggggctttgcctttgtaacctttgacgaccatgactccgtggataagattgtcattcagaaataccatactgtgaatggccacaactgtgaagttagaaaagccctgtcaaagcaagagatggctagtgcttcatccagccaaagaggtcgaagtggttctggaaactttggtggtggtcgtggaggtggtttcggtgggaatgacaacttcggtcgtggaggaaacttcagtggtcgtggtggctttggtggcagccgtggtggtggtggatatggtggcagtggggatggctataatggatttggtaatgatggaagcaattttggaggtggtggaagctacaatgattttggcaattacaacaatcagtcttcaaattttggacccatgaagggaggaaattttgaaggcagaagctctggcccccatggcggtggaggccaatactttgcaaaaccacgaaaccaaggtggctatggcggttccagcagcagcagtagctatggcagtggcagaagattttaattaggaaacaaagcttagcaggagaggagagccagagaagtgacagggaagctacaggttacaacagatttgtgaactcagccaagcacagtggtggcagggcctagctgctacaaagaagacatgttttagacaaatactcatgtgtataggcaaaaaactcgaggactgtatttgtgactaattgtataacaggttattttagtttctgttctgtggaaagtgtaaagcattccaacaaagggttttaatgtagattttttttttttgcaccccatgctgttgattgctaaatgtaatagtctgatcgtgacgctggataaatgtcttttttttttaaaaaaaaaaaaaagatctttgcagaacacctattaattaattaattaattcactcattcagcaacatttttgagctgctgccctgttttcatgatgtgctacatgatagatttgtaaacacctgtctcaataaacttatagttgtgttggaataggtattattctcagttgcatcttcatgaaactcataataaattggtaataattacaatgtaagaaggattctgaggccacagaaagaatgataaaaatgttataatctcctaataacatttccagtg

SEQ ID NO: 83216 - DNA, 1041 bp, Homo sapiens
cattattttaaacaatgcaatataaatgacaaatggaaataaagatgtattagtccattctcacactgctataaagaactacatgaggctgggtaatttatgaagaaaagaggtttaattgactcacagttccacaggcttaacaggaagcatgactgggaggcctcaggaaacttacaatcatggcagaaggcggaagggaagcaaggaccttcttcacatagtggcaggagagagggagagagtgaagggggaagtgccacacacttttacaccatcagatttcctgagaactcactcactatcatgagaacagcaagcgggaaatcttcccccatgatccagtcacctcctaccttggcatactgcgttaaaaaatcacatcatatgctgggcgcggtagcttacacctgtcatcaattcaacgtgagatttgggcagggacacaaatccaaaccatatcaaagggtaactccaggtgcagtgtggaggatgggtttgaagggaggaaattggcatctgaagattggttaggattgctggtaccattagaaagatatgcagtgatgtgaaagatgttggtgtggttggtgtagttgaatgaccacatgtggaggataagagagaatcaaaggtcgtggctttggaaaggaaatttaatagagtgattgatttctgggtgggagcatatctgagattggtaaagataagctctgtatttgatttgttgaatataagttggtagtaagtcatccaaggcaatattcagaaggagtaagaaatttgcaactcagtatagtgaaagatattcaaactggagagtgttcgtggttgatgcattgggacatgatgaattgttagaggatgtgttaagaagaagctgagaacctttccaggggataagaccactggcttagagtgactgtttccaaatgaaaataactctttccagagggtgatagctgaaaatgtcagaggagaaaaagtaatcatttgagacctagatactacgggggacatgtccatgggctttggagatta

SEQ ID NO: 83217 - DNA, 1115 bp, Homo sapiens
aggatgatcttgagtggaagtttttgttagagagatggatttaatcagagacttgaaggacaagaggggcacagagtaatctaacaaatgtagaactactgagatagccttaaaggatatggaaagtagaaataaataaataggatatggtggctcagttagaatatcgtaacagctgttaacacataaacccaccatgtataatgaggtaaatgtaatagaggtgtatttcctgttcaagtattaagttcaaggttgttctggtaggcagtggaggagggacccaggccggtggaggccttgccatcttgttttaggttttaacacccagttggggtggaacgggacatagagaaggtggagaagccacacctgctcagctgctttggccccaaagtgagacacatccttctgctcacattgcactagtaagagctaaattgcctgccccccaacccgcatcaaaatgcaagggagttggaaacagcccataatgatttatgatggtaagaggagcatgactcttagaaaataattagcctagctgccacatatgacaagcagatttgtttgtcagtattagaagattctttggggagttggaagaagagataataaaattattattacagttgtgggtgaaagggttataggggagttttggattatcagtcagaaaatatctgttctcctaagatatgaaattcaagcctttcaatattggtgaagataaatgtttaaagagcatgtgcccacagggagaattatcaacagtggaaaagcatctgaagtattgacattgaatataaggagtgtggcagtgactgaagaactgtctgggtaattatgtgcttaaatgggtaggagtttgggaaataattaccacctttcctccaaatgaaaagggagactttgtaggaaaggtgggatttcaagaggtggaagcaaagactgtttagatgagaagccttgttctttaaactaggcggtgtttttaagatgattctgtgatggagtaggataaaaataagaagatatggaggacattttctggtgagaaaaaaggggctagggagaacaaacgagaatatttaggtttgtccaatatttataag

SEQ ID NO: 83218 - DNA, 1063 bp, Homo sapiens
ctcgctctatcacctaggctggagtgcagtgacacgatctcggctcactgcaagctccgcctcctgggttcacgccattctcctgcctcagcctcctgagtagctggaacgacaggtgcccaccaccacgcctggctaatttttttgtatttttagtagagacggggtttcaccgtcttagccaggatggtctcgatctcctgacctagtgatccgcctgcctcagccacccaaagtgctgggattataggtgtgagccaccgcgcctggccttttagagtgtgaacttcttatgggaaaatacttggctttgttatcctctcccaacacagaaattgttgctcaactaggaacggctggcatatgctaccctcatattaaattttgctaaaagaaactacttaatccctggattatgatgtcctattatttattaaatatctcatctcatgctgtagtgaatatgaaagtgatgattcttttggagaacaaataccagagtatgacaattggattttacaaacaatgataaagcggacttcggaatgatgtatttatttaatgtatttatttaaattatcgacatgaggtacatagattatatgatacatttattcttggaagtattattttataacattgaaactgattaatttacaacatgtatgttgttaccataaacacattctttggttcaaataaagtcttaaaataacagctctttaaaaaaaatttattgcttatttttggaagttggagaataacaagttctatagaattttccctggaaaacctgtcagtacagcttaaatattaattatggttctgattgcctttcctttttgtaaagcattaaaaaactcaggttatactttagcttggaaaccaaggtaaaattttgccattgccctccctcctttcatttgctcattcattcacatccttatgctggcgttatgctgggtgtttttatagtatcattaatgataagctagaagaaagttgatagcaattgctataataaggtaggtacagggttatccataactatgctaagtgctgt

SEQ ID NO: 83219 - DNA, 1086 bp, Homo sapiens
aaaggaaaaaggaagtaaagaaacgaaaagaaggaatttagcttatgccattcttctgttttacctgcttctaatttagagtaacatgatcactggcttcataaattcaaagctcttaaatcgtttgcagtaacaagagcatgttccagtgttctcagaacttttgtttgcacctggtgttacacttgatcactgaataattgagtgataatgactgttatttttaaactaaagcgtaacatcaggagaggatggtaaacacaaaccgcccagcttcccaaagctggtagggaaaatatttctaagtgtcaaagcatgatagaattgttgaaagtacatgcagccagctatgtaacctcagaaaataagacatggaatgatttgttctgcagcttaaaaattatactttttagtttcatggagatggaaagttcaaacaaagaaaaactagtagaatttgaacaccatgagctagggttaggaaaccatactatctggccaaacagttattcaggaccaaggacaaggccataggcatgcctctccccacttaattttttcttttttctttctttttctttttctttttttttttttaacattcatagctatacttttaagttattcatttgcttaatttattcactcagaaattaaattacatattgagtatcaaataggtaatgtgacaaaacaagacagactcgagctctgttttcatgggacttatattctcttgggtcctttttttttttttttttttttttttttgagatggagtctcgctctgtggtccaggatggagtgcagtggctgtcatcttggctcactgcaacctccacctcccgggttcatgccattctcctgcctcaacctcccaagtagctgggactacaggtgcctgccaccatgcccggctgattttttatattggtggtagagacgaggtttcaccatgttaaccaggatggtcttgatctcctgatctcgtgatccacccgccttggcctcccaaagtgctgggattacaggcctaagccaccgcacctggccctgggtccttttatagttagctgttatattctg

SEQ ID NO: 83220 - DNA, 1071 bp, Homo sapiens
aggatactctctgaaattcccccaattcttaaattcgattgaatgttggtaaatgatagttatggcagggggcaggaaatctgtttctgccatgtattatggtagctcccctaatttttgtactcatttcttaacatattgtgtatgtgtgtagattttataggagaatcactgtttatgcatactttatagtgttttcttgggtcatggttaatatttgagtgtccatgatgttctaggtaagtctctgtaggaattatttttaggtgtcatggtataacagagttttggtttttttggtcggggagtcagatatgttacatacaataaaatctgccaattttaaatgtgctattggtaagttttgacaaacatgtacagttgtgaacaaccaccacataataaatatagaacatttccatcaccacaagtttccttgtacccctttgcagttaatcccctacccccagccactgatctgctcttctgttcacatgatgtgtatgatatgcatattcatttatatcaactaagttaaaccaataagtacataaatgtttagatatatcatattgataaacctttatgggtagcatatatctgatttttttcaatctttcattccattttgctcacatgaagtcattatcagtagaataaggaaatgtcagaaatctggagtttgagcaaaaaatgtatattttagtgaaaaagatttttaaatgcctccaattattggctacttagaaagtaagtatacttggctctgttgccaacttttctccttcattgctgctgatgaatgagacagatttttctaaatgcatgtaactgatgaatccagttccctttctcttgcaattaaaagttttcatttatgtgtctatctgtatattgggaaatctttgtaatttttcttttatagtgcttgttagatctataggacaatatagacctagtttctgaaatttgaaaatggataaaaaatattaaatgcaatgatttttaaaatctaatgtcttaatgttaatctttgattgattttcttaggtattaatattcattaccatt

SEQ ID NO: 83221 - DNA, 1083 bp, Homo sapiens
ggctttatgtaaaatgaagcacttcctggacccctgtggtcttataccactgaactttttttttttccagctgaatactacaacccttgtatgtttccaaatatctggcagagaaggtagaactggccagggacatgagcaaacatggtgtgctggttggcataggatagatggaagctaggcaggtggtactgggcttctaccattggtaggctgtagcttgatttttagctacaaggatatgtttttaaaccatattgaattacatagaaagcatttccattttcctttcaggctttcttattacatcagtgagaaaatctcagtttggtgcgaatatgtctttaacacctaatacttgctaatctcttttttagcagagagattgagacacattataggggaagagagagagagggagagacggaggagatcatacaggacccagttacaacccttctgtagctttggtttgctagaattaaatagattattttgtatttattgtatttattttgatagttatgtgctatttatagaaaggaataccagttttccatgtatgaaataaagtgtccttttgttaacaaaaaagcatattaatttttatgcaaatgcatgaattaaagaaaaataaaggctcacaatactataccttagccataattccaaattctaaatgctctgaaaaacaaattaaaaaaaatgtttagggttacacatttgcatcaaaacttgacctgaattcacatgaaacttttttttcctgtatttatctttatgtgaatattcagacattttgctacaaaaatgtccacatgtttgactatggggtgctgcctcagaccactagaggtattatgtaataagggaatatgcaccatattactttcctaatcttgaaaactttcaactgtaaaatacatctggccctaaggttttggataaggaagagtgtggacctgctttaaatggcaaaatgcatgaaagtgatatacaaataactgaaatttggcagacactgatctaggaagaagagctgacattgaacatgagtctattaacacgagcagaacaaacata

SEQ ID NO: 83222 - DNA, 1037 bp, Homo sapiens
aaatttaaagtttatgtcttcaattcacagttcttttattcttccagggaaaaaaaatatcaagcagctatgctttaaatgaatctaatgaactgcaaagactgacattttcactataaaagtcacaattcatttaatgagtagttaaatattgatgctatattcaaatacaggcagaataaaaatggcacaatggatttcaaaataggaattcagggttcttttatggtgaaaatttcatgaactgaaaaaaaaagtctcgttcatcaggatgtcttcataaacacaaatattccagtgaaatagagtattagtttgcagtatataaatccccataaataaactgaggtaagtcttcccttttgctgtttggttccctgtcagtctttattcccacaggactcattgatgttaaacgtggttcctgtcttcaatgagaggggatgctgaaattatagaaggtggggaatctagtttccttggactgacctccttgaataacaagtcaaaacaactagatgtcgatggctatttgagaaaaataagtaagctaggtccctgtgactcctctgcttggagctctccaatggctccctgattcattcagaggaaagcctggtcttaactcagtggtggacattatttccttgacctcatcaaggcctgtctgacttccctcccaccacataccccgctcttcttgatcacttggaaacccctggcacacgcccacctcaaggcccaggtcctgttttcctctgccccaaataccgttgcatcagatatttgcatggctcaattgttcattctcttcaagtctttcctcagatgtcccttttctcagggaggactttgatgggcacctcattgctttccctgatactctccgtcctcctgccttgcttccgttttctccaggcacttactaccattcaacattccctctgccttatttattcattgtctctctcctccatgctagaacataacctggcgaaggcagagatttctgtctcttttgttcgttgcttcatctc

SEQ ID NO: 83223 - DNA, 1036 bp, Homo sapiens
tttgtattgagaggattatgagtaatagtttcgtgaacatcattttttttaaaaagttctatttacaatgtatagctcattacacctcatggtgtctttttaaatgatgatttacagagaatcttcttaggttactatatcaagaagaactgaaaaaaatccacttcgctgtatcttactgggcattaatcttaccattcttgttctttctttgcattgatggccaagaagcttggagtcaaacaggaaacccatttagtagctgtctagggcagtaggatatgcattcctgtgtgctggccatctaggctttattattttctcaaatttactttttccttgctttgattcacctgttacttaccttttaaaaatcacatatgcttttaaaagtcacctcacttcctttgtagagaaaggcaggctatgaataaatacttaaagcacttataagtacaatgactatgtttgtatagtgtccaggctagtattcttatcgttctaaaagggaaatttccacatttaaaaaaaaataaagcctactatgtcaatattgtaaaactaaaaaacaagctcttatctcttcttcttttagtctttttataaaggtggatacaattctttatttacagtacttgctagaatttatttcttatgggatatttccccctagaattatagaatctactgaaatgatgaaaacaggaaaattagtatactctctgagactttaaattaatgtttgcactctcttatcattcaaaaagtattaattcctgaaagttgacctcctgacataatcagcattgatctagattttacccgaagactgtgctaaggttaacttggcactggggatccattggactggtggccaagttgttgtctggtccacatgtaaatcccatgatccctgagttagctccctagtggttgcaaagagtttctgcactcatgcagggcatttgtcctttgagaaagtggccattttagcttcaggaagcctgcccggtgcctagtgcctggtgccacatga

SEQ ID NO: 83224 - DNA, 1035 bp, Homo sapiens
gtaggataggaaagcaaagtccattgaaacggctaactggagtgaagcttgatgattttgaagatttctgaggatttccattgtctatgtttattattattctttgtggaaaccaaaatgagcctgtgcttatgtaatgtaaatatcataaatattgtttatattaggaacgcccttcttgttgaggctgagattggatgtggtctgccttcaagaaacctataggtcacctggatattctatggatatgagattttctctttccatggtgggagatgtggttggttgagaacaaactgtggagacactagaatgtctggtgaaagatcctaggttgtattgagtaggtactagtaaactgtgtatgtgtgtgtctcggtacatttgcatatgtatgtgtttacatacatatatgtgtgtataggtagagggtgacattttgaagtggggctaatgagaagatattttcaagacaatgtctgaacatgtttgaagaagagattagagagagagtgagagagctattgaatgatggattgggtggtcagttgctgttggaacgaacactgtagataaaggagagttagcccttaaatgaagccttggtaactatttctttgtgataataggaaagaaagggaagatggctgaagattcatatatatataaaatatgtaaatatgtgcacacatgtgtatatatacatatatatgtacacacacacacacacagacacacacaccactgcacttccagcctgggaaacacagcaagaccttgactcttaaaaatgtcaagagttaaggaaaagggccagtggattggactatgggaataagattctcagtggctgtatggatatagagtgagaaatatatcttgttctatatatacacatgtatatatatatatatatatatatatatatatatatatatatatatatatagtgtatatctatttcagtagaaaagatgttggggaagagaggagagagagagagaacaatatgtatgggcatgggaattgattgac

SEQ ID NO: 83225 - DNA, 1544 bp, Homo sapiens
cactttatccccagctcctagagctgcatctggcacaaggctttcagaaaatatttaatgaataaattagtgcaatcaaaccaaccaatatgtatggatatagaatgggggtggtaacctccagacacagctcttggctacggaagacccttaatgtttcattcttcttggatttttccccatggcaaaaacttttgccggtgagaggaggctgcaacaccgagcggaggaggcaggaaccggagcgcgagcagtagctgggtgggcaccacggctgggatcaccaccattgaggcggtgaagcgcaagatccaggttctgcagcagcaggcagatgatgcagaggagcgagctgagcgcctccagcaagaagttgagggagaaaggcgggcccggaaacaggctgaggctgaggtggcctccttgaaccgtaggatccagctggttgaagaagagctggatcgtcctcaggagcgcctggccactgccctgcaaaagctggaagaagcagaaaaagctgctggtgagagtgagagaggtatgaaggttattgaaaaccgggctttaaaagatgaagaaaagatggaactccaagaactccaactcaaagaagctaagcacattgcagaagaggcagataggaagtatgaagaggtggctcgtaagttggtgaccattgaaggagacttggaacgcacagaggaacgagctgagctgacagagtcccgttgccgagagatggatgagcagattagactgatggaccagaacctgaagtgtctgagtgctgctgaagaaaagtactctcaaaaagaagacaaatatgaggaagaaatcaagatttttactgataaacccaaggaggcagagacctgtgctgagtttgctgagcgatcggtagccaagctggaaaagacaattgatgacttggaagataaactgaaatgcaccaaagaggagcacctctgtacacaaaggatgctggaccagactctgcttgacctgaatgagatgtagaatgccccagtcccaccctgctgctgctcctccctgtgacccagactccgcctgaggccagcctgccagaagctgacctttaactgagggctgatctttaactggaaggctgctttctcctttcaccgccccctccttccctgtgtctttttcgccaaactgtctctgccttttcccggagaatccagctgggctagaggctgagcacctttggaaacaacatttaagggaatgtgagcacaatgcataatgtctttaaaaagcgtgttgtgatgtacacattttgtaattaccttttttgttgttttgtagcaaacatttgtaaaacattccaaataattccacagccctgaagcagcaatcaaatccctttctcacttttggaaggtgacttttcaccttaatgcatattcccctctccatagaggagaggaaaaggtataggcttgccttgctgagagccaaacagagcccagggagactccactgtgggaaacctcattgctctgtacaaagtactagctaaa

SEQ ID NO: 83226 - DNA, 1041 bp, Homo sapiens
aatttattctgtttaattcaccatcatgttcccagtgtatacaatgatggttggcatatagtagtaactcaacatttattgaatgaaacaatgattaatattgatggtaatcctggatgatcagaatatattttttctaggtggtcttcctggaccaccaagaagagaatgcaaattcccacaggctctggtccatatcagcagacttggcatcatatccacatatggagttatgtccatatgtgcctgacaaacatcaaaatttcctgagcatccaagtagaatttggaggactctgtctactcacaaattaacttgattctgatttgtccactctcagtgcctcagcatcaatatggactctgcttcccacagatagaaagactgacttcttagtccatttgggctgctataacaaatcaccatagactgggcgatttataaacaatagaaacgtatttctcacagttctgaagcttggaagtccaaggtcaggatatcagcatggtcatttctggtgagaaccttcttttgggttgcagatggccaacatctctctgtgtctttaccaggcagaagcggggaatgagctctcagggtgtcttctcttaagggctctaatcccatagatgaggtctctgacctcatgacctaattacctcccagagaccccatctcttcatgccatcgccttggtggtcaggatttcaacatataaattttgggagagcacaaacattcaggccatagcattgaccatagcagaactggcaatcctcatacaaagttttggtttcccgtatttaatgtcttctacaaaacaatattcatgcattctgtcaagcagttgcagagtaaggacagctggtcattactcagcttggtgtgcaaatagatatttttgaaaatatacgatctctgaagatttttattcttcagacaactttggctttgaaaactctgtatatcttaaaagcagtttcacaatgtcagtagtttcctgtgattgatagtcacagcacactgagctcacagagacat

SEQ ID NO: 83227 - DNA, 1119 bp, Homo sapiens
gaggctgcagtgagctatgattgcaccattgcactataggctcagcaagacagtgagatcctgtctctaaaaaagaaaaaaagaaaagaaaacttaaatggacaaactgctagaaaaatataacttgccaaaagcaagtcaagaagaaaaaaataaaatcaagtagattaatgacattaaagaaattgaataagtagctaaaacatacccacagaaagaaaaacgttagacggttttgcagatgaatgctacccaacttctgaaacttatcatacctttcttatataaattttagggactgcaataatagtaataatagctaaaactaaaaggttggttgctatgttatgaagactgttctaattgttttacttattttaactgtttaatcctcaaaatatacgtttgatgttggtattttcgttttcctcattttcaaattaagaaactgaggcgggggaattcatgtggaggtcaacgtggaagcaggtgtgagggggtccagcagaagaaaacatggctgccaaagtgtttgagttcatcagcaagtttggcctggccttagctgttgcaggaggcctggtgaaatgaactctgccttatagaatgtggatgctgggcacagagctgtcatctttgacctattccgtggagtacaggacattgtggtaggggaaaggactcactttctcattccatgggtacagaaaccaattatctttgactgcccttctcgaccacgtaatgtgccagccatcactggtagcaaagatttacagaatgtcaacatcacactgctcatcctcttctggcctgtcactagccagtttccttgcatcttcaccagcatcagagaggactatgatgagcaggtgctgccatccgtcacgaccaagatcctcaagtccgtggtggctagctttgatgctggagaactaatcacccagagagagctggtctccaggtaggtgagcaatgaccttacttacagagcgagcagccacctttgggctcatcctggatgacgtgtccttgacacatctgaccttcgggaaggagttcacagaagcggtggaagccaaacaggtagctcagcaggaagcagagggccagatttgt

SEQ ID NO: 83228 - DNA, 1030 bp, Homo sapiens
tatttatttatttattttagtagagacggagttttaccatgtcggtcaggctggtctccaactcctgatcccaggtcatccacccactaggcctcccaaagtgctgggattacaggcgtgagccaccgtgcctggccaaggtggtatttttattatctaggatggacaaagagaaacaatttgcagagctgaggccatgactcctgcgcatccatctattctctggtcattattcttggcagaaactagcctgtattaaagcactcagttgtgtcaggggcccatactcaggaacctacagaaaaagatttacttcctgaggccaatgaccctgggcaggactgaagtcatgagcaggacataagtcatataaatgatagaaggggtgtacacacctgagatcggacatttattatatcagtggtaggctgaggtccaagttcagggcatacctgtgcaggaaacaataactctaagaaaagtcaaactaggatgaaggtgagttctggcccttcctctattggaagggaggacttccaacatccccaaagcaacatcaacttgtcctttgtaatgaggtggctgagagaaacctgatttctgcccatgaaaatacagattaaacaaaaatcaattccaatttaaatgcattccacccttttcatattatagttgtggagctaattattccttattgtcatatgctgtagggcagaaaggcatcattaaagtactaaaaattatttctatgaaatggatttgtgccagggagaccactgataagttattattaagtgggttgttttggaggtggattaaaaaaaatggtatctttgaggctgggcatgatggctgaggcctgtaatcctggcactttgggaggctgaaacagatggatcacttgaggccagaagtttgagaccagcctggccaacatggtgaaatcccatctctactaaaaatacaaaaattagttgggtgtggtggtatgtgcctgtaatcccagctacttgggaggctgaggcccgag

SEQ ID NO: 83229 - DNA, 1506 bp, Homo sapiens
aattcaacaaaagcagagatttttgtgttttgttcttcattgtatcccttgattgtagaaaagtggcacatagtaggtgctcagttaatcgttgttaaatgaagacataaatgaaatataaaccattaaatgtccaccatatttgtaagcgttttggcatgtcttcattgaaagaataccaggcagctgggagccatagtttactccggtaatcccagtgctttgggaggctgcaggtgagaggatcgcttgagaccaggagttcaagagccaccagggcaacatagagagaccttgtctctacaaaaacaaaacaaaacaaaacaaaaaacaaaaaacacaattcccttaagccgccccttccccttccactgctcagagaaggccttccagcagagcagagcacgaggtcgctggcacacacccatcctccaccagtcctggcctctgtagagcaagccagcagagcaggctgtttctctcattcagggacggtttagggggtggcaggaaaaaatggttgctgataggcgaagggcctccctgggttggagagaaccccagcctcggatggtcccagcacatttaaaagagaagcagtgccaaaggtggggtgcactgaaagctgctggatgaagggaaagatccttgtgctcagcccggaaaaccggaggatggataccaggccgaggggtccctccgtgccccaagagaaagttcaccaagtttagatcccagtgccccgcagcgggtgaaggtggtcccgccccaggccggatctggccacagggctggcggcgcgctggaaaaccgcccacgtgggaagaagccctggctgcatttccgccctggactgcgctcccgcctgccagcgcggtccctgcgcagccgccccgcgcccactaggtggcgcctgcgctctagtgggcgcttcacaggcgcagcgacagcgacagcgacagctcgaacctgagtcccaggattccggggactggagggcagcgccggcagccaaggtaggattcctgagccccgggcgtctccctggagcctctgaggtcggggtggacagcggggcggccgctgggcaccgcttgcggtctgcagagataaccggaggagtcggggcggcagcacgtgttgtagccgtgggggggacccagagacccgcagcctcggagctgggcctagagcaaggcagagcaccaggtcgctggcacgctcgcatcctccccagccctcgcctcccagagcatgcccgaatccccaagccgggcgtcctcgaagcggaaagcagccactgtcgcccagagccactccagggtggcagccgagtgctgataaggtccagagcaccacttcttaaacttgtctgcccgttggcgttgcttgggaagcattaaaaaaataccgatgccctagttccacccccgcccccccccagagactcagatgtgattggtctgggtgggggactggacatctgggtattaaaatgtttgcaag

SEQ ID NO: 83230 - DNA, 1022 bp, Homo sapiens
ctcgagaccagcctgggcaacatggtgaaacctcgtctctactaaaaatacaaaaattagctgggcgtggtggcatgtgcctgtagtaccagctacatgggaggctgaggcaggagaatcgcttgaactccagaggtggagactgcagtgagctgacatcgtgccactgcactccagcctgggagacagagtgagactccatctcaaaaaaacaaaaacaaagacaaaagacaccttatttgatatatattgttgatatatatacatattattcattaacactgaactcagccaactgcactataactcatgcctgaacgaagcttacctaacagacaagctttctctgtaaggcacatcgcagccttctcatacttaggaacactagacagcacgtcaactgtacacttggggccatttcaaacagcgacatcacaaacaaaaacacacaaacatgcaaaaaatgtggcactaagtacaccacaaaagggacacttgtttatagcacaagagctgaaaccagaaagcagcgtgtcctcctgtttgcccttggctggaaatgtgcacgttgggtgactcaactttttcactattctacgtgcatccatatatgactgtgaaagtgtcatggatattgatttggaagttacgcagacattatttttcttttttctttcttttttttttttgagatggagtttcgctgttgttgcccaggctggagtacaatggcgtgatcttggctcactgcaacttccacctcccaggttcaagcaattctcctgcctcagcctcccaagcagctgggattacgggctcttgccaccacgcccagctaattttttgaatttttagtagagacggggttttgccatgttggccaggctggtctcgaactcttgacctcaggtatccacccacctcggcctcccaaagtgctgggattacaggcatgagccactgcacccggccttttttcctctttttttttttaaatgagccaaggtctctctatgctgtcc

SEQ ID NO: 83231 - DNA, 1038 bp, Homo sapiens
gcagtacagtgggctggaggctggtgaacctggttctctgcaggccagagatgaaggttctttagtgcacttggagctaaccaggctgaaaggggcggactaaccaaattcaccagagcctggtgaggaagccaggctgcaaatgtattaaatcacaagggaggctgggcacagtggctcatgcctgtaatcccagcactttgggaggccaaggtgggtggatcacctgaggtcaggagttcgagaccagcctggccaacatggtgaaaccccgtctctactaaaaatagaaaaattagccaggtggcacatgcctgtaatcacagctacttgggaggctgaggcaggagaatcagctgaacacaggagttggaggttgcagtgagctgagatcgcaccattgcactccagcctgggcgacagagcaagactctgtcaagaaagaaagaaagagagagagagagagaaagaaaaagagagggagtgagaaagaaatcacaaggggagaagcaactgcaaagcagtctgaaacctccatgctgacttgtcagcacactctttctcctgtgggaaagtcagaatctagttagaaggttggtttttgtggaatcaaagcaaggtgagcaaaatgagtgattttaatcaccaggaaaacctaagatatttgtaccctctgagggatacaagagtctagagtggcagcactgctagtataattgccccttcctgtgcttgtggtagaaatgtctgatcaatcactgcatcttttccttcctactgctccctgggccagccctaagattcttagcaagagagtattctggccctgtgcggtggctcatgcctgtaatcccagcactttgggagacaaaggcagaaggattgcttgagcccaggagttcaaaatcagccagggcaatatagtgacaccccatctctacaaaaaaatttaaaaatgagctggatgtgtgggcgagcacctgtagtctcagttacttgggaggctgggtgggaggattgcttgagcctgggagattg

SEQ ID NO: 83232 - DNA, 2115 bp, Homo sapiens
gctgggggtgcaatgctggagactaagctctatgaaaactcttgaacaatgagatttgaggagcatctgggttggtgaacacttggaagaactaggaaggtggtgctcccagagagagcatggaagctctgtctagccccaccataccttgccctctgcatctcttcatctagctgtttctgacttgtgtctttatagtaaactggtaaacataaggaaagtgtttccctgcattctgtgagctttctagcaaattattgaatctgaggaggggggcatggggacctcctgaatttatagctggttggtcagaagtcccagagatccgggaccttcaactggcatctgaagtgggagcaatctgtgcaactaagcccttaacctgtggaatctccaggtagttagtgtcagaattgaattgcattataggacaccagctggtgttggagaattggttggcatgggggaaaagacccacacatttgttaacagaagtattctgtgggcagaaacagatcttaggagacatattttggcaagaagggtttttttcttttttttattaaccactttttctggttatcccttccctgtagcctactcacacgcccatcaacatggataactgagaggcatacgcaaggtgcggcaatcagtttctagtacagcagtttgttattacagttgctcaagaaatatgtgtgctgggaaaataaggagtgtcactctacacctccaagggggagacagtgtttgtctaaacacaggtctttgtctctacaacatgctaccccacccacccctgctgcccaagtaagctgggctttttgagtcattcgtgatgtgtttttgaacacaacgagggggaagagctcccacagtctgttcagttcttgctacaagaaatacaagctgggtttgactgaatgacaaaaagaaatctgttgagccaggaagcgtagtaaataccgtgactctctgcaaatgcgcacagcccaaacagctttttccagtctggaaaaatgaagagatttgtctgtgcaaaaaccagccaagtctccacccctctccctttctactcctccacccccacctcctggctaggccttccaccctgccccagacattcagtcatcagctttcatcctctgtgacttgcattgccccaggaaataacatgcccggctctggggagatacaccagcctctcccaagcatctttcagggatgtctgtctggttgggttttgccagtcatctctgaccttggccagtgctggctcacagcaaagttattcattacgcaaagtgggtctggtgtcttattccttgtttattcccttccttctccttcccactccagtcttcccccttttgctttgaaagaagctttgtcccatccctacttccatcaggcagtgtttagagagaagatttgccaaagatgagattttaaaagcatttgctctcagctagtacagggcatggaggcaggatggaaaatctcccagggactgtcaaaggcaaccagttcaggacagtctttggtggatacagagtttctagatgggagggacttacagggagaatctggttctgcaccttgtcttaaagatacatttgcataacaactatgcagttttctctttgatggtatgttttgggaggtggtagctggcaaagactatggggcaataaagcacccacccaaaccactggagcagtggagacaacacatcaaacctgcagttcattgtattgggaagggcactggaattggaatcagaatttccatgagtttgaaccctggctcctatgagtaggcgtgtcttattcaccactctatccacagtgccaagcacaatcctgccaacagcaggtcagcaggtgctcttttttcccctcaagttgggggtttgccctgttgcccaggctagagtgcagtggcatgatagtggttcactgcagcctcaaactcctgggctcaagcaatcctcttacctcagcctcccaagtagctgggactacaggtgcatgccaccatgcttggctaattaaaaaaaaatttttttttgtagagatggtgtttcactatgttgcccaggctggtaagtga

SEQ ID NO: 83233 - DNA, 1098 bp, Homo sapiens
aagaaaatgaagttgaatagatactaatggcaaaactgaaggtgcttgctataaatgctttgtaagtcctcaggcacattattgaagatcataaaacaataattcccttctcctatctcatggagcattttttattccttttcaaataagtttcacatatttaatatctttgagcttcataacagtcctatgagacaaacaggagtacaggtattgtcttcccatttttacagatgaggaaatcaaagcacagagcaggtgaggactttgcccatggtcaacatggcaaggtagtgtggactgtgcttagagtcacacagagacacaactggctctgaattccctggcagatccactgggactggaaactaggacatttagggtatgggttaatcaaggcctgccctgggatttggatcacccacccaggttcattcctgagtaaacagtttagactgatggcagttgagtatgtcaaggacccattgttgatgccctggcaggtggcaagggaaagaactggaaggaaagacactggcacacgaggaacaccctcacatgactgatcccctttacaccaggcagctgggtacaagacttggtcttcctcgtcccagaaaaaaatgccaatcaaaaataaaacaaaaagaaggggaggccacgctggttgcagggctggttcctggacttctttcaagggaacttgatcctggagccaagagcatcctttgccaggatgtggagggagagaagaatcccccagtcaaatgaggatggtttggccagagtctcagcatcctcttaagtgttgctgacatctccaaagagtcttccaaaaaccggagtccctcctctgcctccaggttctgaacacattgagaaagaagacaaaggaatggcagggagccaacataccaccttaattaccactaaagctagcatggaggttgcagctgagtgtgagaacaaaatgagcttcctgaccgagcctgggagaaggatggggctgagctgatcattccagagagtcttcccaagtcacccattcagatcagtcattccattattgtggacagtgagagtgaagataaagagggg

SEQ ID NO: 83234 - DNA, 1083 bp, Homo sapiens
agctgggcgtggtggtgtgtgcctgtagtcccagctacttgggaggctgaggcaggaggattgcttgagcccaggagattgaggctgcagtgagccatgatagtgccactgcactccaacttgggcaacagagcaagaccctgtctctaaaaaaaaaaattaaaattaaaacaaaaaagaatatcctgctatatgcagctttcttgggtatacttttttctcataatattatgtggctaaaactcacccatagcgtagcattcagctacggtccacttgttgtccctgctctattgcagttctccctagtatgttccatgggaatttactgaatctcctgttagtggacatttgggttgttaccagctttccatgactttgaacacgctaagctgatcatttttgtctgtgtctccagggaaacaatgtgaatttatcaatttacaatcccagtaacaacaaacatataaatatccaattgatctgtgttctttccaacaatttggtattatcaagcttcttaattttttccaactgaaagggtattaagtgacatctcattgtgatctcttcatggttattgcctttccaaatatggtttacagtggtcagttggtggagcagtgggggtcatcctgcaaggggactgtgaagattttttttttttttttttagagatagggtctctaaaactcaggctggattgagttcagtggcacaatcatgggtcactgcagcctcaacttcctgggctcaagcgatcctcccacctcagcctcccaaagtgttgagattaccagcatgagccactatgcccagccaagacgtaaggatttaatgaagcacagaatgcttgcaaagcctttcccagttaggaccacgtcactgtcttattcaactttgggtcgccaatacccaacacaatgccgggtacctcatcattattaaaccaacaatatgataatattaggttggtgcaaaaataattgcgatttttgccataacatttattgagtgcttgcttattaagtgccaggtgctatattaactgacacctttacttttattatttcatttaattat

SEQ ID NO: 83235 - DNA, 1016 bp, Homo sapiens
ttttgtacagatgagatatcactaaattgcccaggccgacaattttttaatcaggatgtaaacttatgaagttactgcctggtgtacagtgggtgctagatggtagggtaggtgcaagttagataaatggaaggaaagaagaaaggaagaaggaaagaaattaggcaactataggagcaaagctggatttaccaggaaacctcagggctcttcatttgcaggtgtcccttacaaggccttgtacctaatttttaattcataataatgtattccttttctaaggagagtaccctagtattgtatacactttaggccacaccatacttggatttgagcctttacaagaggtctgtgagagacccaacccttgttcttgtttaagatttttaagcacaagtgaaaatcaagtggtgtcagggagttgggcatttccatgtcgtctccatcatgaactccacatctgaaatttgtagagagatcatatgtaggccaggtaaggacaacagtgtaaggaatgggtcgtaggaaaaaagtggaggtcaggaatgtgtagaattgttgggccgcttccagttgatttctgtaatctactctcatacttcagggctattaagtttccagaaggtgtgaatctgggtgatgctggttgcattgtactgggcaatggagaaacagtggcttgcaatctggaactctctgcctagtcctggctggtcttcactaggactcactcactaactagttgtttggccttggtaggagtcacttcacctctttggccctatgtttctctacatttaggatgtttgataggtgatttcagagccccttgttttagcttcatgagagtagggttcaaaactgccttcttcacaactgtattccctgtgttgagtacagtgtctaataataattattattattatattaatagtaagattttttcatagtgcttacagatgaggaaactaaagtgcagagctgttaaataaatgtcctaggtcatccagctagta

SEQ ID NO: 83236 - DNA, 1020 bp, Homo sapiens
gtgcggccgccgtcattttctgggtacctgggtgtgggacctgcgggatggctccagggctctctgcgtggacatccagcccaaagccaagcactacccggaaagcccgggtgtctcactggctgtcacagctgccagctcagactggtttctgtttgttcttatttttatttttaaaaaaaattttttttggggggggtggtttgcttttttttcttttttaagaaaaataaaacttttcagaacaaagtagatgagaattttgttgttgttgttgtgatattaacagtgctacagttactttcctgaaagtctgggatttgacgctattgtgacatttatttatgtgaaatattcatacctaagaattcccctgtattaaataaagtttattttcattaataaaattaccgtcagaatttagtttctcaattttgtatgctacttttcaccttttccttttttccagttcttaaaatctccagttctacttaaccagctatgatcttaaacgaaaagaaggcttatcttgtgtaatgttacccattccctagactctagataactgtagaagtagttttaaaagaaccactaggtctgcaaacacttgaatatacaaaagctgaacttaaaggaggattctgcattgcagagggaggagtttgtttttgttttttgcaatgcaaaaggatgatcatagtgtttcttttcccttgggtttacagaacgtgaatttagagatgctgtgttgtaacaacaggccacatggagccttacgttcgatatttgataagtattaaataaaagacttctattgctcgaagcaagttctgtctgtattatgtatcttcgaagactttccatttcttctaattctgctttttttttttttttttttttttttttggtgttgagacggagtctcgctctgtcacccaggctggagcgcagtgacgccatctcggctcactgcaacctcttcctcccaggttcaagcagttctccaacctcagcctcccc

SEQ ID NO: 83237 - DNA, 1278 bp, Homo sapiens
tacaacagaaaattagaagtttcaaaataattttacttatataatttttattcttaaagtagctttattgagatataattcagataccatacaattcattcatctaaagtgtatatttagtggcttttagcatactcagagttgtttatccattaccataaccaattttagagcattttcgttacccccaaaagaaatcccataacctgtagctatcactcaccaatcaccagtcctttctacccacccaccatgccaccagctctaggtgacccactaatctattttctctctatatatacttgcctacttttgacattttatataaatcgagtcatataatatgtggtattttgtgactgacctctttcacttagcataatgttttcagagttcatttttgttgtagcatgtatcagtacttaatttctctttattgtttttgttcctttttttctaggattttgacacttcatgacatgtcattatttagagcaataatgaatattgacctgttttggattagttgatgaccttcggaaatgatccaataatatctactatagagaagctgaatatactccatttggagtgaacagcccggattgttacagaattttcaagatgacagatccaatgatggacttttttgatgatgccaatctttttggtgagaccttagaaggtttgtcagatgatgcatttgtacaaccaggacctgtttcactagttgatgaattgaatttgggtgcagaatttgaaccgttgcacatagattcactgaaccatgttcaaggtactccaacacatcagaagatgactgattttgaacagttaaatcaatttgattcaataaaatttcaccatgttaatcaatcttttggtagcccagctgaacatgtgttatctccacactctcagtttaattgttctccaatccatccccaaaaccaacccaatggtttgtttccagatgtatcagatggcagtccaatgtggggccatcagacagctactaccatttcaaatcaaaatggatctccttttcaccaacaaggacattcacactctatgcatcaaaataaaagctttgtggcacaccatgactttgccttatttcaggccaatgaacaacaaacacagtgtacttcactacgctcacaacaaaacagaaataatctcaacccagggcagaattctcttagccagtctaaaaattttatgaatgtttctggtccacatagagtcaatgttaaccacccaccacagatgactaat

SEQ ID NO: 83238 - DNA, 1046 bp, Homo sapiens
cattttagatcatgaccttgatcggcagtttacttcgcatctggtaacacggccttctgatatggctcagactcagttgcaaagtcaggctcggagttggcattcatcattttctaatcatcagcatttacatgacagaaatcacctatgtttacagcgacaggtatgtagctctttgcttttattttggagatttgggggtagggcggactgttagtcattgggttaattttatatgaaacatagtcaagatttctcaaacttggtaattccattaagtgaacatacatattttgatataggtttatattgttttacaagtcttgtattgaaagtgattcactgatatgctcaaagcaatagattagcttctatatttagaaaattataaggtgttaagacttcttttgtgatgtttatgaatacctttgagagaaagttattttatcaaaaacaacttaataatcataattaaaagggaaaaaccagactgggaaaattttattgcaaatacaattaacattgagttaatattcctataaaaagctttataaattagcaaacttttaagacctcagttgataactagataaaacatataagctgaaattcacaaaaaggaaattaaattagtaaacaaaaccagaataatatgcagctttaataataaaaaataaatttagaatggttttatttttacctattagaaaaacatgttaaatgttaatgcttaatgctgacaaatttatggtgaaattggtacctacatggctttgttaattaatgcaaatattttgaaaagcaatttggtactagattaaagaatataaaaattctccattttaataacccagacatagcagaagtatatacccaaagatatttgtcttaatatacttacaagggacagctgaaaaaagcatagctcattattgtaatcacgatagaccataggcactaaaaagattttgaacactaacattgagaatatgttaatgatggagaaaagagcgtaattcaaaattaagatcacagtgaagtaaggt

SEQ ID NO: 83239 - DNA, 1100 bp, Homo sapiens
aaaataagacatatcattagaaattgtcacttcatagttcttgttaataaagtgacgtatgaagccctgcttgcaaggttttcaaaataataggaattttgaaataatatatgctcgaattaaatataaatgtgttaattgtttattggtgtatgataaacgaaagagcagttgtcaaaatgcatggtttaaatttattatgaattttttattattaggcataccattagtagtctccctgtaagttctacggtttttttaaagccaagcagataaaatgttttgctgattttactgcttgcatgtaaattacaaaacttagtaaaaatctgaagcatctttatcctcagaaagagttgatatgtatgtaacttattgcgaatttcaaataagatttacagtttcatttttaagaatggtacctttatatgaatcatgctagtaaggtttatcattgacaaatagatgtaccatattttattgaatctaaagtgtcattgattataaaacagacacaccattaattttatgtgtcagtagaagacaaatattgccagttaaaactatggcatgtcattgattattaaatgattcctgattgcagagatgttcgtaaaaaacaatatatatcttttttttttttttttgagacggagtctcactctgtctcccaggctggagtgcagtggcacatctccgctcactgcaagctccgcctcccaggttcatgccattctcctacctcagcctcccaagtagctgggactacaggtgcccgccaccacgcccggctaattttttgtatttctttttagtagagatggggttttaccgtgttagccacgatggtctcgatctcctgacctcgcgatccgcctgcctcggcctcccaaagtgctgggattacaggcataagccaccgtgcccggccaacaatacatatctgttaagaattcaactgtgctgataaatgtattggctgattaatacgtagctaacaacttggatccttatttcttacttacattaaatacatcagtaaattcagcctttctgaaaaaggatgtccaactttaaacaggaagtaatagtctaagttc

SEQ ID NO: 83240 - DNA, 1032 bp, Homo sapiens
ctcttctgtggtatccccctacctggaatgtactctgccgcttctttcactacctgttaaacttcttttcatcatatcaaatgttgtcttttctgtaaagccccctttactcttcagtaagcgtgagcacttcttcctttgtgttcacattgcatcctgtgctaacccccactttggcattttagctgtgatcatagtctaactatgatactttaaggttaggaactgtgtcactatattttcaaatcctagagcctaggaaagtgcttggcatagaataattagaagttgttagcattagttgagaaatcactatgcatcaagactgtgctaagagccaatatacattatcccacttaattctcagcaacagcagatgtagttattatgatatccctattttccaggcaaggaaactaaggccaaaagagatcaagtaatttgcccaatgtctcacagataggtacatggtggagtcagggtttaaatctttgaccctgtgttttcaaagtgcatgctcttaacctccaaattctcctacattaataaatagttgttgaaagaattctgatatctttctgataaatcatacctgaaagtattggggagattttccatttttataatacagatatttaaaatagtacgttgctgattaataattaccgtggtttaaaatcatgcccctgcatctgttgaagcagataaggaaatgtgagagttatgtttttatacctctcatcaagacaaaaaaacccactttcattttagatagctccatctggtgtgtatatatgtaaatatcaatatatatataaacatacatatatgacgatatactgacacatacatgctttaggaatataaaaaataatagttcttatgcttaggaacatacagtacagataagataagccttaacataagtgaaagaattaaagaacaacaaattgttaaagtgccttaagtaattgtctttctactgtagagcagaaggaagtagaggcttttaacgaatagggggattcaagg

SEQ ID NO: 83241 - DNA, 1647 bp, Homo sapiens
tgaacattaagatctatatggtgcccataatagaattctaaatattcttttagcctagtgttagaaatccatagaattcccccctcctagagaataatagtaattcatatcgttttcaaaataggatgaaggaaaattgggtttctagtagccctttaattagaatttttatatgtcaccaggctgtgttattttgaggtttgaaatgtcaatgtcttcatggccaagagacattcgacccatcctacatgaggcatggtgttatctagtacatttggctgaccatatgagtgcctttctttctctcagtattttactactcacaagagaaaggggcagaggcatgactgcatgcatatagtttgtcaccacactgtagcagtgactcagccatttttgtcatggctgtgaaggtaaattaaagacttgccaaatagaagacaggcagaaaccagaagaacttgtggtttattttgctggttccattttttggaagtgtcatgaagttactaaatatatagaagaaattggactagaaaaaagaagagatttgccaaatattgagcaattgaacagttggttgagatgccactacccgcatgaaatgtctctaccccatgagattacaagggaaatttaaaaaataaacctaagccctttgggattttgaaatttttatctttattgtaaacaccaaaagagatgtaactttgtttttgttttttaagttctccttgaaatataaaacttttgaaacaaatattagatatttagggaggtaagtaaagccatgtatatttgattccagatttaaaattacttagattatttaaaaattatcttactacatgtaatactttgtaaaaggcttagttttgtgtgatgatagtgatgtcttttatatttaaggaaagctactaaagttagtgaaacagtttcttctttcattcaaaattatttggtagatttaatgctttcttattttgtgcatttctttttaaatattttatattatgttattctgctttaaacacagtttcatgtgttttggcaaacactatttaatttattcttctagatttatacccccaattaattctatacccaatattcatctgatacactttttaggttttggactaaaactgtgaaattattaatagtttaaatatttattgcccaagttatgacatagttaaataaaacagatacctttttattcttaacaatagtttctaaagaaaagtaatgtagtaataaaggtattcctaataaaatatattttgcccaacctgtgaaataatttttttaaaaaacagacatctctttattcttaatgatttccaaattaacataataaaagtattactaatatttgttgtttgaaattgtaggaagtagaactgtaggaagattgtaagcctgtggcaaatggcaaattataatcttcctctaattaaaaacaaaataggaaaagatagtacattgagtgtcatgttgaaaatttaatatacaaaattgccaactctaggggtaattattttcaaaaacttttcttcaaaataaattatataaatctgattcttgtggttcattacagaaaagaagatcaaatcgacaaattaaaagaaaaaaatacgcagaaga

SEQ ID NO: 83242 - DNA, 1015 bp, Homo sapiens
attttattgtccttataaaatacatttctaatctacttacagtcccagctattctggaggttgatacagatctcttaagcctaggagtctgaagccagcctgggcaatatagtgagactccatctctttaaaaaaaaaagttttttttttcctgatctttaggtttttatgtcagacgcacacaatgagatgatttgaccttaaagtttttaattttaattttggataaaggtcaggtaactcatgagttgctaactggggaaaaatcacttactcttctttttacatattttccaacttatctttgtacctccatgaaagtgtttttttttttttttttttttgagacggagtctcgctctgtcgcccaggccggactgcggactgcagtggcgcaatctcggctcactgcaagctcgaaagcgttttaaatcacattagtttcaaaacaagttagctttctgataatgacaaaactgttatagggaaataataatagataaatcgtatcttgcaattagacttttgatcattttactgttctgtttctatatggcaaattgtatacctttagactacgacctccttagcatatagtgatcacaattactttattttagaaatgatcgtaattctattaaagttaaatgatgaactacctatttgaaaagttgaagacaatagtttatattggatgttatgatttaaaatacatcttaaaatggttatctgtgtcattctaatatattatttttataaaaattttagctcctatcttcactgtgagtgggccacagaagagcagcttttgaaagataaaaggatccagcagaaaatcaaacgattcaaattgagacaagcacaaagagcacatttttttgcagacgtaagaaaaaaataaataagactattatgtgttggtctctgaatacatgtagcattatttatcaaaaattacacattattttaattcttagacttccagtgttgatatttgaatacaaatgctacctaa

SEQ ID NO: 83243 - DNA, 2046 bp, Homo sapiens
ggggagtcccatacttttaaatctaaggtcttgaactctgggcccatatttttatttgcctcttgctacctgagtgtctatctcaatgattctttaaacacaacagattaaaaattaatattatttcctgtttcttccccatcaaaattgttcttcctctgtattttccatcttggttaataacaacacaattcatttagtcacccaaactgaaatctggcttcaccctacaccccatactttggtaactaggtccattttattctaacccataattaattctggaaagttctctcctcttagtttctcctctcttagaccaggtgcccacactttcttccctgcacttaatggtactttctcagttactgtcccaacttctagtcacctcaacctctaatatccacaatagcaccagagtaaactttaaaatacaaacctaatcttattggatttgtttgaagagttccagtaatttccattgcataatagaatggcaaatgtcttctatttatgaccctacttacctcaataatctctcttccttttaccctcccctccaaaccatagaacaacttttggtccttcagttcatcatgttctttacacttctgctcattcactgtgctctctggcaaaaatgctactcattactgacctcctttctgaaagaggtcttctctcatctcttctagccagagttgaggcttactcttttgagcctccataataaaccatactgatgattcttaattggccacatatcataatcatctgtgaagcttatttttgaaattatagctgattttatcctattccatactcattgaatcagaatgtataggggaggggcctgagtatcttttttttcaagctttgtaagctcttctgatgtgcagccacaattgaaaaccagtgctttatctgtgcttcagtgatagcacattgcatgactatttatttatttgcatgtcagcttctgtaatagatacacacccctgaaaggcagagaacatgttttatttcttttgtatcccatcttctcatactgtcctgagatacagaaggtatttattaaatgattcctgaacaaataatatattgagttggccttgcccttcccttttcttttttaaaaaatcagacatctaatgggtggtatccttattttggagctatagaaatctttgtgcctttgcaggtttataataaaattgtaatcttaagcctaccctgcacttaagcaacttttacatttttataaatgcaactattttatttgatctttgattatttttgtatatttatctttaaagtatagaaaaaaaacccaatgtatgcatggataatgtatttgtttatttcagacgaaactgcatcttagcagatgaaatgggtcttggcaaaactattcaatcaattacattcctctatgaaatccttctgactggtataagaggacctttcctgattattgctccactttctactattgcaaactgggagagagaatttcgtacgtggactgatattaacgttgtggtttatcatgggagcctgattagcagacaaatgatacagcaatacgagatgtacttcagggattcacaggtgtgttattgattattttgtttgttgtttgaaaggtcagggctgaaaaagataagcattacctaccaattattttcaaatttaggatacattttaattgcctacctagatcttagtttaagttcttttattcatcatttttattttacagtaaatttgagcagctgaagagaacaatgagaaaagtcaatttaatgctgtagttcactataatgaagtatgcagatttaaacaatgcacgagtttcattgtaatccttaatttttcaactagaataataattttactaattgtttttaaatacacattagatttatttttagggtattaactgtctctgatcattgtccagcttttttcccgtcatttaaaaaatttaaatcctcactaataccacaggcttaaatgcctgttgaggtgagaccataggttctc

SEQ ID NO: 83244 - DNA, 1042 bp, Homo sapiens
tttcaattgaagaataattaattatatagatgcttaatttcgtataaatgtaattgtttcaaccttggaagtaggaagcaaaatgaggttacaggagcaaaatcagttaatttatccattttcaaactcttgggcttaagtgatcctcccaagtagctgagattgcaggagtgcatttccacacctggctaattattttattttttgtgaagatagggtctcaatttgttgcccaggctggtctcgaactcatgtaatcctcccacctcagcctcccaaagtgctgggattacaggcaggagccactgcacctggtctagtgtttcattattcttactcgtacatttgtagaattttagagctgtatgttgtcataaaaatgatttaatttgacattctcattttttatagaaagcacaactaatatcttgagacttacagagatttttaacaaagttacaattttaatatatgtgtcacatgagtttggcataaatatgatagccaaaaacctggaagattcttgatatgtaataaactgaattgtatatattaaatattgtatttttatgataaatgttacaaattctagatatatattacctaaagaggttttaaatttcaaaagataaagatgtctcctataatgaaataaatagatctgcacttcaaatatagaaatgacttttagaattaactcttttaaatatattttcatataaattaagtgaatatttaacttcttttttttttacattatcgaatagcttgaaataacagtagtactaaaatcatgctaaaatttttctaaattgccctgggaaaagtaatggaagtgataaactaataaccacaaacatttatcaagtatttaacatgtgccaggcattatgctaaacagtttacatatattatttcacttaatctttgtaatatcaaccttgtaaaatagatagtattatctccattttacccatgagaaaactgaggctaaagaagttgcatagattgccccaaaatcacagtgtaaaaccaggattaa

SEQ ID NO: 83245 - DNA, 1033 bp, Homo sapiens
agggtctagcacatagatactcaatatctgctgaataaagtatttggatggctaattattcactatttatttgctattatatttgtgaactcattggtgtaagtaataagaactaatactgaaatctcattggccagattttatcatgattatttcttgcccaaaattattataattcttaaaaattatcatacaacattttaccaagaaatacttattaggatacaattatgaataatataattatgttggcataatgtttaacaagattattgaacacggcaatataatacagtttcaatgataaaagttttcattgtaagggagtgtctgcatatgtaaaaatttcattagaaatgttttataacagatgttatctgatgccacttgacaggaataaaaaatatgcaattaaaatattccagcaaataattatatttgatcatttctaggggcgtatcattcgaggagcttacagattccaagccatcatcaccacttttgaaatgattcttggaggctgtggagagcttaatgcaattgaatggcgatgtgtgattattgatgaagcacataggttaaaaaataaaaattgtaaactcttagagggcctgaaactcatgaatctggtaagtaacttaatattatcattatgacaattgagtttattagatgtatagtgaaaggttatagagttaatgctaaaaatttttctttttaattttagagtgtagtacatctgaatcttatctgtgataattgagattttttggggggccttaatttgtaagaaaaaaaattctgtttcctacgacttcaaattttttagctctttccttcaaaaagcattagtaattaatttttaaaatgagacctctatagagtatgtactatttaaaagaaaataagaccgtaagtttttgttttgtttgtttgtttgtttaagatggagtttctctcttgctgcccaggctggagtgcagtggtgcggtctccactcactgcaacctccacctcccaggttcaagcgatt

SEQ ID NO: 83246 - DNA, 1366 bp, Homo sapiens
tcagaaaaatatttgcatattgatcattcgataatctaagtcagctttcatataattttagtactgtgatgtttgatgtgaattgttctcactttttgtaggaacacaaggtgcttttgactggcacccctctccaaaatacagttgaagaactatttagtcttcttcactttcttgaacccttaaggtttccttctgaatcaacatttatgcaagaatttggggatctgaaaacagaggaacaggtatcctattgctctttgtaaatacattcatcgcatttctaatcattgtaattattttgtatgtgtaattaaatgctcacttatgttatatgtctttttatcattttttattcaggtacagaaacttcaggctatcctgaaaccaatgatgttgagacgattaaaagaagatgtggaaaagaagttggcacctaaagaagaaaccatcattgaagtagaacttactaatattcaaaagaaatactaccgggctatcttggaaaagaacttttcttttttatccaaaggagcaggacaaactaatgtacctaacttggtcaataccatgatggagctcaggaaatgttgtaatcatccatatcttataaaaggtagctaaaaaagattacaacaaatatgttttttcttgcaacaaatactaatgaataaataaacagaacacactacagctgtagtggctgttatgactctccactgtgatattctaaggaattacaagtgttacagaatcagaggcaatgtgaactgctttgttacagtgactgatgttaacacaccaggttatgacagcagcagtttgttcagtataatttggactagaatttgtcctcttgtttaatcctcctcataggcaaagacagcaaagcccatttttggggcttctgcattgccatttttttcctggtttccttccagtcaagatacatcagttagtgtttcaattcttgtgctgtaataatgttactttttaagatcttatcaggttctttcccagtgttctctctgtacaatgtttgggtttttcacttattcttgggaatatacgcctctctactcactttattcaagacaactgaagtctcttgtagttacagtactctcttatggctagacaggctgaggaaaggaatacagagagcctctttaattctgatttggattatccgaaggaagtatgcatcaagcacctgtaacatggctttcattttaatttattctcttctttctttctttttctgtgtttttttgttgttgttgtttgtttttgtttttgttttaagatacagtgtcattctatcacccaggctggagtacagaggtgtgttcatagctcacagtag

SEQ ID NO: 83247 - DNA, 1035 bp, Homo sapiens
ctggaaactgacccttctgcctcagcctccttagtaactagaactaggcatatgcaccaccatacccagctgatttcttttttttttctttttggtagagatggggtcttgttatattgctcaggctggtctcaaactcctggcctcaggaaatccttctgccttggcctcccaaagtgctgaaattacaggcacgagccactgcacctagccttaattttttcttgtttccttgttttgatggctaacaagatgcccatagacacatccagatcaactatgatcatccttcagtgatgaccactgttatgattgctgtttaaatattagatatttaaaaatatatgtgtttactcaactgagttaggaccacagttttattttttccctaataacattcattaaacatttggcaaacataaatttataaaaggcattatgccaggtatctgaggagacaaaaagatgtttaagaccttgtctgtgtcctcaatggaattacagtctggtattggtggaggttcagcaacaagcttaaataattctaataaaagcaatgtacatgccattagaaaattatgttacagaagcacacaggagcactaattgtgattaaaaggaaagcaattgggaatttcctgcatttgcacattgctgttatcttctcctatttctttgacaggtgctgaggagaaaatacttggagaatttagagatacttacaatccagctgcttctgattttcatcttcaagcaatgatccagtctgctggtaaattggtccttattgataaattgcttcccaaaatgaaagccggaggtcataaagtgctcatcttctctcaaatggttcgttgccttgacattctggaggactatctcatacataaaaggtaaagcatactgaatttactgtgaattatgctaagtatatgctattaagatttgtgcagcactgtaatgtaaatgaactttactcatatctttctctttgctagattagaataatgcattcaaatttataagtaaagattg

SEQ ID NO: 83248 - DNA, 1037 bp, Homo sapiens
aggctgcagtgagctgtgtttacaccactgcactctagcatggataacagagcaagaccctgtcttaaaaagaaaaaaaataaaaaataaagaaaagaaccttgaaagatgttacccaacccttaggccttgttttaaccaaagccattctaggcagatgggtaattcttattttaacagagcaaagaagagtcaacaacttcaatgtattatttctgtgaattctctcttatgcgcatcccaaacccaaatgcagtttaagcatgcctcttgtgttctttgacatcctttagggatactttctcactttatgaactttaaaaaaaactatttttatggaagttaatttctccttagattcagcagctttccaaaaaggaaatagaagatctgcttcgaagaggtgcttatggtgctattatggaggaagaagatgaaggctctaaattctgcgaagaggatatcgatcagattttactacgtcgtacaaaaactattacaattgaatcagaaggacgtgggtcaacatttgccaaggtaatagtgggtgcaattttattaacatagcagtgatgttcacatcctaactactgagaaagtttaattatctcttataccgaatgtttaaacatactgaattagccaagatgcagtaggtaatgtattttccttcatttttttctgatcccttatgttaatttcacatgaacttttctgatccttgtgaaacagaataaatgtaataactagaaatggttctaaatgttagagtagaacatatgaaatcaaagaaatttagaaactaaacatctgtatataccaaaggcagaacaaaatgtaagtaatgtaagaggttaaatcagcttacatcaactttcataatttgaagaacctaaaggagagagaaaatttcctatttcattttaaatacttaaatctggccgggcgaggtggttcacatctgtaatcccagcactttgggagccaaggcgggtggatacgtgaggtcaggagtatctaagtcttaaggggtaaga

SEQ ID NO: 83249 - DNA, 1011 bp, Homo sapiens
aagagtttttaaaatgacaatgatttattttcctttatttcccatatcctgtgttatatttcctttaggagatattactatctgaaaatgtgatgaaaataaactagaaatataccagaaaattaactctgtagtgcaggcaggtttggaaattcttgttctctaacctaatttcttaatggtcttgtaatgtttttagaaaccatacccccattctctgtagcctccccaccaaaaagattcagtccttaccaaaagtatcagagttaaccaacagtaataacttatttaattctgctcctaaacttcagcctgtgtttgcattaagcctttgccttaagcagatgcagtgctgtgtttcagaccactgaatttgaaacaccctttgatgtatgagtatgcagaattcaaattctatccatagtaaatgtgaggagataatgttttaagtgtactttgatagatttttcctctaaaactgccattatatatttcaggcgagttttgtggcatctggaaaccggacagatatttctttagatgatcccaacttctggcaaaaatgggctaaaaaggcagaaatagatatagaggccatcagtggcagagtaagtatttttatccctctaaaataaacttgcttttgggatactttggcaatagtattgtaatattttaaggtgttcaattatgcagttactaaaacaaatttctagatatataaattgaagtagggtagcagaatgaactgagtgaggttctcctccaatttaatacatctaatatctcccatgatgggttatccctacagggaaggtttaacttttggatataatttacattcttaaaattataatatgttttttaaattttttaatgtcttcaaatcatgggttacatttattttctctttaatgttttcttagtgtcagaacccattaatgataatctagtaaaatgtaaataagaggagaaaaaaagcagtcaagaaagtggcattttttaaactgc

SEQ ID NO: 83250 - DNA, 1036 bp, Homo sapiens
tttatcttcttagaatcattaaaatttacttttaaagtactctatttttagcatatatttaagagcagaatgatgagattatcctcaagtatttaaattttcaaagtatcactaaagtcaaacttcttgtccttaaattcgcatattcagtaatacaaattagatgttatccattactgaataaaatatactagaaattactataccattcctctacattctatgcatgggtagggaagacttaattagcaaaaatgacaattttttaaagtttttcattccttttatctatgagttaatatttttctctagaacttgactcaatatcaatgtaactataccttttttaaccaggtggggccgatggagagagattctatctcatggccgtttcaaaaggcagctaaatgaacacgatgtagagataatttgccgagctctcttagcatattgccttgttcactaccgaggagatgagaagattaaaggtttcatatgggatctcattactccaactgaagatggacagacacgagagctacagaatcatctaggtaagaacattgtttcatttgcttttaaaatttatttttagttatataagtaatacttaacatattctcctataaaatataaaagcattacaaataatattaaggaaccttaaccttcactcccaattcaagttccagcttcagaaaatgccagtgttatcagtttggtggattttacattttgttatcaaatacgtatctgtttggaattgatgacccaactaaatgtcttagaggtctttccgtctatgctcagatagatctatctcattttttaagttctgcttagtattccgtagtatggatattccataatttatttagtatctcctttgatgatgggtgtttaggtagtttcaattttagacaattaaaaaacaagtttcagagaagatccatgtaccctcctccttgtgcatataaataaatctttcactaaagtagatatcaagaatggaattattaaagtatagcttatatac

SEQ ID NO: 83251 - DNA, 1052 bp, Homo sapiens
agtactttttgctccttagccttcctaacagaacattcttttttgcatgaaataattattttatagcataaaataattgaatttccagtaaaaaataaaaagaattactatgcccttaaatttgttacaattttattctacttaatcaaaaaatatctgttgaatggctggtgtgtgtcttgtgcaaggtgttgaaaagataagaagaaacaagatagacaagatccctgagctcatgaaccttacattctaaccaggtagacagacatagtaagaatgtacattagttatagattgtggtaattactgtgaagtaaataaactattgagatggaaaacaacagaaagcacccattttagatagggtggtcagtgtaggcctattttaataggagacagtgagtttaattaatgtgaagacctgacttctaggtagatggaagaatcacacaaatgtaatttcactctttcttgaaactccactagaaaaaagtaaggcactaagcttaacaaattctacagaacaaaagacttggattcctcaacaaataaattatcggattaggagtgaatagagaggtatctattcacagccaaagatgactttctgccccaatcccacccctaccacagactatcacaaccttcagcgtgttactggcatctagtgggtagaggccaggagttcacagatagtctcccgccccccacaatgaagaaatatcctgctcaaaatattgtagtgccaagattgaaaccctgctataacctaaaagagattgaaaagttatcagccagttgcagtgtggggtctggggactttatttttatttttatgttttgtgacagggtctcgttctgttgcccaagctagagtgttgtgacgtgaacacggctcactgcagcctcaaactcctgggctcaagtgatcctcctcccctatagctgggagtacaggcgtgtaccatcacacctggctaatttttttttttttttttttttttagaggtggagtctcactttgttgcccaggcatgtctcaaaattcctga

SEQ ID NO: 83252 - DNA, 1342 bp, Homo sapiens
acacagttcataaagggagaaatgatttggaaaacagatgtgaggaaattatccagtatagcataatggattcgtctggaccaatcaggagagataacccaaatagtcatttgaacaggaaatgtataatgtaaagaattattaattatactatagtaatagattagtaaaaaataaagactacattaaagaatataggaatagcatataaaagcagcatctaccactcctagggctcagataaagctcccaaggaagagtcccatccctatcagtgccaagatccagactttggtaggaggatatggccatgtctcactggatggcagaaaagttgctaaaaagctacccgttgaaactggctgtaaatctgccctgtaaggttgccaaggaagattttcctgggaaagtgtctcactggaagcacttcactcacaaaaccactcaagagggaggttactgggaaaagctgctgaccaagagtgctaaagaaactgctcaaattgaccaggcacagtggctcatgcctgtaatcccagcactttgggaggccaaggtgggtggatcatttgagttcaggagttcaagaccagcctggccaacatggtgaaacccaatctctactaaatatacaaaaattagccaggcatggtggcatgtacctgtaatcccagctacttgggaggctgaggcaggagaatcacttgaagccaggaggcggaggttgcagtgagctgagattgtgccactgcactcctgggtgatagagggagacctgtctcaaaaaaaagaaactgctcaaattgtgggagctgggtactggggaagtggccttgctatgggagctaagcaatggaggtgatcaccagaattaggacgtaaaacccttttcctctacagtgtctctctggtttgctgtactaacaaagctttatatcatgctgactgacagaggaaaaactatttaaagagctgtttaactattttcttagagcaggcaaaaaaaaaaaagtatgagaggagctggatgcagtggctcatgcctgtaatccagcactttgggaggccaaggaacagagattgcttgagcccaggagttcaaggccagcctgggcaacacagtgagactgcatccctacaacaaataaaaaaaagatgacatttgcttgtagtcccagctactcaggaggctgaagcaggaggatcgcttgagcccgaaaggttgaggctgcagtgaggtgtgttcacgccactgcactccagcctggacaacacagtgagaccctgtctcgaaaaacaaaagaaaaatatgaaaggcaataaatttggagcaaagagactg

SEQ ID NO: 83253 - DNA, 1016 bp, Homo sapiens
atagttagaggaaggttggaggaaaagaaactagcttaacagtaatcatagaaaaggaaatacttttagtaaataatgactgtctaattgtcaaaagcaatagagaagtgtgaaaggatgagaattgagaataagcagttgaaagttttatttttgctaaattaattatttaacattccattgggggagaaaagctctctgttataaagaagtttgattctcttttctttttttatatatctcttgacccaattaccctgtgacaagtttctattttcttttaaaaggatgatgtttcctcaccaggagatcttgttatagcagatggaggtaaattgcacgtacttctgtacttagtattattgtaaattcacattctaatcataccatgagatcagtaaactattacacttttataatgtttcatatataaaaatttttattgactgccattgtaatcgttataggacatactagttgactgggaatttaactacttttagtggttatgaatcttcaggcagtgactcactgagcttttatagaacataggttttgatgacattatgacttgactattaaacttgtatgtgagatttcatcattaaagtgttgatccaatatattcaacttctttttcattctatgtgtacattaagagccattctttatcacctagtttctacaaagcttttctgtgccaggtcttgcttctacttccttctgatatcaagatagaaatgcactgtcacaagagtacactcactcccaccagcatcccagaggaacagtgcctcaccctgccatagttcaactaggaatgaaaaagtagtttttgtttagtatgaatgactacagcttgattatggtatagataattatagtattacaccttagaaatagagcattagatcctatacttactaggtggataaaacttaaaagttacatcattgtcatcttgaacttcgaaaatgtttcttcccagtgacttaaaatattttgattctaattaa

SEQ ID NO: 83254 - DNA, 1049 bp, Homo sapiens
ttgtcttgaattcctgacctcaagtggtccgtctgcctcagcctcccaaagtgctgggattacaggcatgagccactgcactcggcctcttctattaatttttttaaccagtctagctcacagtattctattttttgtactcacatagcaacttatctaagtaaactactcgtttgtcacaataatataagatattgtaatgaaattcatcttttcctttctatctttctcagttgtatcttcttggggatgggcactctgtcatattttttgtgtcctgtgtagtctttcaattaatcgtttttcccatttttattcttattacccagatttaatgacttgggtttcccaagctaactatttttacatcataattacattaatcttcttaatgtatcactatgataaaaatggcccattcacatttttcaaaggcctgtcccatatgttttttctaatttacacaataatcctgtgagttaagcaaggacagggttctacacctgcactaaggtttgcagatctatggtgcatgatgattatattaccatctcaaagcatcaggagctttcaagtgaaagagattacttttacccaggcctttagagcatttcataatctgacccaaaccctatatggctttgtctccagtataagccataaccttgtcaatctggaatactcatctttcccctccaatatggaccactccctctttgcttactctgtgctttcttcctcactttccctaaccttagcctcgtcccatctgaaatgccacttactctgtgatgcctttcttgattgtcaagtctgaactgatccttctatcttctatgctctcctgaaacttttggtttctttaactcatacaaatataaggtattaccttatactataaatgtgtttgattttatctttttcctgaagggcaggatcatcttacatgattttgtatcctgtgctgattttctcacatagcaaaaatacaaaacaccattattgtctgaaggaatagtgtatacttttaaaagtatgtttggggacac

SEQ ID NO: 83255 - DNA, 1104 bp, Homo sapiens
tctcctgcctcagcctcctgagcagctgggactacaggcgcccgccaccatgcccagctaattttatttttgtattttttaatagagacggggtttcaccatgttagccagtatggtctctatctcctgaccttgcgatccgcccgcctcggcctcccaaagtgctgggattacaggcatgagccaccgcgcccgacccattaaaagtaaatttttctaaaaaaaagtatggttggatagatgagttaactagcatttaaaaatgttttacaaggcagcaagcttgtatttaatcctatagtgttaggtacttgaaatgttttaagtttgtattatagtcattatatttagtattaatattaattttagtgactagtgtggtttttttctttaatctgactcaaaatagatggacaagaagagaagaagctgacttttatagggttgtatctacatttggagtggtttttgaccctgacagaggccaatttgattggacaaaatttagagctatggctaggctacataagaaaactgatgatagtttggaaaaatatttgtacgcattcatgtccatgtgtcggagggtttgtcgtcttccttccaaagaaggtatgtataaaatttctttttcctggtttcggtcaaagaagcaaaaatcactaaaattcggaaatttccaatttgtctcttttatgtgaaatttcaatactatctaattcaacttgtcagtaattttttagaattataaataaactagcttaaagatcgcgtatttgttaatcctgctattaaaacgagatctaaagagaataaaggtatacactgagtcttaagaaaacaggtagagtttagtgatagatttatgattaggaggtggtggaagataaaggattgcttttgttaaacagaactaacctatattttcagtccatcttataggaattgtgctagagggtttatttacctgaataattttgcaaggaatgaagcccccactcataagacattttaaagaattttctagaaaagatctcccagggccatcttcacaaaagactactaagcagaggcattgatgcaactcaactaaggaattgttct

SEQ ID NO: 83256 - DNA, 1151 bp, Homo sapiens
gtggccctcatgatagggatttgcttattggtgctgccaaacacggggtgagccgaacagactatcacattcttcgtgatcctgaactctcatttatggcagctcagaggaactacagtcaaagtaagatggctcattcaaggacttctaccccacttctacagcaatatcaagtagcactttctgcttctcctcttacctctctacctaggctcctagatgctaaaggtattattctagaggagatgaaagttaaaagtgaaaaccttaaagaggagcctcagtcttctgaagaagaatctatgtcttctgtggaaaccaggacactaataaaatctgagcctgtaagtccaaagaatggtgttttaccacaggctactggagaccagaaatctggtggaaaatgtgaaacagacagacgcatggttgcagccagaacagaacccctaactccaaacccagcttctaagaaaccaagagtccacaaaaggggatcagaatctagttctgattctgactcagattctgagagatcatcttgttcttccagatcatcttcttcctcatcatcctcttcttgctcccactctcgatcaggctctagttcttcttcatcttcatcttgttcttcagcatcttcttcatcctcttcctccacctcttcctcctcctcctcctcttcatcttcatcagaagaaagtgacagtgatgaagaagaagcccaaaaacgaggtactatgcataaaataattctacttttttaacataacttttcttttcttttcttttcttttcttttcttttttttttttttttttgagatggagttttgctcttgttgcccaggctggagtgcaatggcgcaatctcagctcacttcaacctccacctcctgggttcaagcgactctcctgcctcagcctcccaagtagctgggattacaggcatgtgccaccatgcctggctaattttgtatttttagtagagacggggtttctccatgttggtcaggctggtctcaaactcccgacctcaggtgatctacccgcctcagcctcccaaagtgctgagattacaggcatgagccaccaggcctggcctaatataacttttcaagtgaaaatgaaaagaactcgtttcaggtaacttaa

SEQ ID NO: 83257 - DNA, 1526 bp, Homo sapiens
gcactccagcctgggcgacagagcaagactccgtctccaaaaaaaaaaaacaaaaatcaaaaaagaataatgtagaaaaagatatttggcacaaaaagcagagataaatgattttttttaaaaaaacaagcttttgaaagtataggaactaatgggttcaaagaaaggggaaatgtttatcttagggaaaaggcatgcttccttctccaaggaaggaagagaaaatgtgtgaatatcgggaaaaaaaatagagaagacaggtcaaaaattgaaagaggcctaggttgtaattcttcaggtttttaaatgagaggtggggatgatatttttagtccaaaagtttctacattaaagatgtataaaataagaactaacactttcatatatttaggaaagggattactttcagtttgtttaagaactaaatttgtatcaccattttgcatttttaattcaattaggtacttccattcaaccaacccttggtgccaatggtgtgatattagacaaccagcctatagtcaaaaaaaggcgaggaaggaggaagaatgtagaaggtgttgacatcttcttttttaacagaaataaaccacctaatcatgtaagtaaagcagtacttaaaaactgatccttgaattcaaaattcaatcctaataaatatacatattattgttttgtgaatgttttatagactattagtaaggaaattagaagtatgccatataattttagatgatatcttagaatcttagcactgtccaagagtgataaaaattttaagtttaaaagatttagcagaatttttagcaacaacttattttttctcttcaaaaataattgctttattgaaccaatattagaatgataaagtatgaaaataaagataccatttggtgtttttttacaggtttctttaggcttaacctcctcacagatttccacagggataaatccagcactatcctatactcaacctcaaggaattcctgatacagaaagtccagttccagttattaatcttaaagatggaacgagacttgcaggagatgatgcaccaaagagaaaggatttggaaaaatggcttaaggagcacccgggttatgtggaagatttgggagcttttattcctgtaggtgacaccttaaaattcttgttatattttatttttatgagttgtcagatctatcatgatgaagcataaattctcatccacttatgctaaatatgtgctctgcctaagacctaggagaattagcagaaaaaataattaccatccttcccatgatacaatacaatgttattttccatttttccattctgcattcaatgagtatttaataataaaaatcacttccaatatagagtactatgttagacccagtgaaggttgctaaggtataaaacttccaatcctttctcaagcagtttattttaaaataataatgattatagtaaacatgtattgaaacttaactatgtgcctgcagttatgctgacatacttaggcacaccacatgcattacctc

SEQ ID NO: 83258 - DNA, 1699 bp, Homo sapiens
tagccaggcatggtggtgggcacctataatcccagctactcaggaggctgaggcaggagaatcgcttgaacttgaaagtcggaagttgcagtgagccaagatcgtgccactacactccagcctgagcgacagagtgagactccatctcaaaaaaataaataaatacttataggtaatataactgatcatattaaaccttatctgtatcctatcaagatatagtatttaatcattcaaagtggtatagaagaagaaattactcaagaaatatttttagtctctaaagggatgttaaattggtaggtataaatcacttgtccaaatgtaatgtttttaatttaaatttcaaaatattattttgtctgtgtcatattattacatttttttccaaattatttacttatgattggttaattatacatacttcacatatgaaagatatatacaattttatacttttagggtgtcaatatatataatcgataacagtattggtttttgagacctagttttgtatcctgactctaacatgtactagctaactttaggcaaattatataaattctctgaggctcagtttcttcgtttgaaaaatagaaataatactatctccaaaggaggtagtgagaactaaaataaagtttacatttaaagtacttagcacaatacttgccatataataacttatatttattatgtgacaggcattatgctaaggtacttgaattgtctcattttatctttataaaaccctatgagggaagtattattgttatccccattttacagatcagaaaattgaggctgaaagagatttactgatttgctcgagttcacatagctggtaagtctaactctagagggtgtacttttaactaggctatatggcctgtccagcatggtagttattcattttactgttctagttattctacttaaaacatttaaaatttacattatcacatatttatatattacatcagtagtccatagggtcacggtgggcctttttaatataatcataaagattacctaaggtggttcaaaaaatatgtattttaaggaaataaactctgtagagcatacaataaaagcaatcaagagttttctatgtaacagtgttgtagtatttaatctgtttctaatttacaggttggaggtgcatttgctccccctttgaaagatttatgtagattcctaaaagaaaattcagaatatggagtagctcctgaatggggagatgttgttaagcaatctgtgagtattttacgaatactaactcatacattattttcaaattaggtgccattcaattatatcttagattaattataattaataaaatattccatgaatttgtgacagcatttttcagtttgcaatttttattttgcagtacatgttgcaaatttctcagatgcttctcaggttagaacagaaaatcaatactgatttgtttttacattaacctctaagataccatttgaatgatgccacaaagagtaatcaaatatatgagcaaatatgtaaggatattcatcatgatatactagtaaaaaattgagaataaattaatagttcattaagattctggaaaactatgcaattttttttctttttctttttcttttttttttttttttagacaggatccctctctgtcacccaggctggagtgcagtggcgcaaccttggctca

SEQ ID NO: 83259 - DNA, 2105 bp, Homo sapiens
tgacacctataatttacagatcaaaactcagcaataatttgggcagctaatgaatgtcatgaaagctgtagaatctacatcaccatccattgctttaattacatgaaaatgctctagtgttgtgatgcactgctgatgtttccaattcaggtacaagtatgttttaaagaagaaataagtttcccaatcagccaatttaactggctacctgttacctcagctgagttagtttaggaagtttacattcgtttctaattctatacttgttttcaggggttttttaaacacatcctatatatcatgtcaatctggcaagaaatatgacttgctttttgctgagcttaattcagatatcagtaaaattaagtcataaaataatcatgtgtcatgtgactttggcaccctatagacatacttagttttaacttttcaaagtttggcctcctattagaaataatcatgtctcagatgagtaatgtctgtttccagggttcagaaaaggcaaactcatgaaatgccactgaaaagaactttcaacacagcatacttcatgtaaaagaaattgtttgtttgctttctttgtgtagatttctatttgtgttttatgtcatggaaatattccagaattaacagataatagtggtaaagtaatatgcagatagtctaaattcattttgagtttctaggtgtaagcagactaaatgttgcccagaatcagtgttgggttatcagtttatattaaatatactgagttgcccgttttgaaaatgcactttgaataatctcaaaaagatgtacaagttatacctgtaaaccacaaaagtgaagcctgaggcttctgttcaatttcatagactcctttaccatgtaaaatttgtctgatatttgatttgtgatacaatttctcctgctaaagctgctattattctgacaaggtagaggtccaggttcacctttatatatatttaaaacaattagtactgaattggacataaaaatattgacattctaaggagagatatatgttagcatttttctggtactcaaataagttagtagtaaagtctgcaagggcataaatttagggggaaaaagtgtcccagttctctcctacagaaaaaatactttcagtatgttttgataaaactgttgctttgtcatgagttagtcaattgtatcaggttttccaagacctttaccagtaaattatgtttctgtatgtaaaataaccccttattagagagacagtgttatatgtatttacaaaattatataagttccattgggattgtattgattttgtattttcccaaaatagtactttgaattgatagtcctttatgcaatgtcttagcaatagtctctataatgcccatccaggagaagtgggtagtaattcttcatcatgaaaatgatatattacatatttagtatcttccctttgcagtattgcacttttgtttaactagaatacacctatgagatagccaaagtttcaaacacagttatcttagtttaccggtggagtatttcaacaccaaccacatttcccttcctccctctaattctacccacatgatctttattccttcctttcgccaattaaaaaaaaaaaaaaggaaaaaaaatctgtagatcttgtcactaaaatctaatttatatcaaatttatgagagaaagtattttcctaattatggtcaaataaatttggttaacatcctagtgattctctttctatataataaggcaattacagttttcaaagcattaagtctaacataactttaaacattctcttaggtttcaagacacttctatttaatattcattggggaaaagttgtccagctatcagctaagaaaacacatgcaaatatggttgtgtaaagttaagggttataaggaaaaaaaaatcagtagaattacataatactaaagttgcagttgaaagaatatccaagtatgtgttggtagttactaaaagaattatagctgttattgccttgtatttatagcccttgtttcaggttttatgattcaagtcttagtccaatctttcttttggacatttgcaatatttaccagttgtgttttgtgtagtctgaa

SEQ ID NO: 83260 - DNA, 1115 bp, Homo sapiens
gtcagcgagatgaggcaggtatgaagattccagtgcatgcaatgcagtgtgttataaaagtcccatgactaccagagggaatacagatgtaaaacttaggaggaaaagaaatcactctggatgagccagtcaggtaagtttacatggaataagtagaaatgggtcttgaaagatgggtacgagtttgataggtgaatttgaagatacagatagcaccttctgtgtagaggaaacaagaaaagacaaaagcagtaaagcaagaagaaatgtgggaggttagtcaagtttttttttctagaattctcaagttgtagagccagaattaagagtagcttaagtgttaagctaaaaaaaattgaattttattttggtaggcaactaaaactagaaatagtttatcatgcgcctatggtagagaggctacttttaaaagcagaacactgacatttaatccttgccatggactggtgaactaagtacagtattgtacccaagtagagtaatcttttgacagatgaaatgactaaggcccaggtgagcaagtaccctagctaatggcagtgctggaactaaatctaatctaatcttctccacggaatttcgttcttctgggcaccttgttagaataaggctgttgggaggtggagaccacagatttcttgtctaaaagttgtcagaggttttggtagaaaagccaagcttaaagcaggtctgaaacttggcagactacttggcaatatacaacaggtactcttaatggatggaagtataaggaattataggaagctcataatttacattaaaaaggccttttgtgatttgatatagtctggaatatctttaaggagggagggagggatacaggtcattagctatgataaaggagaaaaaaataaggacatatctgactgcatatagtggtcctaaagcagcatagcattgctgtgtcatcaaaagaactatttttattcattttattttccacctcacctatcttgccctcaaaaaactttaaaaaattctttaagaattttcttttctttgagatgggctctttccctggatcccagctatttcctaccaatattttgttaaggcagaacgtccacgttttc

SEQ ID NO: 83261 - DNA, 1169 bp, Homo sapiens
atttacttgttatctttgttgattaaaagataaaatacctcacaaagtcagatttatttgtaaggtcaggatttgaaatagaaaatacgtcatgttgagagagtcctagaatttaatttaaattagattctgatctttaggggcatttcagctttttattagatgttacagtactgcctttttttttttttttttttgccttctatggcaagtgcacaccagtaacaagtttaggcttgttggtgtgatgggctttgtagcttgaaatcagtaggtgctacttacttccttttttacacatgaggaaccaagtatattttaatattaaacctctttatagaagaaccaagcaagttggtttggctgtatcaatgcacagtttaatgtgttgattatcgtttgcctctttggcagagaagaatttttttttctctttagttcatttaagttgatttgttgaatgtttccatctatacaaaaaaagaattgctttgtatacgctgaggtaagtggtaactttctttggaggaacagagagaaagggaaacctgaaacaaagctgcaggtgtgtgtgtgtgtgtacatgtacacttgggtaggcgttaagtgtgaaatgctgaggtttggaaataattcttcatatgtatgttagctatttaaattgaatttatctgatgatacaagaatgtaaaatcaccatgaagcatacatgtgcagtgtttaactaaaaaaggatgggcttgaagttataaaataactagaaataattcttaatttctagaaaattaagataataataaaatggtttaactacacgtaaaaatgtgttcagtgttagagttcaaccagcactgcagaaattacatgtttctgtcagtttaggtttttgatttcttatttccctgttaccaagcatcagcaattattcttgggattattagccctggaattgaaagatatttaatggtactcctgttgcattaatttgtctgagtttatgtagaaaagtattaaaaatgttactgttggagtctgataaaaagttctggtcttttaaaaatatgtgtatgagaaatagcatgaactcaggaggcagagcttgcagtgagctgagatcgtgccactgcactccagcctgggcgacagtgagactccatctcaaaaaaaaa

SEQ ID NO: 83262 - DNA, 1050 bp, Homo sapiens
gagtccaggagttcaagaccagcctgggcaacatagcaagactccatctctaaaaaaagtttttaaattagccatgtgtggtggcgtgtacctgtaatttcagctgcccaggaggctgagacaggaagatcccttgagcccaagaggttgagggtgcagtgagccatgatcataccactgtactccagcctgggtgacccaccaagactctgtctcttaaaaataaataaataaagaaatttattaagatataagagtaatatgtcaaaatgtaaatttgccaaaacacttattgtaatgagtcaattttgtacaattgttttgtaatgtcataataagtaaaggaagaaattttttaaaaatgttacaaagtcaatgctaatttaactctgtaactgcttataatcctgcaggtaatttccccatgattagtgatgatttggtcaattcttatcacctgctgctgtgtgctttggacttagtttatggaaatgcacttcagtgttctaatcgtaaagaacttgtgaaccctaattttaaaggtaggtttgtaaatcaaagatttttgggcaatctgcgtttctgtgttatgtttacccttggagttgtacaggtttcctagcatcagtattttgaagagctcctgtcattacggctatccagggtacttataactaagagtcaagctgcctgtaaaaatatttttggataaacagttgcagataccacaaagtttaaagtcttaaatgacaacttcagaagtttctgaaatatatactcaacaaggagaaggcatttagaaactcagagttgcgaagatgacattaaagccgatgatgtttttctacattggcaaactttgtgcctgacacattgtaggagatcaaaaagaatttgttgaaagaatcttacttcaaattttggtacagaagaatagttatggttctaaaataaagaaaatgaactttcatcttttaaactaacagatatatggaaatgatgattttggcattgcatttaatagaacttaggtatataatttctatgaat

SEQ ID NO: 83263 - DNA, 1142 bp, Homo sapiens
taatttttttaaagtggtgttttttgtttaaaagtagacttacttgcaaagttgtattttgtggtttttagatcttagtatcctaaaatttgatatcctaaaatttaagttttaagtttcccttaaccatctctacataaataattgaataactgaaatctttcgagtaatgatacactttacttctatttgccattttttgacaaattcttagcgttgaaataggcccatatatactgtttcctatacatttgtatgctaagtggtatactgattatactctatgttttacattttagtttattacaaattggcttattgtgtgctgatatctctgttttgtgattctatacaccataggcttatctgaagattttcatgctaaagattctaaaccttcctctgaccccccttgtatcattgagaaactgtgttccttacatgatggcctagttttggaagcaaaggggataaaggaacatttctggaaaccctatattaggaaactttatgaaaaaaaggtttgtaagtagcaaagaaataacgtgaaaatgttttctggagaaaaacttgatttaacatgacgacttaaggatctcttctttcatcatagctccttaagggaaaagaagaaaatctcactgggtttctagaacctgggaactttggagagagtttgtgagtacttctgtataaaatgttttaatattttaaattgtatacttaggaaacttcagaagttagtgtttttattgtttgtactctggaaactgagaatatgttttgtgagagaatacagggaagcaaaaattctgtcacctaaatataagcacactttttaaatgtgttcaaaattgtatggctgtttttgaagtttctttaagcttctggattataaattttgaaataaattcttttggaactatatgggtgaaaattgatgatgtgtaagtgtggaagtcttcaggggtgcctagagcagctagacagatagttaagcttctcaccggaagttgcacctaccagcagctgaaacactgtcagcaaaatacttgtactgtgtgatggatgagcttggggatagcaggattacatgtgatactatccagtttttgttttgttttgttttttgagatggagtc

SEQ ID NO: 83264 - DNA, 1011 bp, Homo sapiens
cagttccagctacttggaggctgaggcaggagaatcacttgaacctgggaggtggaggttgcagtgagccaagactgcatcactgcattccatcctgggtgaaagagcgagactctgtctcaaaaaaaatatatatatataaaataaaaggtgtagctcccacaagaaaagtttttttttttttcattcaaactggtaataccaccacctttgaaaaggaagtatgggatctcttggattaatttgggaagtgtatagtttctgttcagagtgttttatatttacatgttagtgaaattatagaaacattttatccccttgtgacttgacaagacctttaaattatgttatttctcattaccttttttaggacatgttccagagatccaacccaggctattgctaacagactgaaagaaatgtttgaaatatattctcagcatttccagccagacgaggatttcagtaattgtgctaaaggtaaggtttaacattgttattctgcttttatgtttgaagtttaactaaatggagtcatttcttactaactaagaaagatgaggaaaagatttatgactttagactgaaggctaggatatggctgtccaatttttctggtcaaccaactgatttctgagcccttctcagtaagatagaaattttagaatggtatctttattatattggacttctgatgcttttttatctgcaaatctttaggttttttttgtaaactggaaattaaatagaagtgtagtgattcttcaacatattgagaataaggacaggagatatcactgttatgggcccaaacctggcctaggaattgtttgctgtcaggaattggaactaagtaggtgtggactagtaagccaattacatacctcttagcattggtctgttttgttcaaacatagaggaaaaaaaagggtgttagtcttaaatgatattacagttccttatgtgcaaatttcatttaataattttagaaaaatgtgactgttaccatga

SEQ ID NO: 83265 - DNA, 1030 bp, Homo sapiens
tgtttttatctcctaggtataccatttagcagctgtccgccttcgggatctctgtgccaaactagatatttcagatgaattgaggaaaaaaatctggacctgctttgaattctccataattcagtgtcctgaacttatgatggacagacatctggaccagttattaatgtgtgccatttatgtgatggcaaaggtgagtaccatttggaattgtaaaggcaaagataggtcttcattactgagaacattttttaaccactgtcttgagatacagtttacatgctctataattcacctatttaaaatgcacaactaaatgggtcttagtatattcacagatatgtgcaatactcaccacaattttagaacataatattccattgtatagttatatgagagtatttttatccatttattagctaatgtatattttagttgtttctacttttggcatatatgcataataccactattagcatttgtgtttgggtttttgtatagacatgtattttcatttctctagggtatatacctaggaatgggctgctgggtcatacattaactgtgttttaactatttagggaattgctagattgttttccaaagtactgtaccattttacacttacacagcagtataataaagattttagtttctccactatctcattaacacttactatcttactttgtttaaataacttattgaggagaaattcacataacataaaattaattgggtttttctttttttttttgagatgttgtttcattcttgtcacccaggctggagtgcagtggtgcatctcagctcactgcaacctctgcctcccaggttcaagcgattctcctgtcgtagcctcccgagtagctgggattacagccatgtgccaccatgcctggctaatttttgcatttttagtagagatggggtttgaccatgttggccaggcaggtctcaaactcctgacctcaggtgatctgcccacctcggcctcccaaagtgctgggattacaggcatgagccactg

SEQ ID NO: 83266 - DNA, 1035 bp, Homo sapiens
gctcagctaggatattaactttctccctatgccataaccatagcaagggctttctgagtagtgtccattaataagttacaccaaattttctaggacctaagccctgtactaagtggtacaaagcaacaggcaggggatggtatttccatagcatggttccaattgacatatcagacctttctggaactcaggcaagcagattcctccctgaaagctctaattctcctggagaaaaatgttacataatatgtgccccaaagctatgtaatggacagttttgccagctagaatatggtttactgatctataaaacactttcatagtttctatagttatttcatttagtaatgcttagttacttcttcaaggcctaaaaagtaagaaaagctcctaattttgtcttgtagttcacaaagatcccacttacttctatctttgtttagttctgttggagaattctgatggcttctgctatcactgctgccagaatttcttctttttcttttcccttttatcaaaacacttctatacacctttagagaaacaatgagaaggggacataaactagtatttgttgagcacacccttggtgataggaccttcacatatgttacttggttttcacaataacctgtatagcaatagttgtcctcagaacaggttgagaaacataactcaaattataacagatccaggattcaatcagagcccatctagcatcacatgccaagtactacctgcagtactacactgcagtgacagcacccaaccataatgtcaagtcattctaagtaagatacacagatctggccgatttgcctctcagagatgaatggtaataaaggcaaagtgggttttaaatttccatgtgacattctgttggttaaacctacagtatgtttactaaaccagaatgaaaggtgacatagaaaccaagtaacttcttaattcctatcttgtgatttttctgaattaagaaggcaatcaaatatttaacattgttgccttttgaggaaaagagaccttaatcaacat

SEQ ID NO: 83267 - DNA, 1024 bp, Homo sapiens
atctgtgctaatatgactattgcactgcaatgtcaaaaatgtcaacttctcccattagccagagtcctgaggacactgcctgtcccagaaacaggcctttggtaaggaatccaaaatttctttccctaacaaatgtggaaaattgttacaaatgggataaacacaaatttcaggtttacagcaaaatgtacaaataggagagggaataaaaagaaatccaaatcccttaccctgtttcccaccctaaaattccaccccctccccctcaaaaaaggcaaaaaacaaaacaaaccctgggttttgcttcatgaggactgactgatcactgctccctggcagctctcatcactctaatgagtgcctaagcttagcacaaaccctgtttctagcatctgaagcattttgaggttagtaaaggccaagattgatgttaggctcacctttgaaggactgttgctgaagtaatagaaaatcttttctcgaggagaaagcattgtttcatttttatgtggggaaatgtagacaggatgattttgagacaactgtattcggcgaggggagcctgttcttacaaatggatagggagagagtggaggagcatccatctgtttaaaaaaaaaaaatcagtaattctaagaaaaaaatttataattatttttactgaaaatgattattgagtgaagaggtgtgctaaaccagtagttttatgaatgacagagtgatgtattagcaataacttaacctaaagaaaaatattctaatagcaaaccttaagtgcttagtttgtgccagttattattttaagcaatttttatacattatgtcatttcatccttacaacaaccccatatgctaggaactagttatattcccattttatatatgaggaaatgaggtacagagaaaatttaatgatttgcaaggttaccaccactgttaagtactggaaaatttgaacccatgtagcctgtctcttgtactactatactttgtagggactccaaatacaatcttactcgtttaa

SEQ ID NO: 83268 - DNA, 1049 bp, Homo sapiens
ttaaggcctacttttctagtgaaatcccagttgagaatggctgctaaaaactgagtaacattagactgaaaaaaagggaatattgtataaagttgtactttaaaaaagagaaaaagatgtgtctaagtgactatcagatagcaatgtaatgctccctaattgtaaaaaaaatcacaaatttgtgaactcacaaattatagacatgtataattgacctacaggtcaaaagtgcctgtggaagagcttgttaaaaatagaactactcagccccttctcaaatagccatcggcctcagccagctgaaaagtaaagttggcaggttatgtaacttagtgtttcttttctctgtagatgtgttcaaactcttccagggtaaactgcttaactcatttgagattctttgacttaatactgagctatgtgcatttgcattttaaaatttttgtatctttttcccaccatagagactgagagaaattaatagtatgatacgcacaggagaaactcctactaaaaagagaggaattcttttggaagatggaagtgaatcacctgcaaaaagaatttgcccagaaaatcattctgccttattacgccgtctccaagatgtagctaatgaccgtggttcccactgaggttagtctcttgtattaaactcttcacaaaatctgtttagcagcagcctttaatgcatctagattatggagcttttttccttaatccagctgatgagttacagcctgttagtaacatgaggggacattttggtgagaaatgggacttaactccttccagtgtccttagaacattttaattcatcccaactgtctttttttccctaccattcagtgattactgtcaaggctgcttagaatccaaacttggatttttgactctggcaaagcttttagaaatactgcaagaaaatgatgtgtacccaaacgtgagcataggaggcttctgttgacgtactccaacagaagaactgtgtttcaagttcaatcctacctgttttgtggtcagctgtagtcctcataaaaagcaaaaca

SEQ ID NO: 83269 - DNA, 1026 bp, Homo sapiens
ccctttgtgcacatcttccctctccccattcggtgtggtgcagtgtgaaaagtccttgattgttcgggtgtgcaatgtctgagtgaacctgtataagtggaggcactttagggctgtaaaatgcatgattttgtaacccagattttgctgtatatttgtgatagcactttctacaatgtgaactttattaaatacaaaacttccaggctaaacatccaatattttctttaatgcttttatatttttttaaaatgttaaaacccctatagccaccttttgggaatgttttaaattctccagttttttgttatatagggatcaaccagctaagaaaagattttaatcaagttgaattgaggggattaatatgaaaacttatgacctcttcctttaggagggagttatctaaaagaaatgtctattaaggtgatatatttaaaaatatttttgggtgttcctggcagtttaaaaaaattggttggagaatttaggtttttattagtaccatagtaccatttatacaaattagaaaatgttatttaacagctgaattatctatacatatctttattaatcactattgttccagcagttttcaagtcaaattaataatcttattagggagaaaattcaattgtaaattgaatcagtataaacaaagttactaggtaacttcatattgctgagagaaatatggaacttacattgttcaattagaatagtgttctgcaaaaatatttataaaacttctcaagatactgctactgtaattttatatgaagataagtgtatttttcaataaagcatttataaattagcctttgtttggttatattgagaaaagggtagtttcctgcataaatggcaaagaacaatcatttattggtttattttgtctctactaaacacattagtcatttatcatttaaataccggacttcattagaaaccgttgtaacactttttctccctcctgccataaaaatacagtaagtaatttgcttaaaaaaaacaacacaacactag

SEQ ID NO: 83270 - DNA, 1377 bp, Homo sapiens
ctgcctgaagagtaaaactgtgtgaacaatgactgactgccagtgttttccatgtatgcataggttctaacagcagggtttggaaacctgtctctaagtaatgcattacttctgtcagaagtgtcttagggtggttatctagttcagtactccaaattattggggaccttgaggcttaagtaagtatttttctgaatataatgctaaaggtaagttgcattcatttaaactaatagagcagacagaattcagcactacttaatagtttataaatcagtggtttcagttgtatatatgttaggaaatggagaggtatagagagagcaggttccatagctcagcacttttaagtggaagatcatttgaatctcagtcttcagcctgcactgatttgtagcctgcactgtcttactgatttacaaactgaaatcactgagaaatgtctttagttcagtgagaagaaaccagaacacttgttcctagtgttgtgttgttttttttaagcaaattacttactgtatttttatggcaggagggagaaaaagtgttacaacggtttctaatgaagtccggtatttaaatgataaatgactaatgtgtttagtagagacaaaataaaccaataaatgattgttctttgccatttatgcaggaaactacccttttctcaatataaccaaacaaaggctaatttataaatgctttattgaaaaatacacttatcttcatataaaattacagtagcagtatcttgagaagttttataaatatttttgcagaacactattctaattgaacaatgtaagttccatatttctctcagcaatatgaagttacctagtaactttgtttatactgattcaatttacaattgaattttctccctaataagattattaatttgacttgaaaactgctggaacaatagtgattaataaagatatgtatagataattcagctgttaaataacattttctaatttgtataaatggtactatggtactaataaaaacctaaattctccaaccaatttttttaaactgccaggaacacccaaaaatatttttaaatatatcaccttaatagacatttcttttagataactccctcctaaaggaagaggtcataagttttcatattaatcccctcaattcaacttgattaaaatcttttcttagctggttgatccctatataacaaaaaactggagaatttaaaacattcccaaaaggtggctataggggttttaacattttaaaaaaatataaaagcattaaagaaaatattggatgtttagcctggaagttttgtatttaataaagttcacattgtagaaagtgctatcacaaatatacagcaaaatctgggttacaaaa

SEQ ID NO: 83271 - DNA, 1202 bp, Homo sapiens
caaatttaggccttaactcttttattttttcctacagtgtggtttggagtaatattcatacggcatggactttaccaagatggcgtatttaagtttacagtttacatccctgataactatccagatggtgactgtccagtaagttggagacacagtctggctttatttgtggatcagcgagaagggctgaaagggcttacagctttcctggttcttttcctgacctggtacctttatgatttatctacccagtagttgtccagggggacttctgtgctttgcagcagcttccggcatgccatcagagctttgtttctctgctcagggtctgcaagggaggctggctgcctgccatcctgcagcactcaccaggtgaatggtggccctcaggctctagtggaggagagggagttttccccgcttcattgcaaaatttagtttttcaggaaaatggtaaaagtagttaagtagccctcttgaggcagctctttagctttaaataacgtgactgccttgtcctgaagctctttttatcacgattcctatgggtctcataagcgccactgcttccattaaaggacatgtctctctttatttaaatacagcgcttggtgttcgatattcctgtctttcacccgctagttgatcccacctcaggtgagctggatgtgaagagagcatttgcaaaatggaggtaagtaaataaagtgtttcttttagtgacataatacagcaagaggacgcctcggtaatcacgccatgtttccctttaggcggaaccataatcatatttggcaggtattaatgtatgcaaggagagttttctacaagattgatacagcaagccccctgaacccagaggctgcagtactgtatgtaacttttgctttgttatttaaaataaatttgaagatgcagctaagtagattaagttagtaactttttgacttaaacttttaacacaggtatgaaaaagatattcagctttttaaaagtaaagttgttgacagtgttaaggtgtgcactgctcgtttgtttgaccaacctaaaatagaagacccctatgcaattaggtaagtggtgcatcccccaagtgaactgtccactgtcctttccaatacactgcttcctttctccaggtggtctcagaatagggatataaaaaggcacatgcataagctgttagcctacaacctttataa

SEQ ID NO: 83272 - DNA, 1070 bp, Homo sapiens
gcgccaaggaagtacctatgagatggtagtttagtctctgactcatgtcgacctttgtctttgacgaaggatgacagtttatgctggtgatatttgaaatgttgaaacatacccagtagggacaaatcaaaatcagacccaggcaagtgagagaatagcttcattctttgtttctaacctaagtgctaacaggcagtgactgatttcagtcatccacattattttgagcttcttagcacctaaccttctgtagcatgtaagtgctgggggacttttctagccttgtacagttgtctaattgcttagtaaccccttgccctctttttggggccactaggaaaaaacatttctttctgtgtttcagttaatcctgtacacactgattgtatcatccttataggatgagtttccctatatgaaagagtttctctaatgctttggtcttgcttcaggtttgtcttctctttatatgacctgcctgcccaaaggactttctagtcatcttggtcatggtgttagaatgtgcttgtaaaggagtaattccagcatttaggccatggagctaataatgtactcttgtgatttaagaatcatcctaacagatattcttacaacttcatcttgtatagcgatctgaaggtgaagagaagacattaacaggggacgtgaaaaccagtcctccacgaactgcaccaaagaaacagctgccttctattcccaaaaatgctttgcccataactaagcctacatctcctgccccagcagcacagtcaacaaatggcacgcatgcgtcctatggacccttctacctggaatactctcttcttgcagaattgtaagtccttaacaaactatttggttaaattaggaatgatcctttaaagtgaagaatgaaatttattctgatggatgcagtaaagggcagacatttaatctcaaagctcaaacctgtccctttccagtatcagacttaataaatataaaactataggctattgctggtgataaaatgtttcttaaccaagacctaggtagagagataaaaatagcctctcttaaagattctttag

SEQ ID NO: 83273 - DNA, 1044 bp, Homo sapiens
tttagtttggaaatacaaatagagatgtgatgtggtatgtgggagagtgtattttacatgtatttttgcctactgtagtagaaatgtcaaattcccagccactgtcatgaaaagcagttgacaaaaataagttttatggtttacagtgtggtttacgtaaagaacatttctcttcactctcagtttcaccatgttttctaaattatcatggtttactgccatttaacttaaattagtttttttaaaaatacataaagaatatgtttaatcaaataaagaaaggccacactgaaattctgctgttcctgccattcattcgttaccacaaaacacaaataatttctatgtgttatgaagacatgtgggctgagaagtggtcatgtgattggagaggttttgcgtgcactcatgttcccacaacaaaacataaattattttagtaatctgacatcaagagctgtgaaaatgaaaaccagttcttacacatgttctaacaagaatctgattaacatttttgtggatatggaaaattttttttttagtcaaactggcactattgctgaatgtagaatgatttccttatgcactagatagaaaaatgtgaatcatgtctgtgaacaaatatgagaataaaatgtcatctttgtgtaggacaaaacaaccaggagagagattttgggataaaaattatcaagtgattgacaatatcaggatgataattcatccccaactatcagagtacattttaataagtcactcatgcctgaaggcctctgactaccttaacaaagaaaaactaaacccgtgatttattagagattgggcaacatgcctaattaaatccatgaatgggaacaaacagatttacatcccctttgttcagaacaaaaacaacctctaggtcaaccagaaagctagaaaatatcaaagcaagagaaacaagtgtttttaaaactaaaaatatagaattagaaaacatctcctcatcctaatctcttttatcttacaaggtagaattttcacttccatttcaaagtgccacca

SEQ ID NO: 83274 - DNA, 1032 bp, Homo sapiens
caggcatgagccaccatgcccgtccagtagcttaaaaattctgattgtgtgtgagggtcattatcctagacgctttcactaggtaaacttcaggattagcttattagttttagctccacaaacaatatgtacaggtccatgcggtacgtctcaaatgcacatctccatgcacacgtgacaaggtttattctttagatacccaagatgccagtgaactttggacttctgtagaactattttcatcttttcaactactgtttctgtctgcgagcctttccaaagaaaaatctgttgaatgatattaacactttcctgctcttttctccctagtttttgatgcacgagcagatggtgaaggtattggcaagctcagggtaacagtcgaagctctccatgccctccagtctgtctacaagcaatacagagatgacttggaggcttgaaagcaaatgctccagaggcatctcctactcctcagtaaatgctcacatgaaagttcctacatgagatttttgtaattactctggtgtatataatctataattcatgggaagctgggagcggggagacctgggtttgaagtgttgaagttttgtatactttttcatttgtttatttctctattccctccttctcataactgccacccctcaggacttaagttctccataatgggcagtaccttctcaataatttatacctacgtgatagcgtgagaaagtctatttgcattttcaacattttcttaggaagaaccgaaatgcaattcccatttttatttttaataagcaaaagcataaatcttagaaaacctatgaaaaagaaatacttttatgttatccctaatcgtcccactaaatggaatgcctatgattagcttcattaagagttttatactgtgaagattttattagaagcaatatatgaaaattacttggattaatgtgttaatcttcctctttaaaatgctaatatccattttatgcacattaaagctcagtatgcattttctttgatgcatgcagtttctat

SEQ ID NO: 83275 - DNA, 1114 bp, Homo sapiens
aattgttcacagcaccctgaaatgtatgtattacaaattcccattttgcagacaaggaagatgaagcaaaattaagtaacattaagaggcacttcccacctcttttttttgagacagtgtctcagtcacccaagctggagtgcagtggcacaatcatggctcactgcagcctcaacttcctgggctcaaacaatcctcccacctcagcagcctgagcaactgggaccacaggcacatgccaccatgtcagactaatttttttaattttttggtagtgacgagttctttctatgttgctcaggctgatcttgaactcctgggctcaagtgatcctcctgcctcagcctccgaaagtgctgagattacaggggtgagccactgcgcccagcccataccttttaaatgtataaagtaatagagcttgtgtttgaacctcttttggtctctttcttagactccccagcttattaactgagagttattctgttagggaaaagcaaaggtgtccacttacaattgtctctgttccttataaagagaaacacaagcatctttatctcaagatacattttaaagggctgcttcaattttgtttcttaatctacttcataattatggtattttagaaattaatcccttctggtagtattagaaacaaaattataccccacatctaagtttggttaagtgatacagatatctgtgtgtgtgtgtgtctgtgtgtgtaattttaagtctttttagtatatgatactgataaatgataaatacaggtttacatgaaagcaaatgtaatatatacttaaatacatatgttatagctgatattcaacagctactacttctggtcatgtgctgaaacctcagaaaataaccatttgagctacaagtgcatctttaactttttagctctttgtcttattttttataaattaaatttacattttgtaaattaaacaaattatacccaaggagtgtggggataggcttttattttgatttacttctggaaagttacctaaattaacataggcattatttcagtagtttgtatcatctatgttatttacctacttgggactatctttgtacagtgactgattatattaagggt

SEQ ID NO: 83276 - DNA, 1042 bp, Homo sapiens
tagccgagatcgcgccactacactccagcctgggtgacagagcaagtctccgtctcaaaaaaaaataaataaataaattatcatactttaaaacaaaaataaaatatcagagacaactggaaatatatgaaaagattttaaattatttgaatcacattctgtccttacatatcaataaatgtcattcactgctgagtggtcaaaccaggtaattctggggcaaataagtaaattatattttggcttctaaatatgaaaaaaagaatattttctttagactttaagatgtatttttctctttatattatatatatatgtatttttagtggctaaaggtaatactgagtgaatattagtgagtatattgttgaatatgtgctcagaactactagataacatgttttagacatataattattttaacattgtgttaagactgtaccctgggcaaaatttggattcatggttttgtttatcttctgtgtgaggacaactaactgtccaatgccaaaatacaatgaactttcaaatatcaaagaggaaaattaagtatttcaagtcctcagctggtttacagatgtgtgagctttgtagtccattttctggttccagtagggcattatgacaatttttccaatatgtgtacactagataagttttaaaagtaaaatctcttactttaaatattgaactctgattttaaattttttacatttatttttcctaaaagtgaactctgaaatgaagcttcaaaattaacaaaatattttttaatataaaatgtattaaattaaggaacttttctctgtcaagaaaataaatgccttttgaaaacaggtactcatttagatctatgattaacctttaacaagatcttcctgttaaattctacatttgctttaatctcagtaggaaaaatacaaaatagtattgtaacatataaggtttctatataccctgtggacatcaagtgatctcttacagctaaaggcacatctgcaacatatttaaatgccagctttggacattgttagtataaaat

SEQ ID NO: 83277 - DNA, 1054 bp, Homo sapiens
aaaatgaaattgagttatctcttcttcagcttcgagaacagcaagctacagatcaaaggtatgttaaaacagaaatatcactttgataaggtcaaaattagtttaaaatactttatcatgtgccataaaaggataagtttatctagtctatttaaaaatcatgtttttacttaacattcttcatataagcctatgctcgacctactaactgctgtcaagaactctagtctaaagacagttttccctaacctgctgtgcttttaagcagcttctgatgcgtggaaatcaccctcatcttgttttctatgttcatttaccccatttgccaagattgcaggaagttctgataccatttgattataactactgagagaaatatgggtgacaagaactcaactgttggcatatcttgtacataagtccagcattacttttttcaaccttaaaagatagtaaattccataatatggtaccagtttgtaatcccaaaaagatccctaatattccaagtttggattgcaatctgttggctgtgataagattacagttggtcctgtagatagtctccttgctgccttttcatctatgacattaaaaaactttttttgttataatttccaacttttaagttcaggggtacatgtacaggatgtgtaggtttgttacatagataaatgtgtaccatggtggtttgctgcacagataatcccgtcacccagatattaaacccagcgtccactagctgttcttcctgatgctttccctcctcccacccctcaccctccgacaggccccagtgtgtgttgttccccccaccctatgtgtccatgtgttcttatcatttagctctcacttaaagtgagaacacgcagtgtttggttttctgtttctgcattagtttgtgaaggatagtggcctctggctccatccatgtccctgcaaaggtcatgatctcattcctttttatggctgcatagtattccatggtatgtatgtaccacattatctttatctagcctatcattgatgggcatttaggtcaatttcatgtctt

SEQ ID NO: 83278 - DNA, 1051 bp, Homo sapiens
tttgtgaagtgtctgttcaaaatctttgcccatttttttgttggattgtttgtgttcctattattaagttttatgagttctttatattttctagatataaatcctttgtttactatgtgtgttgcaaacattatcttccattcatctaggttacttaatagtttttaagaaaggtccactttatcaatgtttatttttatgattcatgctttttgtgtcatatctatgcagtctttatcccaaagtcacaaagatttcttttttgctttttaaattaaactttgtcatccccataatgggcacttagtttttatttttcttttctctttgaaataacttagatcatattttctctcttgtgattgcttatgctatggacttttatgctgtttccaagtctggagggtgaataagaaggttggaccacatagctttctacgattaacatttatttaatttgtgttaagcacatgagaatactatacggtattcatgcatttttaaaatgaacttttcttctaaggcatataatagaacagtccagataagtatttgatggtttgagttagaaccatggcgtctactatttccttactgtagggataggggattcataccccgtgcctcagtttctccagtcattaatgaggttaagaatagctgcttctgtgggttggtgtgaggacccagtgtgatgaggtctagctactattccaggggtagagtagcatgcccttgattgagtttggtggcctgaggggtcctctgctggggtggggctggccctatgcattttttcccagatgttataatttattattttgaaatgatttaaaacttattgaagagcaagagtagaacctagagctctcatagacctgtttgtccatattcacaggttaacatcttgctgtgttcactttattgctctctttctcgccatatatatccacatgaacaatttttttaatgaaccattgcagagtaagtcggagacatcagtcctctttacccctaaatagttcagcatatatttcctaagaacatggac

SEQ ID NO: 83279 - DNA, 1019 bp, Homo sapiens
aacattgctggcatacagtaaaaataaacattgttatcatcatcattatcaccatcatcaccaccaccttcactactgcctatctgaccccagtagatatatattctgtatgtatatatatatatatgtattctgatcccaggacgtttattctgtaaacttatgttgagtgtctagtcaagtggattttctcaaatggggttccattaacttatttcccatgcagccagaatggtactagttttgtaccacctttcagaaaattgagaatatagtcactcaaaccattttctgtgttctgtggttcagataaggaacctgattaagtgtcgagtagtgtactcagcaccagggtaaagatggcagacacagtcccatggaactggctggctgtccatggaaggtaagtaagtaccaacagcagagtggtgagttttatcacgggaggacacggtagcaaagaggatctaacatggcctagtagtcatggaattccttccttagaagatctgtttaaaggtgtatccttatgagaggcctgggattccttacggggtttttcagaaacattaaaactgtttcattagtcatggaataaaaagctatggatgttgaaatccaagttagcttcaaagactcttatgctggcttaggttagataatcttttaaactattaaaaatagaactagtttattatggaaatggttatatacctaagaacatttaataattttgtttgagtaatgtacatttttatcaatgaaggaaaatatccagaatatgtaacctaccgttttaagtaacatgatttaaaaactcttctgcttttggtgatagttgtcttatcaactttaaatgataaggtttattgagttataaaaataataacttggccaaatgcagtggcttatacctgtaatcccaatgctttgtgaggccaaggtggaggaggctcacttgagaccaggagttggaggttacagtgagctgtgattatgccactgcactccaggctggg

SEQ ID NO: 83280 - DNA, 1353 bp, Homo sapiens
tctacttactattgaatacggactattagatgctttatttttcatgatttaaaggctttgccctgaaaatggttggcttttcccttgcaacactgagtgcttaatcttagctatagcccagggttgtctttttgttttaaacagaacatcacccacttaattaaggagtgagtgtctgtcttgctgagttatgctggtgttttatgttcctctggatttattaagcatcttgttttacattcagtctgcggtttgtgctgtaaataaaaataggcccatcttgcacatattagaaatttgcaggtagcaaatgtcaataagtaccagggatgtaaggttctttgatttatacttcaggcaccaggttgtggtttgtcgattgaacccataggcaggatgcatcttggtgtcttctgtggagcagatgtgtttttgcatcgttgtctgagaaagtttatgtttatttctgcatccttggttcagtagattgcttttcagacaatgaggcatatccgctccgcctcttatgtcttgtgagaaatgactacagctaaacattattatgagaagacccattaaaaactgatttctatcttcctgaatatttggaattttgggaactttgtaaaattcccatttttttcattataatctctttccacataccttatatgtttatttgtatatagactcaggtgccctcttggcagtatatttattctaatatgttgttatagctgaaagcatttgtgtgacattctctgtagagttcattcagaaatacttaattagtgtaccctttgtgtaccaggacttggattacaggctggagacttgaggaagtgtaagatataatctttgctattgaggacctcagtttaggaggaagacaggcatgtaaacaaataattataataatgcagtatagtaaatactagtctactgtgaatgtgtacttcttgggagcatgggcgcaatagtaaaatcagcctcattggttttttttgctgtgttatcaaaagcagaattctgacatccactttgagacttgtttctgaatgactcgtagctgtttgaaagaaatctcttccttcctcactggagacatgtttaccaccctagggggatagtcaaaggaaagttttccaaaaatgttttgatcaatgatcacatctttggatatgtatagagtttcccaaggaggctacttgaaaggagatagtgcttatgttgtttatgttctggcatttatgtataaatcagtcttattgctttagagtatagtttatgaggagaaactgtagcctgtggtggttaagaacgtggaatcctttagctctatttactggctga

SEQ ID NO: 83281 - DNA, 1048 bp, Homo sapiens
gatctgaggaaactgcatttgtagccataggagaaatcatagattttggtggctctttacctatcactgtgttttttaaaagagttatgtctgaaccacctatgtgtcccgattcattttgccatttcatctactgctcttcctcctgtttttatttaagactatgaagttactttagtgtaactgctgctgtcacctttgcccttagctaatcaaatagtttaccttgagggaagcatttatctcccactttcattattattatttttgtagctgtaaagatatatattttatgtctgcagaaggctgtaacagtgaaacgaggtattgatctgctgtatttagcaatttctttccaccttgccatcaatagcatgtcagcatctgtctgtaccgtggttgacctcacaaatagctctttatgctcccattggattcaaatgatatagtatgctgaaaactaaatcaatgaatgattataaagtttttagtattatttcatgacctggaggcaactggtactccttgcactgacagttcagtgtacaatgaatatggtaaaatgagtgtgtctggcctttgttctactgaaaggaggaaaacgggtcacctggttgggtcagctcatacttctaatgatctcaaagcacttaggcacttcagttaaacatctcactttacagaatcaggcagagagaagagcaagactcctatttaactttattccccatgcctcatcacaagtatgtagcaaatgtttctaaaattatttgagctataatcatataggcttttgccttcatttataaaagaaagacaaaaacccaaaactagatgctttgtcactgtcaccaaggacctaacgaaaaggcacatggtggaaggagggagagtggtaacctaggtttaggtctaaggggactcttgcttgctgtcagcacctggtacaaataccaagatagggtttttggggccacattttccatttgagggagttcctactcacctccactgatctgtggaacactgaaatagcaggagtcactaa

SEQ ID NO: 83282 - DNA, 1093 bp, Homo sapiens
tggtcacacactagttgctgtttaactacaataaaattgtgaccaaaggagataaacatttaaaggataaatgacaggcctgttaatctgaaagcaagttttgtagcgttgttgtttttagctaataggtgtatagccaggagtcacggtgatgacttttaaatctgaaactgagtgaagtctgtgttttcaaccagtttaaaaaatgttgccactggacctttttaaaaaaatatttttaaaaatacgacaaaaattttatgtatttatggtatatactatgatattttgacatgtatacattgtagaatggctagatcaacctaattaacatatgcattatctcacatacttttttgtggtgagaacacttaaaatctactttcttagcaattttcaagtatataatacattgttattaactgtagtcaccatgttgtacaagagatctcttgaacatcactgaacatatttatggctgatcattttgtgttttaacaatcatttgaacatgtctaaactgtctttagaaactggtagggatttccttgctgtgtttgctaagcttggccatgtcatccacataaatatctgaatatattcatatatgaatacatactgtatataatatgtgtgtatatatgaatacataatacctatatttatatataatatgtgtgtatatatgaatacataatacctatatttatatatataatatgtgcatatataaaatgcccaagtatattatctaagaaaagagccactggggcttttataagtctatgatttcagaactatgtccatctttacacctctaaagcgttatgatttacctgatttggtggaggaaaggtatttttggtaattttctgtccctatgggaattcaaaggataaatttcaatctctttttctttctttctctctctgtccatcttatgcagctgaaaactggcatatgactctttgagaagagctcaaacagttgtggtaagggtgcttagatgttgagtgctatctgttttctggggtgtgaaacatacagggttttaccagtctgttgttgcagagtgctgggtgtattttgcttt

SEQ ID NO: 83283 - DNA, 1050 bp, Homo sapiens
cattagtcttaagctttgcccacctgccagataggtgtaagatgattaatgaaagctgaaactctcagtctagaggagacagcagggactggtggtgctagtggtgaagtaagaagtacatatgctgcctaaagggactctggttcagtgtgtgaatgtcagcccagtgttgcaaatattctgacttttcaaaagaagcaggacatctagatttttatttgaaatctctttattttaataagccatcgactaattgaaatttaaaacctgtgtagtccaaatagaccatatctacaggctggaaggaatagagggcctgccttttgtgacctctgttgtttggggaggttatgtaaccattgtaaccagggaaggatacatgaggattcctcttcagggaagctgaccagcccaataaaaaatatataggttgacatttggagatatcttaaaagacggccaggtttccatcatatcgctctgtagtgaggcccaccagttgacaaactaagcttctgcacattcagcttctgatctgtttcatattccctcactggaaattatgaactgatgggcaaagatcattgaacatccaggaatgcctcaaataggaatgacaaaatacagagcacagaaacagaagaaaaggaacccagaggaacaggaaaatgtggagagcagaaaacaatttcaaaacaaattataattaatattcccagagagatgagagaaaatacacgaaacaggaacaagatgctaataaaaaggaaccttcacactgttaattttgttagttgtgataatgtattgttatacatttttaaaaatcttatacatttaaaaaaaagttgtccttagttattagagatttatgctaaataattacaatttgaatattgtgatgtctgggatgtgatttgaaataattcagaaaaaaggatagagtcgtgtgggagatagataaaatgagattggcaaaatgttggtaattgttgaagcatgctgcgtaatgggcgcataggggttcattatattattatttgtactttt

SEQ ID NO: 83284 - DNA, 1024 bp, Homo sapiens
attgcaaatgagggaattttataaaggctttattatttgtaatgtaggaacccattgcatacaaagaaatttttagtctaaggacccagtattagtgaaatgtgacatagatctatttgtgaaagggtgtacccagttgaaacagcaggggcaagattttatttgtatgtttattatttttgttaccaaagcgatgccctggaaagaatcgggatttttgagtgagtgatgtgatgtggatttaaatcctgtctttgccacttagttctttcacttccagcaagtcctgaacctaagactcaattttttctctcaaaatggggctcatgatgatttacttcgcagatttgttaaagcttgtaagcattcagcacggcacccagagtgtgggaggcactcaatgaatattagctcctttctccttccttttcagctaaaccaaaaaggctttatctaggaggtgagacttgtagaaactcttgattgatggaaggaatgagtcagtgaactagaagaagggtattcgaggcctgtggataaccatgtgagaaggtgagaagtgagtgtgtagtgatgggagagtgtggctggacagatggacagataaagaaaagagggtgtggctgggcgcggtggctcatgcctgtaatcccagcactttgggaggccgaggcgggcggatcactaggtcaggagatcaaaaccatcctggctaacatggtgaaaccccatctctactaaaaatacaaaaaaaaaaaaaaaagaaaagaggggctgaattaactgacttgtagaggcaaatgtgatattggtgttgggacacatcatctgaacttccactgtcattatctgcttctcaaaattggagttgagagcatgtgcgaacttgagaatttattcttcttgtctacttgaacatctctcttttaaaaaatgcaaaatgttagaaatgtttgatccaatatagggcaaataaaaattggtctgttctttttttttaaatttttttttgagacacagtttc

SEQ ID NO: 83285 - DNA, 1009 bp, Homo sapiens
tcaggtgctatccctttggacagtcacatgactggtgtctgttcagcacccaagggaccatcaaagaggctgttgtggagagggaatccgaaggtcagggccagagatagaaatctggggagtcatccactatataggtgatgggttaaagccttagaactcttcttttcatgaatcattgttgttctttaggttgtaatgaagttttaggcctcagcttccctgaactggagtgtttttccttcaccttttccggtctctgggttgcatcgccagactgtctctaagcccaacaaacgcgttccttccaggcaaaagcaggagatgacacacaccatgagccagattttccatggcagacttgtaaggaacaagataatctcattgttcctcctgctacttaaaataaaggtaatattgattttatagtagcagttcaggtcctaaggcatgatattgattaagtgtctgatgagaatttgtagggtagtctcccagacctgcagctacagggcatctccccactgggccaggcctctgtgctgacctccactgttataagtggtgtttttcttaggaatccttagccctgtttagtctacgcactgtccagaagcatttatttaacctgatggatggctcaatccaacccatcaccttaatctgaccttaaagatgggaacctaatgtttttgttcttagtaaatgtgaagactaattttgacactgtttagaattattttcttattagtagcagtagatttcatgaattttctgctgtgaaatttcctattaaaatactataatctaatgttaaatgacgagttaatgggtgcagcacaccagcatggcacatgtatacatatgtaactaacctgcacgttgtgcacatgtaccctaaaacttaaagtataataaaaaaaataaaaaataaataaaatactataatctgacttttttatttttacttttttactttggagcctggctttatgaattttttttttaa

SEQ ID NO: 83286 - DNA, 1316 bp, Homo sapiens
cacatctgcctgtctttttggttagctgccagatagagctcaggttttaaatcctttgcagttaaaagagataataaatgttaacattcctagtacagtgcctggcacagaatgtgtaaatatcatttgattcggaaacatgactgctggtcaattcggcctccagggagacaaaactaaggggtggggttgtggctttttttgaggtaggggatggaatagatatttcttacccgagtagaagatgatgccgggggatctaatgcttcttttaaatttcccttttgatgcacaaaggggcaactccgtgtagcaggaccttggtgggatggataggcagctttgtaagtggagaaatggcctctgtttagcttatgagcacagagtcattttgggggtggtttatgagtcatctgaaatatgcatttaatctagatttgtggcctgcttggtgaggctgctgcttttttatgatctcaagtgtcttgtccatgtcaaaacttgccttgtttttttgtttactttgaatcagaaaaatgttcacaaccacccttggaattcctcctcaagtgtgcgtttggtcacatcacccctggctaccaccagtacatgactgtttattttggatgtccttttctgatgttcagctaatttaacccacaatgaagttaatccttgcttctttggaaaagtacagatttacttattagctgccttccagagacatttgcattttcatgaaagcgagtatataattacattgacttttggactcatctacccacatatgtggtgggcgccttttgaaagtcaggattcagagtaaatcagaactgtcttgagttagctgaagttctctttaaggttaacaataaatgtatctatgacaaacatggggatgtggtattgcatattcgattatgtccatttatctttccttcttctgggtgagaggggagatgaaaatggagctaccttggagttcatgttttcaccttgattctccgcatttatagcatactgattgaaagcatggctgccagaaccatattacttgggcttgagtactagctctgtcacttactcattgtttaactttgggcggggtacttaatttctctgtacctcagtttcataatctgtcaagtggggataattatggtaaccaccactgagcattgttatgaagatcaaataagttaattcatgtaaaatatttagagcagaacttagtatatagcaactgcgatacaagtgttagatatcatttttattagggtttagtaattgcataaataaaagagatgaaagtctaa

SEQ ID NO: 83287 - DNA, 1012 bp, Homo sapiens
acaacaaataacaaacatccttccactgtgctcctgtccttctcaaaagctttctgaggctcctcattacatgcaggatagaatccagactccttagcttgactttcaggaccttccataatcagggtgcaatctatcattccaggcttatctttcattttccccctgctggaactgaattttagccaaaaggtctaatcactgatgtcagagtgtcttgtcctttactaacttttcagctctgctatccttttgcctgcttttaatagtctgttttctttctcatttgtttattcctttgatcacttaggcacagagtttttttctcctttcttcatacttatagcatggtttactaaggcattttaattttattacctatatcgttagttttctttttatgactatatactctccgctcctttttatgtcgacaatgtaaatatttgttgtggattgatttgttgatttttcatggtttagacatctacttgcttgggaaaaaggggatggtggagggtcaatctgggggctgaagcggtactctagctgtgtgattttgtctttttgattactactgaaattaactatttgctttgagcaaactaatgctgagttttgtggatttagtgtttgaaaagggccctgagagggaaaaccctggagttgagctccttatccccgtttgccaggctggatgagctccatgtccataccactgcattgcagtttgctgaagtgtgtgttgtgaaatagcaatggaatttgtctgtggtttcttgccagcgaggaggaggaagaaggattctgagtaaatcagacatgtaaattagtaaggcccatgggccttaagcgaattacacaataaagcccaaagaaattcactttggcttctttctgctttttgtgtgtgtgagaaggcagctattatgtgtttgctttaggccagaggttcacaaattttttggcttcagaacccttttatactcctaaaaattgttgaggactcaaa

SEQ ID NO: 83288 - DNA, 1018 bp, Homo sapiens
gtctttagtatcataggggtagttacctcagcgggggtagggagaccttgggtgtctcttacttgtacatactctgtcctctataagtaagtgtgtaaatacactgtattttcccattcagacatattgtgtaagtaataggaaccaggtgtttgaataaattaaccaagtgccaaatttcattttggaaatgaaatattttagtttaagactctaggacatttataaagctgaaatacattgcaaagtgatgaaagctttcttaaattctgttatagtcatgcaccttaaaattattcattgttacttatagttattatctgtctgtatatgctcatctacatatgtaaaacatgaagatattctctcaagtgaggacttcatgtgccagatttttcagcctggattgaattttatggatgagagagataccctggaaatggaaccattggcataaccttgtgtctaatataataacagagctctaatgaactgcaacatgagctcagatctgcaaaatattcagaggatataggcaaagagcagttttttcctccttatgagctaggttgttctccaaaagcaacaagtactacttgtcttttcagagcgctgtcatggagctgtaagtctctttgtggtttagacttaatgtgagtaagattcctctgcattctcagcctagaaaaacttgaccgttctcttggaatttggtgaaagtttcctaactttgaagctagagaatactctcatttcagattaggcaattattaacatttttttctgttctaatttcatgatgccaaaaaatcatgtatggttgatctatttggagaacaatatgtagcctcagacacttaagatcatatgtagtttagaaataatgtcaattgcatatgaatgttttgatgtttttcccccagcctttctgaattttttgatttcttcaaattgtacctggttttttatttttgtttctgtttttgtttttgactttcacataaactgtttatagtgt

SEQ ID NO: 83289 - DNA, 1017 bp, Homo sapiens
gttttgcagtttcttttaataggaccgtagagaaaagcaaaaccaaaccaccaagggtcaaagcagaaaagcagagagaacttctgttagctcatcatggaacacaaggaaacgaggaattacatagtcagaaaacaaactctgacttccagaaatatgaatgcagccccttttatccaaagaaaatgagaccatcctcagtaacccccttgctgtcactgattgtgtgctagctgtgtgccaggttgttctgctgctactttaagtgcattacacgtgtgagctcactgaaatcttgctatatgcttctgagacaggtgttactaaaaccctattttagagatgaggaaaccgagggacagagaggttcaaaaatttgtttaagacttatgtgcaggatatgttgggactaggatttaagtctgggctgttggcttttgggtctccactcttaagtcctatactgcttctctcttcccttgtgtctcttcatccttctgagataactctgctcttgtctcaaaggttccagacctctgtccccatcccagctctccctgtgacctccagctctccacttccaactgcctacggagtggctctacctgaaagtcttccagctacatctaactcaacatgattcatattcattaagttacttactccattaaacaaatggatttcactccccgactctgtgccaggtactgttttaggcattagaaatgaagttgtgaaaactgacaagagattcgtgtcttctttgagcttatttcttgtggggcaggtgatgtaggagcaagccatgtagatacttgttggaagaatgttctgggcctacagaacagcaaagcctcaggtatacttgacaggaaaagcacccgaggccaacatacctggagcagagggagacagctggtgagagcaggggagacggtcagagagagagagagagagagagagaggcccggttatacgagaacttatagtctgtaagttctgtaagaagagcattgg

SEQ ID NO: 83290 - DNA, 1102 bp, Homo sapiens
cactccccaccccccctcacacttttcttcctattctggcactttactcttcctggaataaaccaagctcactcctgccccaaggcctttgcactgaatgttccctcaacctggaactctctcatccccccaggcatctgcagatattgtatccttgtttcttgctttcttctgctctgatgtcactgtatctagaggccttcccttaccaccctgtggaaagtaggcatacttaccccagcactccctatcctactttctcggctttatttttccccgtagacttatcatcatctaaaataccgtatattttacttatttatatgcttattgtctggctcaccttgctaggacatgagcttctagagagaaaatagacgtttcgctctcttccatattctcagcacccaagtgctttgcaaatagtatgtgctcaatacatatgtattcagtacctaagggttttccagcttttccttcccaattattccctgctcccacagcagtatactcacacttctattgtaggacattcttctcttttggtttccattttggtttatactgttaaattatgagatgctgtcaaataggacctatcttcttttaatccttgtatgtctggcactttatacagtgcctggtacataggaagtatttgagaaatgttaaataaacaaaatgaaatgaagtattgaatgaatgaatgaatgaatgaacgaggatctctgtgtcattttgtagcaaagcacatgttacctcaagtcttgtgatagctgtggcagagtctgaacagtgactccagaagtgtatcccttctggagctctagtttgcatcatgcaggcagagtctgggtcagacgagtgtttagcccgttagtcatcggatggctgccaagtcgcaagcattttacaacaaaaattatatagaaaatgagtgatagggtgcaaattgctgagtgcaaaatagaaagtgttaggagcaaaatctattaacagctagattagaaatacagtcctctaaaatcagaatattctagtacttctaagtgaagggtatttcccaagttacttgaatatttaaattttttttttctctcta

SEQ ID NO: 83291 - DNA, 1112 bp, Homo sapiens
tctcctgcctcagcttcccgagtagctgggattacaggcatgcaccactactcccagctaattttttataattttagtagagacggggtttcaccatgctagccaggctggtctcaaactcctgacctcgtgatctgcatgccttggtctcccaaagtgctgagattacaggtgtgagccactgcgcctggccagggacttggatttttaaaatgtccaccttctggaaaggttaaggggacattccacttgctttttctttcaggtcctggtgtcttcctttctccagctttacttctcacccacatctgctgtagctttccagcacatactctcagatgattggaatgcatcagattatcttattcgatgaaacagaacctttctgtaggtgtctggctgtgtgtcagacggcatacaaagcatgtggctctgggtcagatggtgtacaaagcatgtgccttgaaactctatggtgggcgcatgtcttctaagtgacaagtgatatctgtttagttttctggtcttataatccttggcagaatgccagaactatggcaaaggtggacttgaagagaatcatttggtttaaaattttggttgaggttgagaagggcttaaggaggtcatagagagtggacacttcagagaattgtatttttttctgtgtccttgaacttgtttgtcaatgagctgttctagacagtatgggaactccaaagataaatcaatggctttctcactttgaggtaatagggaggtaataggtgggctctcgtgattataattatgaaatgatgaaacattgggtttgaaagagacttttgaaatcacttgattctagcctttcattttacaaatgaaaacaccgagaagggaagtggcttggccaaggtcacattgctacttagtgataagagcagggatttaagttggaaagtgttccttgccactggagaggttcacgtaaaatgcactgggaattcagatacagaagtgattgcttcctgctgaaattaaattcagttgaagcttaagatctttcaagactctgctctcaataccttttcccagggaaatcttcttgtagatttataatgagccagtcatcc

SEQ ID NO: 83292 - DNA, 1047 bp, Homo sapiens
gactctagtctcaaaaagaaagaaagagggctatttaaatgtatggtgatgatgaatatgtactgaacctgtgagggaagttcttgacatacactattatgtatgttattaaatatggtacaaaattttttgtgatatattttatttgagtatcactgtaatctctactgtcatactctggcttctgtctttgtttcctgtagagccgtggttataattagaaatgtaaacaaagtattttgtgctttattaaatagaattttttctcaaaaactagctggcataaaacattgaatgggttaattttggggggaagttttggacaatttaaacttgacttttaaacttaacagtcttttgtatgttgtcacatcttctacttatttaacagtttggttagtgggagctgggagctgggagtgcaccaaacacactgaggtacttaaaatcttttcaattttattgaggcttaaaggcaagtaagaacctgttgcctctgcttgttgccaaaataacatggggcaagagtaatcagttacagttgctataggtaattacaagttgatttcactgagaagtaagaacactatatttaacaataaaaagtttatcagacgtgaaactttcctcctccctacacagcctaaggaggggaaaaactctcaccaaactatcattttactgagcagatttcaaaggtgttggatttttgggagacatcgagaaagactaattgcaattattgtctctaattgtctttattgatgccagcttgagaagagtaccaggatgaaagttagaagggaaagtagtcaagcagactgttaccctatgaagattcccacttattagactgtccacacgcagtggcattaaaacttcataaaaactgttccttacagtttgaaaattatttttttcaagtcattataattggttttctttttttttatttatttatttatttatttatttatttatttatttatttattttaaggtgcagtgtcactatgtcaccaggctggagtgcagtggcgcgatctcg

SEQ ID NO: 83293 - DNA, 1384 bp, Homo sapiens
actgaacatggaaactgtggtatctttgtaaatcctccaggtgtccctcagttttgccctgatttagacattttattcaaaggaaaaagcttttgttatttctttctctgaccccattcccttcctcaccaacctctgaatgaccagctaaagtaaaaagtacacataatttatggcttaatcataaatttaaaataattatactttattacctctcatgggtcttgaaatgtaggtgctatgttctgctttctgccgaggcaagggaataatacagaaaccagtaataaattataacttcaggctgcagttggtaagctggaggaattgctatttaagtggaaagtgcttgaacagccaaatgagcacctgtcatgtttattttcactttgaaaagtagaaacatgacagtatagtttccactgcctatccaatatgaacttctggcattcttgttatcttctcaggaactgcactgtttgcttcttgtgttcaatttttttttttttccagggatgaggatgtatctctcctcctgaaactttcactctaaaatatgcccccaaatactgacattttcaagcttgtgcttttttacttgatatctgattttttttaaatttttatttaatagggagaaggtcatgacttatggaatttactctaaggatagggatctgagcaggttcctgagtacttgaaaggctttatttacctcttacacttttttgttacatccaggtttttgctcatttctctatcatttgtgtcttgaactttacctgaaatgcatgtcttgagtgcctactaaggtccaggcattgtgctggcagatttgatatatttttgtttattccttattacaggactattacatagtagactctcattctgacactcactttttttttccagaaaaaaaaattaatggagattgattgctaatgggtacagggctgcttttaaggctatgaaaatgctctaaaattagtttgtggtgatggttgcacatctctgaacgtactaaaatacattgaattatatactttcttttttcttcgttttgcagcttttgctcaaaggagaattagatatttaaaatgagtgaattgtatggtacatgaattagatctcaataaaactattttaaaaaaagaaactaaagcttagagaagtataatatcttgttcaatatgacactacctggtaaagcttttgtccaaatttttctgagaccaaagctattctttcttccactgacgcatgctatctctactaattatatagccacggtatcctttttctttaaaaatgtaggaaaaaatggctgggtgcggtggctcacgcctgtaatcccagcactttgggaggccaaggcggacgg

SEQ ID NO: 83294 - DNA, 1019 bp, Homo sapiens
atactccagtctttgtcttctcaacttggcaagaaagaaacagagactctgggttttgacttcctcttctctattctgtggcattgaaactgtttccatggagtaagttagggcaattgtaggcatctctcacctattttgtttctcttctccatgggattatatcttgctgaaacctttgattcatatttttggcttgttttgtagttgtttaagacagaagggtaaatcttgtcactgttacttcacaatattcataagcagaaatcctgtcttaatatcttgcatttcttttctatgtttagagatgatattgtaggttgtttttgctgatacataaggggcctggtggcatttgcctcttggtttaagtcattatcttttttggtatcttgataaaaatcttgtgttgcctgtataggatgccattgctggaaacattacaactctctttttttgtaatagaggaagtcatgtcctgagcagaggttgtatagattttgcctgacttgtggtatcatttcttaggatatataacaacttggtcattggtttttctcccactgcttgtggttttaggaatattcttcaactgatgaattcaccacctacttcattcttgggttgtgaatccctacacttgagttctgttctaagagccaaacatgcaacatgctgagttggttggtttattgcctggaaaattgttagggcaaaattgatactttgattatggagggaaagaggcagatttttcagatgaaaggtgtgcaactccaaattctggtttattctaaagataagggtagaagtagatgtgtcatgagaaagtgaaagaagctcaattcatatatagtgaattttatagtgggtgggcataataggaccacaaataagtagagtgaccctatatctcatttgctgaggacagtcctggtttatacttgttgttctggaataattgttaatagcatcccctttcactcttcaaagtgtcatactttgtatgatagaatata

SEQ ID NO: 83295 - DNA, 1041 bp, Homo sapiens
ttggccaatttattattaaaaataaaaataaattggccaatttattagtagcttggccaatttatttttaattgttttattagtagcttggccaatttatttttaattgttttgtagagacagcatcttgcaatgttgcccaggctgggcttaaactcctggcctcaagagatcctcacgtctcagcctgccaatctattaggattataggcatgaaccaacacgtctggccagacctcagttttaagactactcttttcttagctttgcagatatgctctggagatgccagcttacactgggaactggttaggctgacctttctcaccttttctcatcctatggccatcaagttactggaggagaattaagagacgaagtcattgtcctcgcttgtctatcacaagggtattaaaaccaccatcttctctttatggtccacaggtcgagtttgagtggctgaggcagttttggtttcaaggcaatcgatacagaaagtgcactgactggtggtgtcaacccatggctcaactggaagcactgtggaagaagatggagggtgtggtaagtccatcagacctgggaccgtgttttctgggctgctgtgttatacaaatcctccactgcctcatttgcttaggcaaatgtagatttaattattcctaattatcaagttagattcttcttggtaaggtgatgggtatagccaggattttgtcagtacaacctcagtttagttcaataagcatttattgagtattttctcctcatagggcatgtgctggacatatactatgaagtggtgataagaggataacaattcgaaaataatatttaacattcatttgcatttttatatgcatcaggtgctactctgttttctcagtattaactttaaaaaatttttacagcaatgctaagaggtatagaaacttttccaggccttaatttgtggatgtgaaaactgaggggcagggaaatgaagggcctcccccagggtcactgagtaagtggcacagcaaggtggaaactcaggcaggc

SEQ ID NO: 83296 - DNA, 1033 bp, Homo sapiens
ttctgtggttctgttcgtttagtaccatctggtatttgtatactcgggtggaattggcagtggctggttagatttctacttggtaccagcccacctcatattttctcagttgcaagcagtagggggcaatgttgagctaccagattgaggccccaagatgttagcctttcaggaaaacgcatacaaaaataccattaactgtcaagaattatccctgttgcttcaagttagctgtaatctccaagattccatagcacaggatatcagttgtgggttaacaaattcaacagcaatttaacataaaaagtacagtgtttggtgcacatttggattctatagcattagactaatccaaatggaatttctgagtgtcctcactttgcttccagggactatcttactcaaaattattatcattttagacaaatgattcttttttatctttatacttttttttgaattgtaaaatcgtgcgtgttgtggaaggatttctttaaatcaatgcattttgtctgttctgcaaaataacatcgatctcttttgctgagaaaataaaaaacctcagggaatatgtgcattacttttccccttttgcttatgagtaaagcaacctttatcggccctcgtaccagggaagagacttgcgctgtgatttctgtctttgtgctcttttttcactttgtggctgcaaggtgtagtctcaggaaggatatagaagaatggaaaatgagctttgaaatcgcttttcttccattaatggtaattgcttcacatgtcataaccagtcacatatttcaaaaagtttagtcagctgtctctaaaactcccccatcctccacttcccatttcctgtcccagaaaacaccatttttatcacactgtttattcttgccattttttctcccagcggatagttttactccatccatgctcttgtgatgtaaatgttaaaccttatatttgaatgacattctgataaaatatcacattttccctgaatattacctcatgaatttatgagccattaagccca

SEQ ID NO: 83297 - DNA, 1025 bp, Homo sapiens
ttaagcagtgttgttttttgtctaggttgaaatagccttgattacatttttggatgcaaataagacctctgaaagaactcgatctttatatgagcagtctgaaaaatctgaaagttaaatagaatattctcaaaaaaagggcaatgtgttaagactcttggtttccgtcttttaaatctgaaaattcagaatcctcttctcttgcatttcagtttttattattccacactactgagatattttgatgaaagctagccttaaacattggataataattatatttgaaatctattttaatatagtgacatcagaagtgctctttcttcatcccagtcatttaatcattcatctgctcctttttttttttttttttttttttttttgcagataagtgtggagttatacaaagagctaggacttatgtctcccaggttgataaggcacaaggcagtaagtaattcagaggaagaaaaaggagaagagcagattctgacagaggcctttgggaatacgaaggattttgatagatggagatgggtggagaatattcaaagatggcagaagcagggccatcgcagtgggaaaacacagacctgctcgcaaacttgattagactggatggagtttggtttgtgtgagtccagcagctagagataagattaggaagattagcaaggacctttttttctctaatgcatttctttgcaaggtatggcactttcaccccttaatgactggcttcctatcaaagtcatgggaagcaaagtgctaaacatgtgcaactaaaaataaaatgaaaaccgtttgattatcttgcacttgcaaaggttttactttgaaagcaagtcaaattcagttatttgcactactttcaagacctgtctgctttgtgagtacagcaaacaagcaacaccatacatttttagaatgagaattacaaatgagattaggtaatttttctaccaagattctttgtttttctctgataaattgaataccagcttaataattttggactttggtca

SEQ ID NO: 83298 - DNA, 1032 bp, Homo sapiens
gtaaatgttcagaacgtaaatggccgttgttcactctggtctttcccacctttgcacataaatttctgctagaccctcatgttttccctctctatgtgatgctgttattttccaatgactggttttattacttctaaggcacaagatgttaattgttgagtgagtaataactctcagtttgttcttcaaacgtgggcttctgaaagattgcctttactttgattctgcttaggaatctagggtcttggggtaaatttagaggccactattctccttaaatgatagtgacatagagaaatgatactatgggactactgtttcattttaccaaagaaactgaagaaagtcacaccagagggtcattgctcccctagagaacaaatgggcttcaggctttttagaatgccttcttctttgatatctcattattgctcataatgccagagaaacaggtaacgtcggcatagtgatattgggcattgcttaatttctttcaaggcctgaaacatttatcctctcttctttatatattaggtattcaccctaatggtactcaaactgctaggctctgacaagctgaggtccaagtgccatggcattcaggaatgtcaatgttggaagggacctgagaggtgatcatcttctcttcctttttggaaaggaaggactcagaaggatgtaggcttttctggagggcatagagccagataatatagaaccccagatttcccagttcccagttcagtgctttctactactccctaaatatccatggctgtgcttgggatatttctctgatgcattcgccaactttcaacggtgtgccaatagcaaaataagataaactgagtgtttctctggaactttttctctaccctgtgtttggacctggcatatcaaaatgaggctctctggtgttgagatggacactgtttttgctcacccagcattcattcctccttctctggcagcatcctcatgttgccttgtggagccattttcttcattggctagagggtgaggtgcattgtc

SEQ ID NO: 83299 - DNA, 1133 bp, Homo sapiens
aaactaaggctcagatgtatgaaaagatttgtcaggtcataggagtagggagcaacagagctggggtttgcactgaggtgggagcaactgttctcttaattgctataataatctttacccaggctccattctgttactgcaactgaagaatcccaatacatatagcggttcccatgaggaacacccatctgtccttgactggtaaatgtgggaaggttgttctctttcaccatggacttgtgcgtcaaatcaactgatcagtctgggtgatgggtgcggttagcgtgacatgcagtgatgttattacgtggtggaactgagttccacacgggatgtaggtggccctttatgtaccctgctgagttctaggcctttgtgctataactatttttggcaatggaaggtgaagggagggctccccatccctggaaacatggcactttgcctgattttctgtttaaagttatgttcctgttggaatctgttcaggtctgagtttcagttgtcaccttctgatatgatgagcctccttggcctctcctgctcgcctcgttcttcctccacctgtcagtcttcattaggatcatttaaacactgactcattctctgctctgggccttttcctgcttggctatggaactgcaggttgaagcctttaccttgcacacatagtttgttaggtaagagttttatttcaagaagactttgcggggaactgtgatgactggggagtggttagaacaatattttctaataaagacaaggacgaaaagagatctcagcaggggaggagagctttctttgaccccttactatatttgagtgggtggacactaattctcaggagttgggggccttactagaccacatctcttgctgtgttatctcatgctatgttgtaaagtgagcatctgttgctggctgtatgacccatgtgatcagccactccatcacctttgaagtggtcaggcttagatattcttgggttaagagctttagctttcaagttaatcaaactggggtttgggccctgacttcatcattttgttgtgtatgacagtggcagtcatatggagagtctcaagtttcttcatttgtaaaatggggataataatagtatctcccttagcaga

SEQ ID NO: 83300 - DNA, 1087 bp, Homo sapiens
acgaatatatgaacagattagcgaatgaacaggaaggctccctcactttaaacgaacagagaggtattgagtgcctgctgtgtttccttcattctgtgggggactcgggagggaaacagctatgtttatgattcttatgtaaggtggaagatgatgttgataactatagtagaaacagactatgaaagcttggaagatggtaggatacatttaggtggatccgatttcaaagcttcacagtgaagcattttgagttgattcttatagaatggagagaattttaacaggaggatggacatgagaaaagagtggctatttcctatggagagaataacgtgtagagtggtagaagcaggaagatgcaggttatataaggcttctaaagtggaccagtggctgtccgttcccccaaactagcccccttctagagttccctaactgaagaagcagcaccactccacatccaggtcttcatgccagaaggagaggaatccttcttgaaacttccctctctccaccccaggtaccctgtgggagaactcttacctttgaaatacctctcaaagttgtctgcttttcatctctcctgctaccagccttcctctgggctattgcagtagcttactctatggtctcctatactcttcacacagcagccagggtaatattatcatatgcaaatctaatcatactcctctctgtgtaaactcattaatgggttccacttgctcttaggataaagactaaaatatagatgctcctcaacttacgatgggtctgtgtcctgatatacccattgaaagttgaaaatattgttaagttgaaattgcattcaatatacctaacctacccaacatcatagattagcctagagtgacttaaacatgctcagaacgcattagcctacccttggcaagatcatctaagacacagcctattttataataaagtgttggatatctcatgtaatttattgaatacagtacactgtagagtacagtattggtggtttgccctcatggtagcttggctgacggggagcacaaactctctgccacagcccagcatcgtgagagagtatgggact

SEQ ID NO: 83301 - DNA, 1037 bp, Homo sapiens
agaatgtggacagtgggtttggaattgtcattgagatgccactttcttattcttcttgtgttggtgcctagagtcacaatccggcctgaagggccaggaggttttctggcccagggtagatcccccttggcccacgtacaagaatcttcatgctgactgagttggaatctcctggtgagaagtgatttgttgtcctgatgagaatgtaaacacttgctaaagttgagtatcgtttctcatgtgagttctattatagccttctgtgtttataaacatgtcttgagcatgagggagaaatgtggtaacctttgagtccccaagaaaatgttcatttgttttctctgtgggctgaaattaagataactcagcatccttctctgagcatcccatatccctcttgcttttcctagcaggcctgggatgatgcccagtttgccatttcctaattgttccatcctcttccagtagagtctgttatcttttgaaaaagtacagttcatattcagcaggcatctaccagcggggctcaaagtccagggaagtcctcagtccagtctaacaaactgttattaaatttttttaaaggtttaaggtgtcgaacatttgagaaaacagagttgctgcccttgtgctgctcacatgtgtgttagcacatgtaacagacatatacatgaataaggcatgatgtgcagtggcaaatgagggggtagaaaatacatgttctgagggtgctgcagagaacagaagtcagattcagaaaactgggcaagactttatggaagaggagtgcctttcaattgtgccttgaaaggtgaattagattttaacaggcagagatttggtgggtgaaaaagagggacagagagccccgccttttttttttttttttttttttttttttttgagacagagccttttttttgagacagagtctcactctgtcacccaggctggagtgcagtggtgcaatcatggctcactgcagcctccgcctcccaggttcaagcgattcttctgcctcagcttcccaagtagct

SEQ ID NO: 83302 - DNA, 1040 bp, Homo sapiens
ctttctctaacagcagtaattcttgtttatattgtcaagaacctttccactgagcacaagcgcaccatacttgaaggtcaaatgcttaacccttctgcatggttacaatgaaaatggacccttttgttttcattaatgtataccccagccatgtctacagggagaatgggggccccaagcgttcaccaagctgaagcaacttattgtaaaagagccacaaagagagcatatttttgtttccatacaacagttgtttagcttttgccttgtgcacccaaccataagacggtatgcttacttatcaatgggcagaattttgggggaccattttgttcctttgacctgtgttactttttactgacccaaccaaattgcttaaaaattttccctttctgctgtcagtgtttaaagctgcttaatgtctctgaagtgatcccttctttctttttaacactttacattcctgtttatcacagcacctgttactatagtgaaccatgaaatcacaaatgctatgcagctcttattgaccaataatactttattaaatataaatagagtatcctcccagcttctgtatggtgtataaaggtctcagtatatgaagacaaatgcacatatgtccataggtgcacatgtattgtttggtgggcaacaatcgggaaaggaggatgttttatttatttgtcaggcaagaaatgtttctttttctgctccttaagagttaaccaaaactaaaggggccagttcagcaaacactaaatgtgagcctccaacatgaaggcatctttgttactgaaacaaaaataccacagcaggtggtagactcgaacacaggagggaggaggaggttcagttgttgcccatttttctaatcctttcagaatacccattgtctgaaccccaaagttaacatgttcctgctcagtctcatggagacaatttcagcgtgaaagggctgtgcccatcactggttttcgacaacagtttaatctttgggtatggaatgtgtaaccactcaacaaggcaggagaggcaat

SEQ ID NO: 83303 - DNA, 1047 bp, Homo sapiens
ctgtctgcttaatgttccaaagcatctccaactccatgtgtctagtatggaacgcgtcccttgtgactttgcagtggcaggggttggcatgagggatatactgtctttgtgcctcagttttttcatctttaaaatggagatgcttgatatatggtgattgctggatgaagtgagataatgttgatggaatggttgttggcatggcaggtcgtaagcactaaataaacatagctgttgttcttattgccactctggggggaccagttctctaggcctgggggcagtagtaaggtctcagtaggaccttctggcttcactctcctgagcagataaaatttccactagggctttggtttgggtattgctgaaagaggagttgggtgggtaggtgggtgggggtagatatatacaaaggagtgaattataacaaagagccttttctgcttcaattcttgtgtagaaaacatatgttcagtgatgcaggcagcagttgggttaaagacacactgtagggccgcagacaaaaggcctgtgcccttcctgcattcacaatgtttccaaacatattcacttgtctcacttgttagggactgagctgtcagctggatcctcttgcaagtgtgatttctttttcccgtcccctttcaaaggccatccctcccttcccctctcccccagtgttttacacttcatataatccagtgtgcccgacagaccacttcagcctttgtgctgctgatgtttaggggaaggagagaattgatctgatggagatcttgggtaacttttcacttgtccaaggatcggaaagtgctaagccacttttaggccaaacatcatcagtggctcaattatttcgtacttggtatagttagccgttcttcaccttcaattaacagttaggacaacgaacagattagtgcagtggaattcttagaagtagcgtctgggaattaggggcatgtgtgtgttgtggtggggttgggagagttcttgcttttatttataaagttaatagtttttgataaaaagataaagataaggcaa

SEQ ID NO: 83304 - DNA, 3614 bp, Homo sapiens
ctcctatatcactctatgcagggcagattacttgaaagtatagtcatgcatcccttaatgatggggataggttctgagaaatgtgttcttaggtgattttgccattgtgtgaaccccgcaaaccttgatgacatagcctactatacacctaggctatatggtgtcgtctgttgctcgggggctgcaaacctgtacagcatgttgctgtactgaatattataggcagttgtaacacaacaataagtattagtgtatctaagcatagctaagtatagaaaaggtactataaaaatatggtgttataatcttatgggacgggaccactgacatatataaggttcgccgttgaccaaaacctcaaaatgttgttacgtggcgatgactgtagcctatttatcaacccgatttttagggttgaccaactaggaatgactcttgtttcaacctggtctctttccatagagttgcctgtgcttagaaacggtgttactggtgaaaactttctttaaatcatcagtttttacagaactgatgcttgcatagtaaatatcatgtggtcctattctgttttgaaaaacagttgatatgtgggaggctagaactagttctcgcaaatgttaggattatcttttagatctgtagtttgtaaaaattattgaattgtcatccgtctctaagccagagggagaggaatcaggaagcgtatggcatattttgtctcagagtcttatttggtgcttaaaaattctatgtgcctggaagtcaagaacatttattgatagacataatattctccaaatgacttcatgcaacagaatttataataattgatagctttactagtaataattatcataaaaataagtttgtctgaacaaggctgaagatgagcattttccaagaaaggagacagtatgagtatttattctcattggatatcagaaagctgctttttcaaatatgtattatctttaaattcagacttgtatttaaacagtaatttaaaaattcccaatgatattcaccctccccttcccccatctttttggtggtgtggtcggagtaaatggcagacagtttcttttttttctttttagaaaaaaatgtttataaaaatagacacaggatcttgtcatgttgcccaggctggtcttaaactccttgcctcaagcgatcctcttgccttgacctcccaaagtgctgagattacaggcgcgagccaccatgcctgcccagtggcagacggtttcaactaaagtaatgactaaatgatttccaatttacctttcaataattaattttaaaattttctctgtattataagttaagcatgtatattcattaaagtatacatagtaaggaatggaatatcagtttgtggacatctaaggggtttctttgtctctgtttgatgtcttatgtcgccctcacgatgattccaattaaatagaaagggaggaagaaagaatttccctgtaatatctcctctgcttcccttccgtccaaagaccgtgtggcccagtgagagcataaatggatgtcttttgttgagtgcatttggtttgttaacaataattttttaatacaccaaatcattagacaacatggtcaaagtggcctgtttaaaaggaatctgctttcagcatttctggcccttactgctaacaatttaatcaggagctggagccagtgttgaagttgatgtagtctagcaactgaaacaaaaattctcaagtcctttgtgttaagggaggaggaaagaaagagcttaacagctgacactgtgcagacccccttaaaactaaacacctgaaagaaaatttcaagaggctggtgtcttgagatctcagaaggaaaagtgtcctcagagtattaaataaccataatccttctccccaccacttctccacctccatttgatgtttcccatcttagtgacctatctacagactcatccatgcgatccgtataaacagacggttaccatacacctttcttttcctcatcaaagtgtcatctggctgtctggaattgggcattgcctcgagtagccgtcaaatgggtggtggtgaaagttataaaacatccactgcagtgcttactaagcagcctgtgttttagagattggcctattgtgtacttcggaattacacaaggaaaaatgtgctttgacagaaaataattagcactcaccaaaggccaagcaataggttacagtattttactttcatcaaagctatcaggggatcagttagattagataatagaaatttttttcctctgaaagttaaatacacatgactctaattaccttatattgcacattagagagtgcattatgaattgtacaacttcaagaaatttaggtcaacggagccgccgcagctggcagtaactttagtataagtcttttgtaataaaggtttttacctctctttagcaggttcatttgcgatcatattagggagaatttttaaagtaaaacttgtaacctggttgtaaaatatttgtctgtctctcaggtcaggcgccaagccattgtttgggactcactgaagtctcttaaactgaagcatatgttccttgtaatttagctttttgaggaaagtgtcaattttgcatgacttggggtaaccgagtttgtcacagtgtcacacaacccagcgactctagaggcacatctgagtgctgtgggtttccttctccaagcttcgtaatcccataaacaaccctctccaaataggcttattagggctgtctattcacttccccagagttgaatgatccaaaggacatcgggagaagctgtgtgaatgcagggtaagtgttaacagaagtgggacagaatttctgaagattcgcctttgtttatccagtcccctctgcctgatggacagcttgttatagcttttaaagaactgggcgagccctctgatctgaccccttcttgacctgcgtagcccaaaggtcagtctgcagctaataaactctgaggttcttagggtctactgtaggaaaaggcagaaaaagagcagctgcaaggaccgggtgtcccaggataggctactttagggtcactctctgataatgaaaatgattaccaaattatatggaagtttaactgcaatcgtgagtgagaggagggtggggcccggcgtattaggtttgataaatgaactgtgaagaggcccatctggctctcaacatcttttctccccctctttccctaccaaggggaaacattttaaaataacagcagtacatatagactcaatgacccatgcaaggagctggaatggattaagatttaatggtgacagtggaagaaattatcatttgaaaagtgctccaaagaaaaggtacagttcaatgtccacacccgagttgtctttctaaataaaatataataaaaatcagcgccttgtttattttctacaaagccctggcgtctttcctagatggctgaaaattttgagggtgttgtttattatgggataattattcatagtttagcttcaggaacggaatgggcttcctttgccttgaagaagtcagaatgagaatcaaagattttgttctgcctgcctgcttcatttcagtgatgtaggtaaatc

SEQ ID NO: 83305 - DNA, 2111 bp, Homo sapiens
attgcttgagctcaggagttcgagaacagccagggcaacatggtaaaaccccatctctgcaaaaagtgcaaacaactagccaggcacggtggcgcacacctgtagtcccagctacttgggaggctgaggtagggggaagcacttgagcccaggaggcagaggttgcagtgagccgattgcatcactacactccagcctgggtgacagagcaagaccctgtttcaaaacaaaagaacaaatttgcaccccagatctttgtaacattaagctatctcttccatttgaataatgccctctatcaaaggacctcattgcctgtttaccacatatccctggcatctagaagaatgcctgacactcagatttgtgaaatacctttcctctcaatctattccagtgtttataagtactttgtctgctttattaattttgaagaggaatgaccacttgtgatattggcctgttgctttttttgctctttttctcaaccttgcctggtgtggaaatcttgaaattcgaagtcaggatggatctctgatattggaagtaagcactggttattcatctaaccttgccaggggtggaagccttgaaactggaagtaaggagaaatctctactatgcagttctctggtgtttaagccccaacatggtaccacaggcccttattccagcatgagcaaagagggatgccatgtgcacaggctgactccagtgtacttgaggaagagaacaccatgggactgggctaagaccaggacaaaaagacatggtctcctccctgagccaccattcctaatttgttgactttcctagaagtgaaatggagctgggtgagaagaggaagaactggcatggcgaggaagaagagagttataaagacagccctgggacatgcctctgaataaagggatgggttttagttcagtagggataggaacaaagctgaggctaatatggcttccagtctgtaggcagctgttttttcctggtcacctgctaatgtcctcgtctgctttagtgatatcagcacagttatgaactttagcgttggtgattcggcatgtggactagaacttggagctgtgttcacaaaaagtggagctcctcaccttgaggatgggctgtgggataatgagactgatgcagttatctgctgagacaacctgtgattgtgtcatcggaccacgtcagctgctatcattcatgctaaagagactggctgcttactccggcacagctggttagttggaaactagaagttgtggcatctgtagttcggtagctgtcagttgctactaggtaaacttgtttgcagtgttggggtgggcatgaggaataaatggaagagattccagggagaagcagggaggcactggcctgctagttgccatccgggtcttttttaagacatctgtcccttcgcttttaataattacagtctctgctttttgctgcccttagcagaagaaagttctttgtgtttctgatccagattactccataaaacctgataactccataaaacctcctcaaaaatgtgtaggaattgaaacattgtataaatttagagcaaagattaaatgagtctagagatagggttacttttttcccccaagatacagcaacttatcttaaggaggcaagtgttgttaatgttattaccattgttactgtcattatttgaacagttttatgggggacaaaagccaattgacttctgtgcatcttatttataaaatcaacacatgggctttagcatgaactctgtttctggcaggtttctgactgtgatcagttgctggctggctgtttcttaggggcagtgcttcttaaactttttgagaaaacattgattcatttatttatccaacatacatttattaagtgtctattgttttctaagcactgttccaggttcacagcagtgaacagaactgatgacagttctttcatggagcttatattctagtggaatgacagatatgaactcttttcctaagcggaactctgaaaatttcttttataaaatgtgcatatagttgctatgccctgtatattcaccagcactcaacagtgaccaaaataaagtcattcagttgagataaaga

SEQ ID NO: 83306 - DNA, 1787 bp, Homo sapiens
tgttataaagtaatcacttgttataaaatttacatttcaagttgcagtgggtcatatttgggaagtagccgtgggatgccagttttctgaggaacaccatcctagggaatccgtaacataaattctccttcaattatccgtaccgtggttcccatttacttttccaagacctgcgtcactttaaaggtcttcatttgaaggaaggcttaaattcaggccacattatattgacaaatctctctgaagagagaatgggcaaagccatacctatctcataggtgttgggggattacctgtgataatgcactcaagtacttcataaatgctgggttttgttgttgggagtgatctgtcagtcatgcgttggttctgcaaatatttcttaagtgcctacctggtatgaggagctatcttaggtcctgaggttgtagagatgagtaacatttgattaggggaaatgtattacacaatgtagaatcataaatactatggaagagattgagtcatgattccatagaaacccacatcccagggaagaagacaggctctccttaagtgttctcataagactctcattatgtgcccagcgacagtgagaaatactgctccattccccaattgtgttggctaccagtagataggtagctatttgtctcaaagcatgagtgagaaataggagagaaatttatacgtgaggataggtcattgtataaaagttgtgctaccttctttccattgtataaagtttgtggaggaaaaatggttttctttcagagtaaatttaattaatatgtttgggggcatagattctgaatcagattgcctgggtttgaatcttggatccacttctataactccaggcaagttacaattgtggattgtaactagatgagttacttaacccctctgagcctcaattttctcgtttgttatttgcctaggggatgataataatagaacccatttcatagggttgattaagtgattaaatgtaaaacacccagagcaagtacctgtaacgtattaggtgttcaataaaaatgacctatcatgatcttcagatcaaaacaataaagccaggaataaacccagccacccttatccaaattggcctctcctttgagagaatgcctcatgaagtaaatatcctagcctcctggtaggggcctgatattgcaaaattggtgcagggaagaacactagacagagttggtgctctgtgctcagcagtgtcacacagaattgacaggtggagggctggactccagtttgaatcccatcattagtgactataggactctgggcatgtcacagacactctacgccttagcaactttatgtaagaaagaagcgacttgatctcgatcgccccaaaagtgggaggcatcttccagctctcacaaggagtggctccatacgtgagatccccgggagcagggaaaagtggatgttactcctgatgggtttcactcctctacttccactttccctgaagtctgcaattgtactaattttaacaacaatagcagctgacatttattgagaagtcactgtgttccagacagagttttaaatgttttatatgatgagaaaaccgaggcacagaggtgcagagtaacttgcccaaggcaacagctagtaagtagtgaagatggaatttaagccaagacggcccaggttggccaagagcaataacaaagctttagtttttaatcaaccactgatacgattcacttagtattttagagaccttctaggatccttctcagtgtggagataggcaggta

SEQ ID NO: 83307 - DNA, 1196 bp, Homo sapiens
cagtgggtgcccttaaggtgaaagggtagcaatttatctactccataatgggttaatcaccagctgtacagtttgtttatatctaggaaacaatttaccacacatgaagagtagtaattttattctatctcaggggtatccccagtgtattttacaaatttactctgtaatgttatagataaaagtttaactctggctttcagttgaggaagtcatggtggaggaggatgggggaaggggaaggaacagctctactggcctgtaggggacactgttgcatcatttattagaattttccagtctattgtcccaggacaaaaaaaacaaaaccaaacaaatcagaaaacaaaaaaaaatagttgaatcaccttgaaaatgcttattagaattatttgaatcgttccaatgtgtttagaatgttcaggacttctcaggtattggtcagactgttcagtatccatgcgtgaaagaaataggttagtggttctttctgagacaggagtgtttgatgggactcttctgattacctttctctccatagtcaactttggatagggtgctcaggacgttactttttagtttaataaacctttaggtttagttaaccatcttcattttttattaagatatgctcatattaagttgttttgcttccagaatgtatgctaaataaatgtcccaatccttggaagggcgttttggaagttcctattgtcttctttttattcttatattttttttcactgaaaaagttgctgtttactgaaaaaatgaagtcatatctacaaggaaggcttatgtagggcctggtctgaactccaggaagcatatgaccagatgctgtgctacggctctctttccagactgttgacagccattgtatctgtccaggtaccccatggcctggccagcaaaacctccacccctctgcccagctctggcctctttcctaccagaatacgggcctgggaggcaactgcaatgaaccctcggaaagcataggttttgctaaggcagcctgcacagtaatgatattgttagcttgcttcatttccagtttcaccatcaattacgccatgtgtttcatccagttggtgctaccctcccagtgttaattataacctacaagactgttacagttaattttatggcaagcatattgtctcttcaaggctccagagcagctcataaattat

SEQ ID NO: 83308 - DNA, 1551 bp, Homo sapiens
gaagttgttaaatacaagagggtttgagcttctggagaagaggaaaatgtaaaaatattttttcctttaagaaagataaaaaggtaagcctaaaccttggcggccaccgaagtcagctgttacgcatgtgtagttaaatttcactgtaaatatttcataagggttcttagaatggagccaggttgacatcacagccccaactgtaccaaaggaaccatttcattaaaataagccaacatttccaaagaaacacgaatgtctatggcagagttaacataaggtcagaaaatcctctggaagaaatttcggtatcaatgtttataatctctgcatttatggatttgcagtttgtgcaaaaaaaaaaaaaaaaacccagtgagactttattttggttaaataagactagcttgtgaaatagtctgtatatccagatccatcctaacccaatgccttggcagccttttggataaataatgtcttttccaaaatgtgtgtatttgaaaaaggaagaggaaaattaagtggcaaactgtgtctctgggttgccataaacgaacagaatccagaaacagaaagcaaagactgacagttcattcgttctttaaacaaattacatagctgtacgtttatttactgatgcatgaagggttgcagtgaagagcaaaatgtttaccctaactactttcattttctttttttggggggggaaagtaaaggtttatttaaacatttttttttttttggtgtgtaacacaaaatctatatgaggtttagaggcatttggcaggaaaaaaaaagatattcacatttgtaaaaaaaaaaaaaaaaaaaaaaaacttaatccatgctcacagatggtcctgttcaggtgctattttaattatgaggtaaaaaaacagccccacacagtaggaagtcgtcttaataaatggactggagcttttgtcttcaagcgtcaaaaagcctcgttactgagaaatttaaatactttgtattataggggagagtctcaaaatgaccaggatacttggagaaagcaaaatgatggattcttctaaagatcaaatgagtatacgagaaatgttttacaattgtatagctttgagcttccttagtattggtcattttagtgatattttttccagtgataaatgtcgtagatatattcatgcagccagaggaaaaataaacagaacaaattacaaatacatttaaaaaattttaatccacgtggaagtatttctttcctgttcttaagcgcaaagggctgctttgcccttcatgtgagagagtgcccagaagaactaatagtaattcaaatgatgcggtaacttacagcttgcattaataacacacaaatagaacagtcttcttactaaatattagtaatataataatgttttactgtctttcccatagtggggaattatgaggacctcatgttaggacctcagtgtcctgacatagttaattatccgtggataatggcttcagccaccagagttctcagtgaggcagctttgttgttgagggcttattaagtgtttgcag

SEQ ID NO: 83309 - DNA, 1086 bp, Homo sapiens
gaagggtgaaatcttcagaactttagaaggcagagtaaagagacgacggtttcagctgtggcagggttttcaccttggcccctctttagctttcacagtagagcccatgggctgttgagccggaagtggtgcagcaggggcattggttaggaaggctcacgtcgttagtgggccaaaggagatggacgctaatgtttaaggagcctgaatggatctgagaaaacgtggccaagcagaagcaagagtgagtggcatgatttagagtagcagagatgggactggcaaaagaagagctgctttgtgaagacctgattcattcccaactctttggtggacctctatttttagagcagaaacctaatttcacccaagttaccaccgtctctaattagaccagtaagaaagtttctcctgtttctgtcagtgcttgaccacttctggagtgttttatcccataaagcattctttaagcattagtgccattggagtctagcattgaccatatgggtccttaatttgtatctgagtatccagttgcatgaagatggatggttaagaaaaaaaccaagagctattcatttattccacaaatatttactgaacacctaacagtgtccctggaactgggtatacaagagtgaacaaaaaaaccacagcctgtttcttgtgctggtagagcttacagtctagtggcaggaggctgactaaaaataagcaagcaagtaaaaaagaggatgtcagataatgacatgcactatggagaaaggcaacaggtaggcaattggggaggggaatggaactttttagggaagcctcatttaagctgagatgagggggaagagaaggaaccagtcaatatgacagagggagaagtaagtgagatgggatgagagaggaaggaggggtcacattttagggttggagtaaagacttcatcatggagtttgctgacagatgaaacataaatccaaattctatttacaaagtatacggaaagtttccactgtgtggccagtgctgtgttaggtgctgtggaaaacacagttcctctaatcaaggttatagtttagttgttgggaaagagac

SEQ ID NO: 83310 - DNA, 1026 bp, Homo sapiens
gataaatgccaagttaaataacattgaccataagtacatcatgagctctttgaaataagtagtcagtgtgaattggggaagtctttatggagagaaagagggcatcaaaattggagctcaaaactattgaggctgggcgtgatggctcatgattgtaatcccagggctttggaaggccaaggtgggaggattgcttgaagccaggagttcaagaccggtctgggcaacatagccagatcccatctctacaaaaaaatttttaaataaaaattgaaaaaaaaatctattttgcacctcctatgtgttgatggtttgtgtgtatctttaatttttttccttgtagtaatcatacaaaggtgagtggtttcatccccatgttatagatgatgaaactgaattcagagaaagttaaagataactattgacaaaacttcagctcaaaccatttaacatctgagaacctaaaaatcactgaccactaactaaaaatatgacgggctttgagcatccctgtgatatttctctccctgtctctttctctgttttgccgttgatatgctaaatgtcagaaccaagaggatctgtgtgcttgtttttagggctgtggggaggaaagagtgctctggggagtggatggtctattatgaagcctgtctttgggagaaaattctccaaatcgagcaggtagtggcagctactaagtgatgaagaaagcagatctagtcactggaggagaagaggaaaattagtggaagaagtaggtacttcttccttaccttgtaaggttcaggagaccatcaggatgaaaagatcatgaagactattgcaattagaacacatctcaccggtgtatttcccacagacaagcagaaatgctataaaaggaggcataatacagtcatgaaacatctaaattttccttttttttttttcttcttttttattttttagatggagtttcattctcgttgcccaggctggagtgcaatggcacaatcttggctcactgcaacctccacctcccgg

SEQ ID NO: 83311 - DNA, 1063 bp, Homo sapiens
atcctttgcatgtattatgaatgtgtttaatcctaaataataataatactaactagtacatattaagtgcctctctgtgccaagtactttttaagtgctttatgtgaattaactgttacaatggtaggtatgtttattatctctaattttaagaaaagggtacgtggagccaaaagatgtcaagtaaccttcccaggggcacaaggctgggaggcaggggagctgggattcccaagcaggaagtttggttccagagcccatgctctaggccagtggttctgtaattttagcattagaatcacctgtgggcttgtgaaacacagattgcaggcccttcctgaatgggcttgaatagttgcagtcctaacaaattctcaggtgatgtggatgcccacagctctatgccaagtgggaagagcacagtggaaaccagtcactataaaacaaggaaaagtggaacatcctgttactgatgtaagcagagtgctttgagaatgtcagtagtagctaataataatattatttattattattataattattattgtcattataactgtcatttattgagtgtttgtactggacacttttgtaaccatgtaaccattataactgttactgtgggtaatctcatttaatccacacaacaaccatatgaggtgttaactgtactgtacagctcaggaaactgaggcacagagagtttacaaacttgcctaaatgacaggccaaggattcaaactaccccagcctaattctggagcctaagcttttaaccatgaagaagatagtgaaaagaagggaatcaaacacccatccatagagcaggtagggtacaagctgggtcctgaaggaggaagatgcccaaaaaaggcttcccaaatggaatggatatgtgcaaaggcccaggggcatgaaggtgcaaagtgtgatagagagtgaataacatggagactcgtgtgtaaactgcatggcaagaagtgatgaaccgtaaggatgggaaagcaggttggttgaacagccttgaaaatgaggagtcaacagtattcaagactggacttgg

SEQ ID NO: 83312 - DNA, 1038 bp, Homo sapiens
gtatgaatttttatctcccatttactagactttcattgtattgtgcttacagacacagtgtcagcacataaaatgttaaacatcactggtctgaaagaggctcccattgtcttacctctggtgctgggggaatcttgctagctttgctgtagtggttctgtcagtgtaatatgacatgaagcatttctcagtaatgacagacattgaatatgagtgacaggaaccctgaccacaaggaatgggttcaattaccagaaatgggggtggggggggcgcggttacctgagataaaaccaaagggcccaattgtgcttggttttgaccccttgactcccagatccagagcaaagacaaatggctgattaaccagcccctaaccctctttttcagtgataaacttgtttggatttctctgtccgaaaaaaaatctatgggtggcatggtttctaaaggaaatatgatcagaaacaggaggactggtgctcgtcatttttgtctcttgcaagcacaaaactgaaaactgtcattctatcttggactggatctaggacggtgtccagaaatcaatacaagataaatgattgctctcttcaccccacctttcttctgctgcagtgcctacattgctccagttcacctgtagccaacctgacgccagtgtaaatgagagatcctgccatcagaggctctccttttttttttttcccctctcctgcaggctgttctgctctgcatcgagtgcagctttgtgcttgtttatagtccactgcttacagcccccagatagagttatagcgagcagaccaattaaactgtcgcaggctgccctcacttgactagctctgcagagtcatttagccagcagacattcctgactattaaagctagtagcagcatgtctccagtgctggagataaaatgaatgaaatttgttattgtgggctgacacttgatcctagctgttgaactaatgctgttgcacctgaagtttttctttatggtaattgctgtctatgttattatttcatatactaaatt

SEQ ID NO: 83313 - DNA, 2516 bp, Homo sapiens
tacagcattcatttgtatgcttagcttgtggtcagagctcgtggtgaaggctccagacaggacccagaataagaattcaggcctggtttgtggtagaagtactatgcttgctttcatgttaatgctttgggaagacactgaccccaatcataacgttactttaatttctacctgaagaccacacctgacagacatagcagggctctgtcaattacagggacatacatctctagaaccccaagactttgtcacctccctactaggaaacagtaggctggttgtactccatattttgattagaggcaaatgtgagaggcctgaacgtcgaagtactagaagagagacatggggttttgttattatgtttcatcattctgcccccaaatttagggacagtccacagataatgatgcgtcctgcataagtgctttctctcttgacatagacaactgtaatttgaatgataatggctagcattagtgtctgtggtggaggatttagattgcaagttgaagtccatatagtttgtgaggtcccaaatatactgaatgtatgttggtctgcattatttctgatattcataacctttgtttaataaagaagctcttttaacaactcaaatctgctaaaattgaattactgtaatttgcagcaaagttcagcatgagaaatgtatattttctttccccactgagaaaatgaaagaagcattagtctttcgtttatatatgagatgggtagattatgtatagagtatcaagtttagaagatttattttcccacgctcaaatccaataggaaaaactggcattttcatcaaaactaaactaagactaatctttattctattttctgaaattgccaaatgtacaagttttaggtattttaaaacagtatagtcacaggcaaacattaacttgttcccagcggtccttcagatgcacattcattcttgtctttggtatttgaggatcctaatgataccataataacacaagtaaaagttgctgtataatagctgcatgtgtgcatttcagacccagaactaattctccatgtttctgtctctgtgtctctcaagcaggagtggtaagctcttctctccaaatcttacctggacttacttttctgtatatttgtgttattgttggggcctagattgacctcttttgtgtggacagcacagagaacatagggaagacctcagcatgcaagctgattgacatcatttggatctgtgtctctgaccaaatctcatgtcaaattgtaatccccagtgttggaggaggagcctggtgggaggtgtttggatcgtgggacagagttctcatgaatggtttagcaccgtccacccttggtactgtgtagtgagtgagcccttgtgagatctggttgttaaaaagtgtgtaccacctctgccccgacccttgctcctgatctggccacgtgacgtgcctgcttcccctttgccttccaccattgtaagtttcctgaggcctccccagaagctgagtggatgccagcatcatgcatcctgtacagcctgcagaaccatgagccaattaaacctcttttctttataaattatccagtctcactctgtctcccaggctggagtgcagtagcacgatcttagctcactgcagcctccgcctcccaggttcaagtgattctcctgcctcagcctcccaagtagctgggattacaggcacccgccacaatgcctggctaatttttatatttttagtagagacagggtttcaccatgttgaccaggctggtctgaagctcctgacctcaggtcatcctcctgccttggcctcccaaagtgctgggattacaggtgtgagccaccgcgcccggcctaccaatgtatttcttaaaatttaaactttaaaactgttttcctaagtgtggataatttagaatgggttgagctgatatggtccttcccatgtgaattataggcctttgttcaggtcagggatcagcaaactttttctttaaaaggccagatagtaaatatctcagattttgtgagccatacagtttctgtgacaactgttctcctctgttgttgtagttcaaaaacagccctggacaatatgtaaatgagtaagtgtggctgtgttccagtaaaactttatttactaaaagaggtggcaggatttgactgtcaggccatagtttaccaacccctagttgaggccaggaggaagggttatgtttaagggaaccagaacacaaccaatatgttgtattcttttttcatttgttgttcatgtaaattgctggtgagagagatgttctctcagcagaacttgaaaccattttcattggctggggtttaatatttttttaaatctcttgtttaagcacatactaaaagtgtccatgttctttccattaaatgtgttggttgccttcccagacttcaaattgcagtgaatttatccccaaaagatgtttggtatcaattctcaagatgcaatttgaatgtagtctgcttctataat

SEQ ID NO: 83314 - DNA, 2716 bp, Homo sapiens
aagaatagcctccaagttcagtgaccatctttgcagtcatatacaagtgatgcaatcacaaaaagaaagaaacttaattttatgccgctagatatgaaagacaggtagctatgaatgcatggctccaggaccttctgccatgtcaaatgagctaaacccttccccgaaagccagccaggaaaacgtatgataccatttgcaatggtagaatgttgcatgctgttcttctgtaattataatggcctgatccgtgtggagtgggtgagtcctgcttaacaatcgttaatctactgagtcttcgtatcagcctcccatcttgaggagcagcagttcttggctggatgagtcggtctttgatttcattataataaggatagctttgttaaaattccgctgcgcagtggtgcctaaggattctgggaaaaggtttttctttttattttcccctttttttgcacggtggggatgaattgtttctctctcttccatcccctaggttactgtttgtgctctcccttgatctcctgcttgtccctttatttctccacgttgtgaaagtttctttctgtgtgaccaggagtctgtttagcagaccatattgtgagtgaagggccagcgtttgttgcctgattttggcaacgctgggtagtcagctgggatgtaattaagactctgagaacaggctgtcttctccacgggaagggcatgttagatggtgctgggatttggggctgtcagtttggccaaggatggagacagagagctagggacagagatatttcctttcatttataatccctttatgtacagtgtgtgcacttggcaaagtttacatataacctagtggctagagcttacaagccaacgcagtgaaattagcatatgttacatgtattttttagtaatattttaaagcaagtgcatatttccaaagtgaattatgcatggatgacagcaatagggttgtgttgcactgggtgtcaaatcccacaactttttgtcgagactgtgggttttacactaaaaaggcagaaagactaaacgaagtaaaacagttttaatttttaacagtttggttcggcccaaggagccgggctgtgacagatataactgacatttgaataattggattaatttagagaagggcaaatccggttttgacggttgtgcttgtgtgtacatctttttttattattatttgcaggaatggagttgtgtggtttaaatatacactttttgtgctgcctagcaaatcttgagaaaacatcacaaaatttatgaaattatcatttaattaatttgttttaatttatatgtatgtatatgtgtgtgttcacatattatgcagccttcatatgtatataaaagaaattcaccatatatacttgattcgggtctatcagtgatatacatatatacacattgcacatacaagcacattgtatgtgcacttaggaacttagtaaatccagcttgagataatgtgcatgacttcataggatgtatagaaaatgtgcagacaaggaagctcactgtgacattggcaagcccctttcctccccatatcaatgtgttgcaaaacatcacagtgcagaagcagaaaagcctaatttggtatctggggtatcagtagccaaattctacatggttgattcctcagtcctaagttccttcagattcatatggctttttaagtttcatatatgaagataatcttggcaacataaaaccaagtacagcaccatcatcgccaccctcctccagaaattctggtaatgaaatacaccatctaaaatcagcaggccaagtctaggactcgtggcaggcagtcttgaattgtggctgtgggctggctctaagagccttttccccagcaggacattaatagacattaacactctcggacaagaagtgttgatgtgtggtttataatgttagcacccagttaggcaggtataacacatgctgtaggaatcttgtaccaacacatgtgtgtgttgagtcagattaatgagaaccataaaaggagagacatttcacttgagctggggacctcatcctatccttttaccaagtaaaccagtgctcagctgggtggcagtgtcctggtgggatgttttcaatattagcataaggaggatatttgaaagttttgttttgctttgttgttatgtgatcatgaagcccaaactgttagtcagtacagcacattcaaactccttttcatctagtactgtttggctcagaggaaaggaaactttcacgatattcacaactacactatggggcaaaagttattattttcctctctcagatttacctgacccttcttcaagtgtttctgaatgattctgagacactttctggtttactttgtaaatggggcaatgaagcattcttatctcctgactggttctccttagagaattctcaaagccttttaaaattgtgtgtttttctggggcagccttgaaagtcccaggagtgaagttgccatctgtcctttatattaaaagaatcttctgtattgtatacctgatgtgcttgtcccagagatagatattgttaattaaaggacagcatttgtcctttatctgaaataactctcttgcctgaataacagtttcccaagccttaggaaacaggtaaggacattcggcccagagccctgatgtttactaaaggtccttggtccaggagctgtccctcagccttc

SEQ ID NO: 83315 - DNA, 1019 bp, Homo sapiens
attttctggtgacctaacaaaccaaactaaagctcaagtttaataggcaatgattcccgtttaaaagggaattcaaattatttacagttctccatcatcatttgcctcccttaatcatatggactaggaattgggcaggtgacatacaagagggaagccgacttgggtgaaaaacaacaggggctgggcgcggtagctcaagcctgtaatcccagcactttgggaggccaaggcgggtggatcccctgaggtcaggagttcgagaccagcttggctgacatggagaatccccatctctactaaaaatacaaaaataagccggttgtggtggtgggcgcctataatcccaactactcgggaggctgaggcagggagaattgcttgaacctgtgaggcagaggtcatagtgagccgagattgcaccattgtactccagcctgggcaacagggcgagactccatctcaaaaaaaaaaaaaaaaagaaaagaaaaaagaaaaagacaacagggatggtggtgggtatggcaaacaggtgggcacttatgctgtctacaagggacagttgcttccaactccaaacagttattaccttacagaggtgtgggcccaggattgcaagactagatttttcggtgaaagccgccagtgtgacactttttgagttttcagtgttggcagataattcactgttttaaaacatgcagataaaactcaactgtagttggatgtactttacgggttgctagtttgcacacacttatatacataatgcagaacataagtgggaatattctaaataatagacagtgtggaaacttttcttaataatagtaagaaactgagccccaaacaactattaatatgtttagatgtttccctttgggtctttatttactgcatatacattttatatacatgttttaaaatagttgtaatcataggagcctgtgatttttcacttactgttagaagcagtttctttatatgatttataatggctactggatattccatgtaga

SEQ ID NO: 83316 - DNA, 1052 bp, Homo sapiens
gcttttgatttaacatagttataagtaatgctgcaattacatatttgcttataccgctttctcctttttttggattagatccttagaatctaaaaggaagattactaagtcaaaagatatgaacgtttttatggcttttggtacatattaccagattgctttccaaaagcgttgcaccaatttacactgcaatcagcaaagtatacatttatccttgaagcattattatatttttgaggtttttccttctaaactggtaggtgaaaattggacttcattgatgtttgagtttgcatttcttgaggttttcccgttaatctgtcgactaattgtatttgttcttacaacatctgtattttctaaggttaaattttgtggaggttttgtttgctttgtgtatatgtgtgtatttttaaagttctctttataacaattgataaataatttgggaacagcccccttggcaaggccttcctctaggggaccccctgtctcagcagtgctgcagctgctacttttaactgtgtgttaactcggagttgggccagggcctaagcaggatccccttcccgaagaggggctcttttgtgtctggtgaaccacaagctcagggctgtatctgccaatatgtttttggcagaagccatctaataaaatcccatccgcgctgttctatgaaatgcagtcacaaatttggatgatgattgcctgatgccatattttggtaacagctaatctccatgtcttagatggtttttattcattgcctccccccttccctccttcaccactctgcttggtgcatgttttaacgacaaatgatgtataatctgagtttcatgtagcatggtctaatggaaaggcactgagccagtcatatggagacaggggtcctattattggcactgccctttgcttaataatagcttaacaactacaacaaatatttatcctgtgctgaaatgctctttcagcattcttcatgtattcttgaatcttcctaacagtcctgttagacaatattattatcctcgtttaggtgaggaaactaa

SEQ ID NO: 83317 - DNA, 1110 bp, Homo sapiens
gataaagcctgcgtggttcccagaggctgtgcatactgcctacatttcaatcagctctacattttaggtacatccatccctctcagctagtgttcttaggaagaaaatgcaaacttttaggaaggagaaatctcactcttcagtgtttgtggagagtgcagggaaattctcttaatggaatagtagagataccattgtctgacagccactgtaaagccatatggagctgcttgcttttggctctggagatattgtgacctcttaaaatatatttttctaaaaaaggaacatgccttatttctgtttttctttatacttcatccccaggtaggaatttaaccaagatggttaacggagaaagtaaggcattgactcagctccatacaaaaatgcattctggcttgtttgcataaatatcacagaaaaataggggttcaggatcccatatggcacttagcctcctaagcaaagatcatcagccatagacaagaagcaggtggcctggcatcgagagcagaggttatttttgctgctgggctcccgccatttcagagtttaacagtggcaagtctactcagcaggaggctgaccccagatgctctccccttgtcggacatggagccgtcccatgtcccacctccactgctgggagtaaacctgatcaaatctaggccacagttagactcccagataagtctctgtttaagcttattcccatttgctacttaaataccacttccaaatctgattcatttggggtgaagtcacagacttaattgttcacccatcctgggtggctcttgaaagcctgtgataatgatatcttggcattttcttttaggtgaaccctagtgcaacaggttggaaagggctagttttgaggatagtgttagagaccagaggtgtggaaacctggattctgcctctggttctgcctctccctagagctcagtctcactgtgtgtaatatgaagagatttggaccgtgtctggggtttcaaattcagttgccaacagggaagtataaaaaatgaatgagaagggaaaagaaaggaagagggagacccagtggaaaggtgcatgagggaactttggggcgagtgtgaaaat

SEQ ID NO: 83318 - DNA, 1270 bp, Homo sapiens
atcgtgattggttgatggttatatgggcatatacatttttcaaaacttgtagaacttatactaaagatctgtccactttaccgtatgtaaaataagtgtaaaatgagtgaaatggactaggtagtaaactgcagagcatatacctcatttaaaaggggcgaatgataagctctagccaatggcttctcttcagaatagaggcccagtgttgctacattttcaagtaaagccagaaattcacatatttatataaaatctcaggatatgtagatttatgggccctgcttggtcaaacaaaatgccagttttgtgatctctgaactttgggcttcttaatttgagtctgaggatcattttagcttcaacattggatgatgccgacttgcggtgagacctcagacaaaaagattaaacttgcctacacctcagtttttttcacctgtaagatgttgataattcatgactaatagtacaggggtctgatgaagagcatatgaggtaccttgtacaaagccactttgaaacatgaataaataacataaaaatgcaagtcactattaccttttttattattataaagaattatttccgtttttagaattgttattgttcagaattgaagcactaaacttagtaaagatggctaataaaaacatcaagattcaccatgagtaaatgacttgcctgcaaatgatcatgcaaacctttcactatccttagaggggaatgtttctgttgtgtgtgacaagaagaaaaggcatttcatttgtacagctactcatataaattgcaaaaaccatgggagctgaagtccaaggtacagcaatagcatataacgaaatgaacttgatgctgtattaaagattctttgtcacacgcactcactgcctaggagtcgtaatgctcccagccttgtcactgacattttgtgaacaagcagcctgtattggatggtgataaatggattatcttaaatgtcattctgcactgttttagagttgcaaagagagttttgatattgagtttttggttagtatattctgtatcaatcctttctgatgaaataatctcctcaagttacatccagaaatgtcaaagttgcttatttcttcaatcacccatagcaatgtttccattacaacgtatgcagagaagattgtgtaataatgtcaaactatttatagaaacatttcctaggaatctctactctccttgagttgtttgtgtatttaatactagagatttgtttttatatgtatatatatatttc

SEQ ID NO: 83319 - DNA, 1098 bp, Homo sapiens
gatcatagccccaaattacttaagggcttctgctaacatgaaaataagactcttgactgctgagagattggatattcagatagatttttttatgaaggaaataaatatttcaacatgcaaacactacccaagcgggtagtgatgcttcaaaacagggtcagaggtcaggtttttttctgtttgtgttttttgggatggctccaagtttaaaggtattacacatcactacctaccccgagcctcacatggtaaagtaattactgctagctagcggaaaatatgtacattcatttttatttccaaagatcctgagatttctctctgcgctttttgtggtcctcattataaaaaatatatcatgaagaatgatggtttttctccatcctaacggtaaaagagtcaagctgaaaatgcatgtctgatactcaacttttttaacaaacttaattttggaggaataaataagcatagaatgtatttattctttagagaatagtagagttcatttttatagtttgcctttaaaacatgcaacagacccctagggtattggataatttttagaggagatgctgacctggtggtcagccattttgacggaactggggcccaggatatcttcaggcaagcataaagatgtgtggcatacattgttctgaaacttaaacactgactttctcagtggagtggaatttgggtgactgttggaattgctaaacaggacttagagtttcagaaacccttttctctctgccttcaagtagggaaaataattatttgctgagcaattaattcgaattcacaaacacacacacacacacacatcagatatggtaagctcagatctctgcagaagccggcaggtaatgtcaacgagtgaagcaggggttggtgtaatacattagggagttgtggggacaagaaagaactagaaagcacacccccggtctaagaggacaaccagcactctgctcccagccagctgctgccatgagagaatatgggcccactgttgtgtacggctcagggtttttgttttctgtttttccaaaagaagccagaaatccagatgtttgtatgaaaggtatttttataaaa

SEQ ID NO: 83320 - DNA, 1078 bp, Homo sapiens
attctctgagtatgtttctcattctcatctcagatacccgcattattatcgcagatccagaggcagggaatttgtagattcctcagccagggaattgccacagttttggtgtaggatgaccagacatgagaaagaaaaaaattttcccacaaatctttaaatgcatgggaccctttggggtctttgctgagattagagcactgtgtgtttataaataaaagaagaataaacaaaggcagcatgcactggcagtcccctccttcctgccctgttaaaatgctgtgtgaggtggcatcgagaaaatgaacgccaaggttgacaccaaatgtagggcccgagtgatttttctgtttttcaaatccgctgtcagttctccacctctgactcttagtctttttctccttccccacctctagagagaggacatttcctgagtaaaatgaaaatcaaagctaggagctaatcatatttttaaagtcagatatgttgggggtataactggaagctaatttttaaaagaatcctgccatatctttgataaggaagttctatggcttaaagagtgtaaccactagttttagcagagatgtttcctttagttttgaaacattcttcaacatttcaggttcatgatgaaaaatggctgactggatttaagtcctttattttctatactcctgagcaaaattctgaaaaactggctggtctagtttagagaagaacgctgatgtgggagtattttcaccatgcattcctgctctaaatcctttgcttctactgatagactattctactttcgaaataagttcacattgctctaacacttcataagttcaatctttttctcattctgtttaaaataaccaccatgaccaccaaacgcctgaaattcactgtagttaaaattatgactgaaatagacagggaaaacctgagagtgaacgttacccagcaaatctgggttaaacaggttcgagtttttccagagcacactgtttaggatttcagcttcctgttcaaccatctcggaaacagggtgtttctctgctcctttgtgaggactaaccatgtgtccccg

SEQ ID NO: 83321 - DNA, 1035 bp, Homo sapiens
ttttcttttctctagcttactttattgtaagaatacagtatagaatgtgtgtgtacatataaaaaatatatgctaattgactgtttatgtgaatcagtaaggctgccggtcaacagcaagctattaatagttaaatttgggaggagtcaaaatttatacataaattttagcctgcagggggtcgagtgccccaatccctacactgttcaaaggtcacgtatagtgacctcatagtgttattggagctcaggtagtacctgtagcatgcatagcacagtgccttatagcatacattcaataaataccacttagtagcctcttggctactactcactcatttgggtgagtaggattttatccccattttatagatgaggatgctaaaatttgagtaggtagagtagctttccagagtcctaaagccagtaaagcctggcaggggtgagtagagacccaggctcctgccttgtggtgtagtttctgacttcaattgtaggtcacttgctgccctcacaccagacagcggcaggccaagtcttctggtgctgttactttgaccttcctcccataaaggctggatgtagcagaggcaggcactgtctcttctcttaccttctgtggccatttactgagcatgtatggtgtgtctcacatgcttttacatgctttgcatacatttctttttccttttctttttattttattttattttattttatttttgagacagagtcttgctttgttgcccaggctggagtgcagttgtatgatctcggctcattgcaacatccacctccagggttcaagcaattctcctgcctccgcctccaaagtagctgacatttcaggtgcccgccaccacgcctggctaatttatgtatttttagtagagacagggtttcaccatgttggccaggctggtcccgaactccggacctcatgtgatccacccgcctcggcctcccaaagtgctgggattacagtgctttgcatacatttctaatgactgagtataggttttcattttctcccttt

SEQ ID NO: 83322 - DNA, 1663 bp, Homo sapiens
tgaacacattttacagatgcctgttgaactaaaagttctgtctaggactgtagtaagatttgacccggcttagcctgggaattttgacccactgatggtagaagtttattaacagccctattcatttagatccttccctgtttctacttttctcgttctctccccggagggtttttatgacgttgtaatcatttataattttaaaatgtcttcaatcgtgcttaaaaacagcacttgattttaatgggtactgcttaaccatagaaagattgtgtctgtattactgtcggttcttacaacaatactttggaacgaaagtagaaagtttatgacacattttattatattcctaaatgtgaaagaggattctaatttaaaaataagtggccatactttttaattcttatttagcctctgtagctgttttaatatcccttttatggttgactggtcgatgttttaaaacaagttcttcagggactctgcccattagtctttggcaataaaatctgaactttactaaaataaaacatgaagccatggagtaattaagaggggaactttcagagatgaccgtgaatatgaaatacagtgatttgtattattaatggatttggggaaaaccagcccacctcttttaagctcaactatgtgtatttggggggttttatatttttaatttatttctttgtttctctcaaggcagtaggggttccatcgcaagctcttaagatctaccaatcctccttttgtagcctgctgcttctgaatatgagcctttcttttttcattttatttggaaaatggggtgatgtcacttaggaaagcatttttcccaaaagtggtttcaggaaccagaatctggtgaagtgttatttaaaagcgataacatagtaaagctctgctttgtgcttcaaataattgtaggatttacgggatatatccctaacctgttcagttttatggaaggacaaaatacagggattcattttatcatagtttcttaaaaactttgaaacccagttgacagtcatttctctagcattataataagctctttgtgtttataaacctagttcatagtaatttttggagtgctgcaatttggtagttatttaatttgcaaatgggattggcctctctaacctctaaaggaactagttccttttaatgctttaaaactttcattgactctcaattgccaactgcaggaaaaagttcaggttttaaaagtccttacatgcgtttcagcctcctctccctgtttcctttatgaacagccccctcccactccctttctttcaatggtaggtctgctgcagaacattctgcatctcttaaactttatatgcactgtatttttcagtctccattcctctgctcatattgtgttctctccatggattctttctttttattatttaattttttttaagggatagggtctcactctgttgccccaggctggagtacagtggcaccatcatagctcgctcgtagctcactgtggcctccaactcctgagctctagtgatcctcccacctcagcctcctaagtagctgggatacaggaacgcaccaccatgacaggccaatttttaaattattttttgtagagacagggtttcactgtattgcccaggctggtctcaaattcctagcc

SEQ ID NO: 83323 - DNA, 1051 bp, Homo sapiens
ctgggaaggattttcttcctggtaaaaagacagagcctcatgtttgccaaaagagcctgattctctgccctttcagaggcttcctgcctttgcacacagtgacaagacatgatgctggggctttagcagccaccacgaggtgacaggtaggaggacaaaagtgattacattgatgttggtgaagcaggatagaaagagcctgggtccacaatgaccaaccttgaaacctcccatttccagacttctggttcaataagaagcaccccgatggtttcatcttttgacggttggttttttgctgcttgaaacaggacacatcctaactgattcagttacttttagaaggaaaaataaaagtggagacagcatcctaagaggaaaggtggtgactggataaactatatggaagtcctgacaacatcatatttaagaaatttggtggctggcctctattcttctgttaggtgtaaggaagacccactgagtaacactggagcattcatcattcaagaaacattatattttaatcttggatattcctagcactatgcaggattctgaggatgcagaaataaaaggcagtttctatccttaaggaacttggagcctagtaagggagactagtgagtaaacaattacctgagagtatgaggatcactctcttttgataggggtattgtattagctcttatgctgctgatatgcctgagactgggtaatttataaaggaaagaggtttaattgactcacagttccacagggctgaggaggcctcaggaaactgacagtcatggcagaaggagaagcaaacacatccttcttcacatggtggcagcaaggagaagtgtcgagcaaaagggggaaaagccccttataaaaccattggatctcaggccgggcacgggggctcacacctgtaatcccagcactttgggaggccgaggcaggcagatcacctgaggtcaggagttcaagaccagcctggccaacatggtgaaaccccgtctgtactaaaaatacaaaaaaaatttagcctggcgtggtggcgggt

SEQ ID NO: 83324 - DNA, 1225 bp, Homo sapiens
aaaccaagaggattatatctcaagagtggattatgttaagaaagtaaccctttccctccaaaaaaggaaacttccataacagaacccttagatttttacccagtgtgattttaaactctaaatgctggaatgtttagggtcccaggtctgacagcatgaattagatccctccatgtggagcacccaagtaagtgaagggtgttgacagccatcatggggaatgctgatgcttactgaagaagccatgcaataaatcctctttagaaataaacaaaaagcagcttttgagaacccggcttttacccaagaccaaaacctgtcagccacaggcagaagtcattaggcaggatttatatgtgctggtatccaacactgagtcaaaaggagatccgtagaggggatttctctcttccggaaacccagcagaggaacggggaagactttccgggtaaagtttcagagaacctaatgcataaatccccttaacaaacactgggatttgggtttgtaactcatctctcccagcttaggtcctgtggagacaagctgtcatagggctgacacaaccaaatcaagaaaggaaagagtagaatttatagtgaaaatcaggaagctacttaaaatggtgggtttctcagaatgtggtactgcacattttttgcttggtagtccctgaacagttattaaagaccccatggaagcagatggatgctggccagtaggcattgtccccttttatatttataacttcactgaccttcattttacctctaatagagattgtaccattaattggctggattctcccaagctctgtggcaagtaagaatggaaaagtggattttctccgtactccattgcagaggatatcattaatttgctaggtttcgttcccacagggaaatgttaaaaaccagtacagttggttcttcgccactctggattgacagacattctttgtgtaggtgcctctggctttgagaaacgaggccagagtctatatgcagacagtgagcagtgatcttccgtttcctacttgttgcagtagacataaaatcagggcaaatggtgagttccagaggaaaggatccagcatgcagcctgctgaataagagaacaggaatgatctcgaatgatgataaatgtttatactctattagagctttggccatgggtttggccaccattcaattgcctctacagctgattttttatgtggcttttc

SEQ ID NO: 83325 - DNA, 1039 bp, Homo sapiens
gacattctggtctaaccgaagttgccatgtaattctgtggaatcatactaacattttgatttctctgattataagtgactgcagcaacaaagagagtaactctgttgtaagaactgtttccacagtgtctctagggacagttttgctttagtctgtaaattctccaaaggcaagctgagactatgtaaattaaagaaatagagccagtgacaaccaaccctgtggttttatttgattttccaaaacacatgtccatcggtatgtctcagacaacacgatatgattaaagcacggtaataatcacccatatattgcattttaattggtataatgtatgatgaatagtgaagttggaaccatggggcatactttcacatttaaggtatttctttgatttatcagaatttctaagaacataaaatagaagtcagaaagtctgttttctgagctgggacctgccattcatcagctgtgtgatcttgggtatgttactttatttctctgggccccattttccccagctataaaatgaggggtttaaactagatgagctctaaagagcttttcacttcggagtttggctattccaagaccttttctagtcttgtgaatttaattactgaattctgggatcttaagtctctttatcagttgagtctcctcctttgtggtcttacagcaaagatgactgttggccaaactttggatttctgagactgatttcagtgaattgcattatacatatttttaactagcttatattaaatgagagaaagtgcaaggaaggaattgcaaccacaatttaaatagttttttccgtgccattctattccgtgagcacctgccttggagtaggtgtgaaacgggagtcaggaagtctgtgcatgcctctcagagggtggtatcttcgtcttctgagtatgattccgtaccatgaatatgttggttgtggatttttcttttctgtacaacatgaggcccctaaacataaggaaactacttcctttggtgcttaacctaagaagcatctattctaatg

SEQ ID NO: 83326 - DNA, 3582 bp, Homo sapiens
atcctccagcctcagcctccaaaagctctggaattacaggcaagagccactgtgcccaacctccccatatagaattttctatagcaatcttgtcctaggaaatatcatagaaatagtttaggttttaaaaagaagggctgtatgtcatctaaactcttatttaacctatggttgacagccttgctattaaaaaaagatcttaagttgttttacattttatagtctttttaaaaaaagatgatgagacatctctttagtggttgccatgtttaatattgttactttctaagaacaaatataatttttgtgagaacattatattactctgaaacagagaacagtactctctgtccttttagtccctcaatttttgataaggtaaaataagattatcttatatgactagtgtatactaccttatatttgtatgacactccatgtttttcaatgactttcttccagagtttttgttgaaacacaaaaggatttgtacccaaactgactttactttcaattctggataatagataattattattgcattacaacttttaaaaataattaagaaatcagcttagaaaatgcttgatgatttttacttagcatggtacgtctttagggaaaagaccgtattatgaatttagcaagcaagttgagcatggtgacatccgcctgtaatcccagctacttgagaggcggaggggggaggatcacttgggcctgggagttccagactacagtgagttatgaagggacccactgcactgcagcctgggcaacagagcaagaccctgcaaataaataaataaataaataaataaataaatgtcgtggtttttttttaatttagcaagtaaagtagcagaatatcctatgttggattagtcagtggaaaaaaatatctttcaaatcgcatttgatgtttgctcaccattattatgaactaagctactccatggaactagagcatagctgtcaagtaattatgaagcgcccatgctagggaccgcatgccatttaatgagtttacatcagtaaaaagagaggacagattcaaaaatgggacatgtcacacatacatgtgagaattttcccataggccaaagggcctctttcttggttttgatatcaggcaccaactctaataggatgaagctatctgtgtagcttgatgaagtagaaattcattggagtggccgggcacagtggctcacacctgtaatcccagtactttgggaggctgaggcgagcggatcatgaggtgaggagatcaagaccatcctggctagtacagtgaaaccccatctctactaaaaatacaaaaaattagccgggcatggtggcaggtgcctgtagtcgcagctacttgggaggctgaggcaggagaatggtgtgaacctgggaggcagagctcacagtgagccgagatcgcgccacggcactccagcctgggccacagagcgaggctccgtctaaaaaaaaaaaaaaaaaaaaagaaacaaattcattggagtaccttagcattatgggatatctctaggcagcgccaggtttcttgtcttcatagctaagatagatgttaaaggaaggggaacctttttctatcccatttttctagtggcctttataggacttggcttaatatttttattttattttatattattaaattaatatatttttattttataaaataaaaatattaagccaagtcctatgaaggccagcagattttattttatatatataaattttttaaaatatgaaataaatatataatacatatataaatatatttttaaaatatgtaatatacatatatgtatgtgtacacacagtgtgtgtacacttgttatattattacttatcctagtatattaatggctatataacatagctgtgtcccaaatacatgtaatacatattacttttcatctcatttaaacctcacgagagttctttggtgaagatatgattaccattttacagatgagaaaacctgagaagaatagaagttaagtagcatgccaagcttacccaactagctctcattcattcattcatgattcatgaagtatttatcaaacaactactatatactgtcattaaagatacaaaaaggatcaaacataatccttgccttcaaagaagccacagtctaaggttaacaagtggactggagcggaatttggttttatcatttcaaaggcaaaggaacccagattggagagttttctggcaactgccttaggactttttggccaagattaatgtaatatataaaggtaagcatcaatgtgttggtgggaagaagtatcctagaaatgttttttgttttttactgtatctaggactcttatgaactactaattcattattaagttatttgatgacacagattattgttcaagaatttcctcccagagcaattgataaatatcaaataatttttatgatgagcagttccagaaagggttaaagttagcttctctgggacatatgatgggaaagtagctgaacatgatttcaaagggattttttaggagaaaattccaattaacagagaagtaatttccctttctagcttactaagccctatttcagactaatgcagtttcaagatcatctcccttctccccttatttcaacagatattttgaatatgaaaatcttatgtcaaaacttagctgaagccttcatcaggcttttgaaaggctaagtaagaattctgtttctaggaataaaaagatttggatcagaaagattctttgctggctagagttccttttcggatggtagttcaagcagtctttaatcatatttttgttgattatttattagtttccctgggaaatcaaagactcagtaacgtaaaatgtgttttccttaagatattttatgaatcagaacccacagtaaagaaataatgggaaatacatttcctttgctgatatggactaattgagaattaaaatccctttctctagtcattatcccacatggaaatgctgaatgacccaactggcccaattgcaccaaccacagtttctgcctagacaaaactcttatgccactagtagataaagagagagctttctcagtaaatcaaaactgcagagaactagaactaatttaagtgaaaggataggctccaagcccgctgtttgggtaaacccacactgaaccaagtgagcgattgatgaaacttaatatatgtgtattccagtcatcagcctggagtatgtgtaatgcaagcccatggtgtttgtcactgtgagaaatggaaaggcagaccttcattctcaactgtgtggggctgctagcctgtggcagctttggtcaacatcgggcttgcttttgggtgagccagactttggctggtttcctgatggaggttaggggaattgtgaaatgtgtctccttacacagatcgtcctgatcaaatgaaataaaaaggtattttaaaaataatttgcttagtgaaatacaaaggaaataggatgcatttcatactattaaggccgatatggttttgggggatacgaggtgtacatacgtgaaaaatttgaaaacaattcagag

SEQ ID NO: 83327 - DNA, 1048 bp, Homo sapiens
ctctcaacttgtaaaggtggttgctttattttaaattactctacaagccaaataaaacactgtctccaggctattggccaccagtgaatgacctctttggactaacaattaaactcagctatggaaattcatctgattactttattgtcacactgtgaaacagggattcattgtcattccagaaacagccattgagtccctgcttgtgtccacccctgtgctggtgcaaaggatgtgcccaagaatcaggcagacaatccaaagaagccacctgctcctttacaagttgttgacaattaagaaacacctagcacttaatagattctccataaatgtaggttccaactccttccattacctttgatacgtctagacctgatccagtgagtatttgagggccaatctcagtttctaagtaggaatagtgatattgttgaaaactaatgaacccaccgacaacatcacagaaatactcctatacttcttcaatgtgagtttcctgctttttgtgtcatttatcatccccttttatttgatgtctctactcaggacttaggactcgggctgtgatattgtgtatgttacctcacaattttttttctgttttttttttctttaagtgtataagcttcgtttatacttccaaaggatcttcaatggaactctacttctgtgagctaaaccagtgtcatactgcaatgaaaactgcaggtgataaacattgtctaaataaaatttccaaaaagtatttgaccaagaaataccttccccctgcattccccacttaatgcatcttaatatgccaagttactgatattgtttgacctatttggggaaatgctggcttgccaaattattgcccttgttaggaactacagtttcttgtaatttcttacccactccggcatccacacaggtatcttccaaagctcagactttattttcaagaggtctatctgagaccagtctgggtaaccaagtgagaccctgtctccacaaataataataataataataataataataataataataataataataataa

SEQ ID NO: 83328 - DNA, 1134 bp, Homo sapiens
cttctctacctcctgatttcatgtaggcgagcaatttaggacaatgagagtcacaggattttaaataacttaattcctaggtgtgtttggtacggaaacaaagataaccctgttcaacagtgaatttgtgcccctgggtgaacggccaggtgttctttcaactgaactgtgagactaatttcttcctggcctctggaaaccagctgaagcagtgggccagctggtctatcttcaatcttgcataccaacatctttctctgattcacagatttcctttatccccagcacttcctctggtatgtgcatccccgaaagtaagtgatatctattattggatttgggcgttttaaaatcattagccttctggaggggaggggagaggaaggaggctggatggttacattagaatatttccagagggaacctcactttaatctcatccacctctgacttctgcaccccagataacccccatatttgggagggatgacatcacagtaactgacaatggaattatcaccattgctctttttaatatttaaatgatacacagactcagagaaaacaaaatgagtttacatatagtcataatatccataactagagatataaaacaaaaagctatggagattcttatctagtgaagaaatctcttttagaaagtttctgatgactttcagttgcaaagcatagctctttcacaatatatcaacccactttcaatgatttgagatttggagagggcccagccatagatttacctggtgagtcacagagtagaacttgatatgagaaagcaggaccctatatctatcagcctaatggttctcagaataccaggtcatatccatcatttcttttcccaaatagctgtaacaggcatacctcgttttactgggcttcactttcttgtgttttggagatggtatgtctttacaaactgaaagtttgtagaaacctgcattgagtaagtctaccagtgccattttttcaacaacatgtgctcacttcgtgtctctgtcacattttagtaattcttgcaatctttcaaaagtatttattaagataaaaaacaaaagaaacgatataaaaataaagagaaaaaggaagaaaatttgttattattatacctgt

SEQ ID NO: 83329 - DNA, 1048 bp, Homo sapiens
taaaatgctatcaaacagcattgcatgctacagagaaatctgtcatgaaaggaagagtcaactgttgcagccaccttcattgtcttattttaagaaattgccacaaccagcccagccttcaacaaccaccaccccaatccatcagcagccatcactgttaaggcaaaacaattgtgacttgctaaaggctcagataattgttagcattttttagcaatcgagtatttttaagtatgtacatcgttttttacactatattgtagtctgctatgcatgcaatagcattatgtctaaaaaacataatttttatatgcactgggaagccaaaaaattcacgtgagctactttattgctatatttattgtggtggtctggaactgaacctgcaatattgtcaatgtgtgcctgtataagattctccatgcactaaaaaggacatttgaaagtcatgagtaagttgtagaggaactctggtgacttgaagcttgtttacttttagcagtgtgtacctgttgacacttctagtataatttatattctttctctcatgagtattttacaggaaatgcgttttcctttgctagtgatatatgcactttggttttcaggaagctgtggtgctttggttgaagctctctgtctgttttagagaaaagacttacaatgacctcctgatatagtttggatatttgtctgctccaaatctcatattgaaatttgatccccaattttagaggtaggatatagtgagaggtgtgtgggttatggaggcagatccctcatggacaacttggttctgtcctctgggtaatgagtgacttctcactctattagtttttgtgagagctgacttttgaaaagagcctggcaccttcctcccctctctctctcttgcttcctttctctctctccgtgtgatgcctgcttctctttgccttccaccatgagtggaagcttcctgaggccctcagcagaagctgatgctggtgtcctgtttcttgtacagcttgtagaactgtgagccaaataaacttctttttttataaat

SEQ ID NO: 83330 - DNA, 1024 bp, Homo sapiens
gtctgtgtgttttatgttttttattgtagcacaagttgtttaatgttctctaaaaagcattccccacaaatagcagtaaatgcctctttcctattttcttccctgtcccttgccccgaaagtaaggcagctctgcagaactagtatttgtgcccaacgaagtgggaagatatgaggctgatagccttttctctctcttcttggttggtggcactctggtagtgcttggttagcgataatggagcatctcatggctttgttatgtgtcatagtaggctattgtgtgacatagagacacctggcttttgtacacgccagagcaaaattcaactacaacatccagaattgaagagaaggatattggcaggtacatgcctccttctcaaaccagagatttatatatttaaaaagggcttttctaagaactcaatcttgattatttgttccatgttgggccaaaccagtgcattattgggaagataatgagtggcattcacccaagggtaatcctttcagggattttgatgatgcagtaaatcatgagtgtaaagcctgagtggtttatgccattaaaacctcaagatagaattagacttgtaatcaccacttgcccatgttttgtcatttatgataattatagtagtaataatccatgtattgttgagaagtagcagtcagaagcatccatcaattttttatcgacaccaaatcaagttgatacttcatctttgctgcagaaatgtagattgaaccaattagtctaaagaaattgggcagtcattaacaatgaagcaagcagttaatctacagaacatttctggcccctctgatgccaacaattcctcttaattatgtggaatatcatgagcttctttgggactctgtcaacagtgccattgttggcttacattagaaggagcatctatgtccctgcttttatttaaaagaatgcagtgccttccagcccccaccttgcactcttaggcgcttctaggcaaatgtattctgaagcagaacacttgaat

SEQ ID NO: 83331 - DNA, 1180 bp, Homo sapiens
aaggaagaaggtgggaatggttgttgaggcaccaacagtgcctcccataggcatcatgatttttttatgcctctgccatactcatagaaccatatacatttctttagtaacagttgatgcatttaatgggcatatgcaaaagttgttggcatatctaccaagtactgggctttgtccaatgtggaaggtcctcccaggtagtgatcatcctccacaattcctttacattttcctaaaaacctatctcagtgttgggcccttcaggtagaaaccaggaacacctcggtttctagattcctttggcatataggtttcctatgggaaagaaataggagagctggctttcctctttgagaatcttctgtttggtggagatttgacatccaggataccattgttaggacttccactgagatgaaagtttacagcctgatgaaacaagtctcactttccactttgaattactcaggctctgtgcatctctttccactgcacagcgtagcattttgaacacttcactactcattagcacctccagtgagagatcagaaaagaaggtggctgggaggggaggattgaagaatgcagattagtcaaattgttttttgttttatctagttagagaaacagctgaaattactgcctcaaaaaaatttggaaaattatctggcttatagtttatttctatagttattttcccactaattgtaaaaattaggagtattacattttagagtaaaataataaataaacaataacaaaaaatggctacaacagaagaaaacatgttcctggattgaagaaaccaacctagaaattatactgtatgcctcagaaatttaatactattttgtctttcctgtatgcagttggattatagagtacagatattgtctctttattaatgcatgatttataaatattatttgacactagggatatcaaagtgattgtggatcaaagctgcccatcccttcaccctggtagatgagaacacaaaatatatccatttcctatacaccatgaagacattgcttccagtaggttttcttgctggagacaaaaagaaaaacagaagcacctactgtacttgtgcactttctgttttacagtttcataaggatttttacaacataagtacatgctctatgatattacatacctttccaccacttatata

SEQ ID NO: 83332 - DNA, 1896 bp, Homo sapiens
tggaataccacaagagttcacaaaaaaaaccacaaatgataaattatacacttggtagaaagtgacatgctatcttgtgctattaacaaccaaagataattgcaacgaattgtaattgcagtttgcaacttacagtacagtgtgtccaacatcaatcttaatagtgaacaaagcaatttatattaaaacttaattcacttggtaactttccgctgtatacacgggagctaacagatgtagcttttcagaaagttcaaaggcatttgaaacgtggagagaaatgctaatgcagtaagccttggagaaatattgcattactacttgtaatgaaaacaaatgtatgtcattatctcctagtttgtgtttatttaataaaatatgcagtttgcacattggtgaattcagtgtttctgaatggatatggaataatgttctgttcagaatcaaaggccaaacaggactagcaattacgcatcttctgtaaatagtctgctgtagcatgcaccttgatgcttgagtgggttttgtatgaggtgtaacagcaaaccggggtaactttattcatgactttccttagattggatgtctttgaagcaagaaagggagatctcctggaattacttaagagaacaagcatatttgttttgtgagcttgactgatggccggtagagcagttgagtgaaatctctaaactgattagggctttcgttcaaataatcttctaccgttttcattaatttattccttaatgctattttgctgctcttctaccaaggataataatctcacactcgctgacctccatgagtggatgacctggagctcataactaatcttatttactcttctgaccagcccaacttcatttaccttgactggataaagagccttccgttgctaagcctccgttccttcgtagcattctcgttaatctacagtgaagggggaacgatgggctttcccaatcaagatcccaaagcatgctggggcactgggaacttcgtgcgatttctcttcctttcttgaaaacatgtttccactttattgttccccctttttgatttgaaaataatagagaaaaatgggggagtgggacttcaccatggtcccactctcctaatacagctatttttaccttgaaagttaatttccagccattgaccataggaatgtgtgggttaatttaggtattgttgttgagtacatgaaattttgtatcatgcttttttatttaatgctacattgtttcctgtgttgcttcataattttataattatgcattttaaagactgataatgcgttgtttatatactattttgggtttaattgttccccagtattgaagttaggttacttctacttagttatgctattaggaataatgctgcaataaaaatctctgttttcttcaattagatggtttctcttgaatataatattacaaatggaattattaagtaaaaggtataagtgtttgtatggcttttactatacattaccaaaaaaatgtctaggctgtttttctgtttgtttgttttttgttttttgagacagtctcactctgtcaccaggctggagtgcagaggcactatctcggctcactgcaacctctgcctcccaggttcaagagattctcctgcctcaacctcccaagtagctgggattacaggtgcacaccaccacgcccagctaatttttttttttgtatttttagtagagacggggtctcaccatattggccaggctggtctcgaactcctgaccttgtgatctgcctgcctcagcctcccaaagtgctgggattacaggtgtgagtcaccgcgcccggccttggctggttttatgttagtttgtattgccaccagcgatagagaagtatataattttatcacagt

SEQ ID NO: 83333 - DNA, 1105 bp, Homo sapiens
tcttgtctctactgaaaacacaaaaattagctaggcttggtgacgcgtgcttgtaatctcagctacttgggaggctgaggtgggaggattacttcaactgggaggcaggggttgcagtgagtgaccgtgccactgcattccaacctgggtgatagaatgagactccatctcaaaaaaaaaggtggctgggcgcggtggctcgcgcctgtaatcccagcactttgggaggccaagacaggcggatcacctgaggtcagaagtttgacaccagcctggccaccatggtgaaaccctgtctctactaaaaatacaaaaattatccgggcatgggggcgggtgcctgtaatcccacctactctggaggctgaggcaggagaattgcttgaacccgggagatggtggttgcagtgagctgagatcacgccactgcactcaacctgggcaacagagcaaggctctggctcaaagaaaaaaaaattacttatttttattagtcagcacaacattgagaactcatataattaggcattttgctggagaaatggctcatgtttggctgcaaatatcaaagaccagaaaaacggtaacttaaacaatatcaggatttattttccttcatctgaaagaagttcacaaagaacagggttattctggtggctccacaacatcaccaatgttcatggcccctttggtcttgaggttctgctatactttgacttggcttctggcttcaggtttccctcacggtcacaaaagaactgctgtggctcctaatggctcacctacattacaggtaggaagaaggaagaaagggagggaagggtataatgtgcctggcagctgagccaaaccccaacccctttttaaggaacttccccagaagccttgcccaacaatctctacctagactccattacctaaaacctaatcacttagtttcatctataggtaagggaaaactgagaagtgcttttcagctgggtacattgctgctctcaacaaaatcaggcctgtgtgagagagtagaaagggaagaatggatgttaggaaggcaacctgcagtttctggcacaactcccttgtgtgaaggagacagtcttcagct

SEQ ID NO: 83334 - DNA, 1171 bp, Homo sapiens
tatcactttactccctaaagatttaaaaaaaaaaatctgctttctgaaaatcccatgagtttaggtctgctgggtatttctatgcacagatgtcttcatcccagagacaagaagagtaattggatggtaagttgcaaaaagcatgcaagttctgctctgcctctggcctgagtaactgggatgtagccaaaatggagaatggtaccccctgaagcaatcgtgagttaatgtctcttacatactccttgctgaaaaggcagagagtgtactcttgtttatagtgtattgttctcactgtatttctctccctaagtccctcttgtttttttgtatcaagactgagttctcacaaacaagctctttattaaattaaatggttcatgtagcctcattatccttctcaatgtgcaatacttgatagtttattttactagcaacttctggagtttgtgtttttttttgttttggggggctttttttaaattttggcttcgggcaaagcaactagtacacattgttagataaagtatcttatctgtcagcagcacccttgtgaattaatcataattcaataggattactaatcaagatttgagatgaatgttttgatagagctatcagatttgtctaatctgtcattagttgacagtcgctgcaggcagagtgaaaacttggcaatagtagacctgtttctgatccctttggcttggcccaccagttgggtagcttcactgattatagcagtggacccaggcattgcaactaattaagttctgtttctcactctccaggatcctccctcctcctctcaccgttttcagaatatgttgggtggagttcagctctcatgaacctgcccatgtaatgaacagatttggtaacaaggtgttccttttggtcattttcacttgataacaaagatgtgccaagccaagtgacaaatctcaagggtgatatggtgtcacttgcaaaaagtggtcaaagaaaaaagagaaacttaatctgttgttaaacgatactaccgattacaactctttccatgtcactaaaatctgtgtcccattttaccaagttgtacattcttggaagtaatttatagcatatcttgcacatttattcagtttgattagataaatgaaagctagtgatgtagattggtattttattgtat

SEQ ID NO: 83335 - DNA, 1051 bp, Homo sapiens
taatcttgtcatctcagaatgatcaatattaacattgtatcatcctattaaaattaaataacagcacaaataccttaattagtaattgcttgacagtattgtcaataaaatatgattctacctggcatggtgtcctggaatctgtaggcaacacaaaggaatccagaaagatcgtactttctctcaaggcttcactttctacatgaaaaccatatgggaaaactcatttaggctgttagtgtatcccatatgttagaagtgacaactttttaatttcacaagcatgtcacaggcctcactaaatgaatgctagccacactgagagatttgtagcttggatgatttagacaagggatagttgagagttacctaattagactccaggtgtaattatgtaaggcgttccaggcagcagtgtgctgtgtgttaattaactttcatgctgaacatgcagtagcccctgaacaaagaacagttcatggaggaagaaaagcttccttactttgccctagctttagttattctcctactaaagttaacctctcacactcccccttttttctagttgagagatgggccataaacacaagccactttgcaaagtgttcattagtccctgtaactctcttcctaccgtcttccatttccttaaaacattctttggaaagatcttttaaaaaataagaggtgtatgtatttatttatgtacaactctgttactggttttaaaaatccaagtgacttctaatcctgatttttttgctgcccattaaactccacaagtatctttctgtggtgacggggagaatgatatttactgaactacaagattagctaatatcccatcaataactgagtgccacagacttcctcagttcatcccattcctgtctctaggtagcaacagtgagaaaagcacttattaaagaatattttttcttctactaaattagtccatgacttcatttgtgctggtctctgtttgtcaactgctgccaaaaatttttaactcatgcagtaaagtaagcttcgtaaatctatataattcaac

SEQ ID NO: 83336 - DNA, 1031 bp, Homo sapiens
cagaagccaagcatattccagtatcaagcctcctgtccagcctgcagaaccatgagtcaattaaacctcttttctttataaattacccagtctcaagtattcctttatagcaatgcaagaatgttctcacacacctatttaggttaaaaggttttcttatcatcttggttttcagaaatggacaaattgccaagggcctgtcaattctggactgacattttttcacctgcttgaagagatactgttttctcttaagaactagtgattttcttcagttgtgtgactgacttacataatactagcagaattggccacttagtgtccaacagagaaatgaagttgagactgtggggctgggaagtctctggggcaatagcttcaggtttgaaaagtgaggagaaatgaagcaaaaaaataaaaacactgtaccttttgtcaaaccctttgcttagatcaaggaatctagatttggccaaaaggttgaatttaatgcatacagttgtgtggtataaatttgtctttgtaaaggtcagacttgtccagacacagtggttcatgcctgtaatctcagcactttgggaggctgacacaggaggacccttgaggccagaagttcaagaccagcctgggcaatataacgagaccctgcctctacaaaaaagagacaacttaacagggtgtggtggttcatgcctgtaataccagctatatgggaggctgaggtaggagtattgcttaagcccaaaagttcaaggctgcagggaactatgatcatgccatgtactccaggctgggccaccgagcaagacccagtctcttaaaataaataaataaagctcagattcatcccattccagggaatagggaaagttccacattgatcagaactgagtcctgtaagctccaaacaatatgactcgcctttaaagtccttctgacgatacctttccaagtgtctgacttatgatgtgttccttgttgtatagacttgtacgtacctgggctatgtaagtatcacttctgagggtaca

SEQ ID NO: 83337 - DNA, 1059 bp, Homo sapiens
ggggaatgaactgagcttttgagaccaataggatggtgtgaacataagaccaggtaatagagctgttctcctagtagttttagggtcttaaaaggggtcattaatgctttcaagtcacaaaacaatctttaaagttctggaactatactttcctacaatcatatttcacatttgcacataagttagcttgaatgaatgtttaataaaaagctggctacattcacaatgttgcgcaaaaataaaataaaaaattaaagctggtctctgtaactacttatatgaggttctcagcccccactgacagtgtgtgttttagggaaggaagcacattgagtcactagcaaaacataattgggaaagtgcatcccttccaaactaatgatgtatggtcactactctaaataaataggggttgggattatccattttgataacctgttttgtgtgctgtaactgttcagtttagaaaatacagagttgattccaaatttttcctgctggtttgaaagaattcatacatctttcaaagtgtgactgatattcagcaaggaagtgccttactagttgaacaggatctgatttgtcattcttgtttttgctgtaaagcaaaatctacttttagttaaatcagtaatttacaggtatataaactaaagcatcaagaaaacagcaaagaagttttttccaagatcattcacatccagaaatgaaatgaaacccctacgaggctccttcttcattttgatggggccattgtggttctggcccctcagtttggttgagggcaacatgcggagtatctcagctgaacacagatccttcatttgatgtcctgtctaaacgtgacttcacaaagatcttttagtcagacactggatagcagaactcctcccctgggagaaaaggtctttaaggtattttgaggggaggagaagggttaagaggtctaatccataactctaaatccccatgcttggaggaactcattgacattgtcggttttaagggctcctttggagccattatggtgtgtcacgctgagacccactggagaacact

SEQ ID NO: 83338 - DNA, 1080 bp, Homo sapiens
ttctccttgcctccttcccctgaggagtgaaggaaatatctctggtatatcgttaaatacctgatagattagaccttcagataggttggtggattaaggcaaagcacaaaaaaagctcatgttttcaactgtctatcctattttaaggttcctattggccctcagtattctgaatttaccacattagtcctaatctaatatttagccccataatgttttaaacattttgaccagactcagttcccagcttccatgttgcctatctctgttaacatctctgcatgcatacgagggtgttcattacggctggattgagggaaaaccaccaaaaaaccaattcccatttcttgggcctgggaatccggggccctaacagtgagctcagaatgaattgagagaatccctctgggtcataaagatagactgcagggtcaaaactcaaaaccttgaggttctttttgcttaaaattccaaactcaatcaaaaatgagttcatttctaaaaatgctgcaatgccttctcatggtttttccacactgtaaaacagaagttaaactctagggtcagaaatagttaacaaagagagcctttgtgctaagcaggagtctgtggattgagttctggctcagccagtatatttctgtgtcatttggctttttataagctcattgcctcagtttctcttccataaatggaggcaataatattattgcatttctatcttctaaaattaccaagaggtatagatgtgtagtaatacagaggacacttatgaagactgttaactgtgagtcctttttgctatgtgagatataccagtaaaataagggacatgattgttttggtaggcctctgtacggatacaggatagctcattgaacccgatctcaggaattatagattagaaagttgtcagtctttgatttctgcatctccccgtgtgtccacttgctcccctctttcagcaaaccaactgccactgtatctttgggccacgtgaccaaaaagatggttaccaatgggttttgagttttcatgtctcaggtccaacaacctgggtagagacagaatctctttagg

SEQ ID NO: 83339 - DNA, 1131 bp, Homo sapiens
tcacccaactctaccctccttgtcacgttgatgaaactaaggcaaatgaaagagattagttttccagaggtcctaaagctacttaatagcatccagtgctcatgcttttagttaagagcatctagtgtatcttttattcagttttcttctgccatctcacagttgtgcgtatttcagatgtcattttttcctattgcctagacgtgtttcaattataagagatttatatttatagtctctcatttaataggtggtttaaattttatagactcttctactttagaaaaacatagatagtatttacaaagacaacatagaaacatggagaaatgcatatgatataccattacatggaaaaagcaaatgaatgcttatatatagtcattatgttaaaaaatatgtaaaaattacgtatgcatatatcaactaggcttgttagaatagtagtattacgtgtaactttaaattttccttaacaccatcattaaattattttagcagttaattttagaaaacatatttaatacaaatacaccctacactacttctcatcttagagctacctgaacctgtatacctaatgttcttgtgcaggaaggtgaactttctctaatgtaagccatatatattttgggcacagctggaacctttattccggcagtgaacacattgaaaatggagtcctcatagctgtggctaaagctgcattaaattatgatcttagtagagacttggccccagacaggatgacccactagaggcaataatcagaggataagatgttttcaagcatgagtagagtcagactctaggagctgggaagaaccttacctcctgtaacctgacccttgtgggcttcagaactggcagtggaagcatagaacgtttccagtgtttagaggtggaacttggctaaagtacagagagaggactctcagtgaagttccttctgctgccatagcagctgcattgtgattatgcccaacctggaaagtgcctcccccaccttcccaggagcctcactgtctacctctgatggccaaagctggggagaaaatcagtgtctcagataccatctgctatggtttggatgtgtgtcccctccaaattgcatgttgaaatgtgaccccc

SEQ ID NO: 83340 - DNA, 1128 bp, Homo sapiens
accataagccaaattaacctcttttctttgtaaactatccagtctcaggtattcctttataacaacacaaaataaactaatacatcatctgactttgaatctgccctcatgtaaatacatctgttcacatgtaaagcaagacagggacacaagagcagccagcagggcttgtaggggcaggagcaacccgagaggtgggcggcctcctgttaacactgctttctttttctccttgaaaaaggcaaactgggttttcaaggagaatgagaatttcagggaagggatcagagagagtgggcactacatgtgccacatctgtcagatgtcttcaaaccattaactcccagaccccaggaagctgctgctctttctagcattttctagagcatctagcagagcactaagtggtagtggcttaatgatataatgttttgtgaactttgatgaggagggagattttctcaagagcaacttcagaggtgcctatacttctctgtttcagagtggatatagaggggtggaagaaggaggccaagatactttgctttctgcaagaagctatagagatcaagaaggaaacatagggatggaggtaggatttctacctatgaagagttatcaagcatttaagtcctatagggcccatgtggcccattcattcattgaccagtttattcatccactgatgtttttcattcaacagactactactaagcatcttcgactatgctaagtcctgagcagacagtgaagaactagaaagacatggccccgccctcatgaagattacaagttaggcctattctccacacttgttctaactcaatctgctacatataccttgagtacccagtatgcgttaggtactaaaaggagctacaaagatgaaccagacacagtcttcaagaacttcagggatcagggaaggtttatcctgattgtaatccctccagaggttttgatcatttctctaatcacttattaggcctcttgcttcctgtaggaatttgttctctatattagattgaaatctgcctgttctaatttcaacttcctttcttctggccctggctagtcctcagtgtacagaattgccattggtacctgctggtcaaggccaagtgttgt

SEQ ID NO: 83341 - DNA, 1063 bp, Homo sapiens
actattctccttaaatttaagaatattgtcctggaaagatttaaaatgactaagggtactattactttatcacagaagaatcatgctgtgttagtccattctcacaatgctgtaaagatgctatctgagactgagtaatttacaaaggaaagaggtttaactgagtcacagttcctcatggtggggacgcctcaggaaacttacatcatggtggaaggcgaagggaaagcaagacggcaggagagggagcacagggggaaaccaccacttttaaaccatcagatctcgtgagaactccctcattatcacgagaacagcatgggggaaaccgcctccatgatccaatcacctcccaccactcccctcccttgacacctggggattacaattccagatgagatttgggtggagacacagagccaaaccatatcacatgttaaactttaagcaaactctccctagtagacccacctagcgattcaaagaaatacatggctatgaggattccgttgccattttccttatctcatataggtctaaggaaggaagatttccactgtttagaccggaagaccctgaggacagtatcctttctggctgccctgctgtcatatgagtccatagggggcaaaggtgaggctttcctgggcttgtgattcccaggatgtctccacttctagggccacattagctaaatggtaattatgaaaatatccagggcaagaagctaataaataagaactgacaggcattgcatagtaaagaattgttgtgcacgctggctcttctgcaagacacacgatggaggttgagagtgtctaacaatcctcctgaaacgtgctgcccgatgtgctgatgatacaaaaggaaacctgctcgaatagaagagcacgggagaagatttatgtcctgcggatggctgttcctattgtcgtggatccctgggatgtttctgagagctttcttgtgaccttcggtttctaaatgtagaacctggctgtgatctctgggaaagagaaaggaatatgtcctaggtttgtccaatggtatcaggaataaagaa

SEQ ID NO: 83342 - DNA, 1562 bp, Homo sapiens
cacgtttctccctttgcaagtatctcagggttagaagtgtctaaggatttgagactgtgattctgggaggttcaggacagttgtcctggctgggcctgagccaggctttgccgtggatctgcccacctcaagaactggcacaggtgataggtagtcttcaaatctacatggcatcccaatacagttggtgacaatgcactgtattttcctcccccctcagtttctgaggacccatttctgagatggaaagttcttggccctggcctgtagcttacatcactttggtatttttaaatgcccatgatctcaaaagcagtcctcatattaaaatcaccctttatatcaatacttcattttatgtaacatagtgttttaaaattatatttaaaaggcagcttcttttgtcttatgtgcccttggctaggaaacaaaggaagtctcttttaagaggtgttttacattttatgactactgagagagaacatagttctttaataggtagatatctaagagagtttcacattataggttttcagagattagaagttctggaacaaggttgtttgataacatctctgaagggcaaaggagcaaacggaaacctcagaggactggatgccaaaacagaacactctctagacttgtgggcaacaggagcttttctgagatcgtattattctcaccgataatagcatcctgccttgactgagggtgagggtgtgcaagatggatcattcgtgtcttatacttcatggttatgggcatgtaatatgttcttcattgagccaggcaattgacagagacgccagtgcatttaagacttgagtctactggaaatgagacttgctctcttgccagaaatggatgcttttctgtgtccaccactatcagacatcttgacttttttttaatcctgactcttaaaacaataatatcaaacaactcgagggggaaaaagttaaatatttccatatgaagagctgattaaatttgtatggttttcttttcagtaaaaattgatatgtgatgaaacacagtgcagctggatggctggtttgggttgatgctgtcacatcctctgatctcgctacccagctgtaagggccagcacccggtgagctgccatgctgctcagaatgcccattcccaggcactaaacaccaatcactgattacctggctgaagtctttcctcttaagtctcatcgttcttctgtgtgccttccttttcaagggcaggctgagtccatgtggagcattatggttgataggcatgtgatgcccatctaaaatacggataataagaggaaagggcttctcaattattggtgtggatatgagaacttgactttttttttttgagacagggtctcgctctgttgcccacgttggagtgcagtggcactacctctgtctcctgggttcaagagattctcctgcctcagcctcctgagtagctgggactacagatgcatgccaccacacccagctaatttttgtatttttttagtagagacagggtttcaccctgttggccaggctggtctcgaactcttgacctca

SEQ ID NO: 83343 - DNA, 2800 bp, Homo sapiens
ccacccaggttcaagttattctcccacctcagcatcccgagtagctgggactatgggcacgggccaccacgcctggctaattttttttttttctgtatttttggtagagatggggtttcaccatgttgcccagctgggcaaatggttattttttaaatgaccaaaaaaaatgagattattttaatgctttgtatgctcgcccgatatataaatgcaagtttcactgtggcttgagtctgaacatggttggtagatgtgagtcataccctgggcccagctgcgtccaccaacagaatacttctaaggagcaccaggaagataaagacatcagcccaaaacgctctaatatgttgctggtgagcagtaaatcacagtggtaagaacacatctccatggggaccctgctatcatggcccttctcatggctgattctttagaagactcattcccacggcctcttcctgtgggtgacacagtgccctggacatgggtggtactgtgtggttgacatagggcctgaaggtgggtgacagatgttatggaggagaatttattttattttattttttgaggggggagacagagtctcgctctgtcgtcaagactggagttcagtgacacaatctcagcccactgaaacctccgccgcctccagggttcaggtgattctcctgcctcagcctcccaagtagctgggactactggcacacaccaccacgtgtcagtagtcccagctaattttttgtatttttaatagagatggggttttgccatgttggccaggctagtctcgaactcctgacttcaggtgattcacccacctcagcctcccaaagtgctgggattacaggcgtgagccaccacgcctggccggaggagaaactccagcgcagtaaagaaacagccctgctggtactgggtcctttaccctccagagtggggctcaggaagaaggaacaggaccaggtaccaaaagccccagtaatcccgtcaagaggtgcccaggtttagagatgacttcaaggaggaggaaagcctacacactctttttccatctgctgcaggccacagtggcaaagcaataaaatgctgataccatcctcctgcaggtataactgatttaagtggggaaaggcagacaatctgtgagagacaccaaagattacttggcttttccccccacctcctgtgcatgaaccggagaatgatggaacaattggttgtgtttggggcctttatttgcttttttccctcctctctttaaaaaataaataaataaataaaaaatctgcctttgtctgctgctactgtgtctatttttgttgtggtggtggttgttttaaataggagaacttgtgaaatgagactgcataaaagatggacttgttttatatatgggatattgcctgtccttcagatctatgtgtctcgcttatggaatgaaccaaagtaggagagataaactaatattttgtatcagctcagccagacaatacagatgataaagatgtttcatcttcttatgcatgcagaaaatatgaaaaatcgtagtttacacacatttgctcaattcaagtgtaaaattgggcccctcgattgccctgggccacagtggctgtgttaaggaagctcgatttaccttgcagccgagtgaaaaatgatcagaatattagactcatctagcccacattaaggagccattgcatttcccgacaattgtatgctatctcaatatgaaaacagagcaatttcaactcatatcaggttatgatcggcaattacagttgcataattcacctagtcatctctttgcagggcctttattttccctcttggtgacattcctgagaaagtgcctgataaaaatgtcatatatcatcccagctttagaactcgtgagggggtaatctgctatgccttgctgagcccatattcatcactggatttttgacttggaggggtcatggcactcataatttcctgtttgatattgtcctcaccagctctgacaaggggctgtaaaagctcggttgtaggcagtggttaagcgctgctccagtggggcccatcaccagcaataagagtgcattactgtggctcatgctggagttggccgtttcgaagataattagatttgatgtcaacatttctttatcacctgcatccttttgtgcatctgtgtgtcaagttgttctttccggatttattagcaccctcagagctactctctatctgtcagcttgtgtgctgtttgtgttgacagttgtaaagttaattactagtactaatgagcatcgggcttttggtggacatggcgttttggacatttaaaactataattagtttttttttgttttttgttttttgttttctgtgtgtggtgcttcagtacaaaataaaacgtgttttaaaaaaatacgtcccttccattgcattttgacattctgtgtgcagtcaacttatcttttattcaaaggctccaaaaactcagttctgtttctttttaaaacagacttccttttcattgtaactccatgaataatttcttttgttccttacttctcttccaacttgataacgtgaccatttcatatgccttgagaattaaggatagtgatggtggaatgatcaaaaaatgtgctgggtaaatgttcatctctgcccaatcggtggactacaaattttccacttttaactctcctcttttcaaatcgtactctgggttcaaccgaaagactcagtgaatgaagaagattggataaaatgaaaagtgtaataaatcgttctctgagtggctggc

SEQ ID NO: 83344 - DNA, 1043 bp, Homo sapiens
caaactattcgcagagaaaaccgggccacctcttggacctttctgggaatggaaaaattattttggtgataagatgtttccagcccactgttagggatcatggcactgtgcccatcaacacttggtattaccccagcctccttggagtcctcgtccccatctccctctgacctgagtaactttgaggaactttagtatatttggaacccgtatgccagcagcactgttggaagctatcaggaggacacctggtaactaactaacttactagctaacttactaacttatacagctcaactaacttatacagcagagctgtttagactagccacttttgcacacagtacttctcttgatcctcctaacccagtgagatgaatgaggtagatattattggtcccgccttgccttggggacactagcatctgaggagttaccactactagtgagtgttgggaccgggattccccatagcatttttgctgtcccaggagactttcatatgcattgttttcctgggtccttacggtagtccatgcagtaggtgagacaggtgatgaagttttggtctgcaaatggggatgctgaaactcagagaggctgactggctttcttggggacatggcagctgacaagtgacacaactggaaacgtatcccagcccttccaacttttagaccgacaccctttcattacacgaggactaactccacaattatgaaaatctcaaaaacaaagctactctgaagtctctatatagctttgcccttcatatgattccaaattcccatgccagtgaagctgcagttccggggaaaatcccgtgaaaggaaagtcttctttggctagctattcagaccaggccagggagggcttagcagtgtgccctacacccagcgcatgtgctcaccagcccattggtattgaaggtgctaacagtctggactcagatcctggcactgcccaccatttgctgactcatgtcccaggcatttgcaaagtgtatgggctgtcatacagaaatagagtggatgtttggaaga

SEQ ID NO: 83345 - DNA, 1138 bp, Homo sapiens
agcctacctaatctagtgattacaatcagacgtaggaaggacatgatgcagagtttaggtttgcatatttatttaaaacaccaaacaccaagcaaatactaataatattggaaattatacgttccatggggaaaaacaaaaaggcaatagagaatctataccaagagtgattatatctgagcagtagaattgcaggttatttatattttttctctttgggcatttctatgttttcttaattttcttttgtaattagaaaaaaagaagcctattcataagtattatttttttttaatggaaagattagttggattggagctccagaagatccctgtccaccaaagtgaatgcattagccagggttgaaattgactcactggccatgctaatctctgccccaagggaagtgggacagacatcactcctatcattgtgcacctgccagttttcattttgtaaatccagtgggggttgtgctagcccttgccgctgaagcagacatacaaaatggttaggaagaagggccatggagtcagataagcctgggtttgattattggttctttctcttgccagctatgactttgagcaggttacttaactttctctatgccttggttttttcatctggaaagtggatttttgacaacccatctcatttaacaggttatctcattaaatgagatagtgtatagtaagctcttaacctagtgcctggcatctagtaagcaatcaatacgtgttaattatcattactggcatcgggcatctgtagagcaatttcctcttcaaactagactcataatgagaattagcctaaacacagtctgcagaatggtcatttttttctccttaagcacaaatgagactcagttgagatctgccccagtgtctaatacatataagattttctaggacatcctgattttatatagcattctttgattaaaggcaattcattttaaaatgtatatctaaatggaaattttttgaagattttaaaataaataaatatatgtatgtatcaggagaaaaccttagaggtctttattcacgattctgaacatatgatcaccatactgatagctctttgacatagaaggtgctcctccccacaccttctatccaaagcaagtatt

SEQ ID NO: 83346 - DNA, 1018 bp, Homo sapiens
acttgagtccacgtttactgttattatggctgtaggtttagccagtaaggctaaaagagtggacaaattgggtgcctgcatgtaacaggccatcctggacattgatttttgaaggttcattagataaatgctgacatcacagattgatgtctctttaaaccagtacctagtgcaggaccgtctggggaatcaaaaatattgatgtaaacatgtttgagtagaaggcccactggagaattccactgcctaaatgggatccatcaatttaggctttctttaattattctaattctatgcatcacatcaataggggagtttgtctgcagaaccggtttttatagggggtgccgcccctacgttaggggcaaaggaaggccggacaaggtatccacatctatttttcattgttgttttgagttgctgtttagtaattaaaatttttgatcatagactaattttcccataccatgtggccgtgcgattgacaagggactgattaatgggctgaccccagggccaggaggctgctgggctcttctcttgtggaaggcatgccggcaaaataaagttgatggttttgtttgtgtttaacccttcaccttggcactatcaatagattgaagacatcatttgtatctgcaagtgtttctttaattaagacctcctaaaaatctttcctattgattcattccattatcctattgattaactgcagtggatcatgtacttggtcttcagtggaaggcaacagcctcagccgtctgtcatgactacagatgcagaccacaggcagccagcagccagcgcccagggctggcaggagtgtctcgcgttctaatgaggcatcagcggtggctcactgaacaccacagagaaagccagttgtctcctgctgaaggggtggccaagcataaagcattccttccagttatttatactgcagccacttagctaacagtatgtacggggctactggcagtcttgagctgggggaggggaaggattctgctgtgcatct

SEQ ID NO: 83347 - DNA, 1049 bp, Homo sapiens
taattgtttcaacactagagtttgtcgttactgttgtcctgttatgaagaattctctttaacaaaactcatgggaaaagggactgactcatgtgcagtttggcctgaagcatttgcgtcagtattctgctcctggaagagtatactttgacttatgcattgcttgcttaatagaccacaaaagtcaacatccctctggaagaacagctcgtgcttggaggcgtcacaagctccaaaagatcctgttaaggcaggatgtagtgtgaaacccacaagcgaagcaaaaccccgtgtcccctaattataatgttaatatttaagaaagcttcagaggctgcctctgtgctttatgcctaaaaaggagttgggattttttttcccccttttgcttttcagacctggaatcgcatcaatattttttttcaacaaaagaatgtgtctcttgtccccaggtatggcaagggtacaaagaagccaacttgtagaggggagagagaagaggtaactgacagagtcagagcacgttggaaagtgatacgagaacaggggcttatggttacagccctaccccctttccaaagaaggcgattagatattatttcagatagtttctcactgtgtcctaatttcattttccagcaaccctgtggcaggtccccagtttttcttggacttatgtgattagctaaactagccatgcaggtattggcattacactcacagatatgaaatccagcctgacacccaatcaggacacattcttgagtggctgtgtggccccagagtctcccactgtcttccacttatgcacagtgtatctaaatagacactggccatgttcagtccaccctaaacccttgtgtcaatagccaaagaggaatcagatttgaagccaaaataacaagcactatatataaattactaaacgcccccaaacactatggcattgtttggagatagggcatgtgtaggaatagtaggaggcacctaatcagaaattcaaaatgaacagcctcaccgaacagatgggcagagtctatggactttcct

SEQ ID NO: 83348 - DNA, 1022 bp, Homo sapiens
gggcggggagggctgctgagagggggtaatggcatgacctgccatgctgcttcagatgcctgggagactgggtctgtgccatttgcatatgtcctctgtacccattcctgatgaaggatgcaattgactcaactcaagcaggtcaaaatcacttaggcagaaaatcccaggccttgggaagaaaagtcatgtgcctcttgggcccttggcagaagtcaaaggtccaaggtaatgtattggcaaagatcctgtctgctttggtgccttacttactgctccctaatgcttttaggtggaaatattgtcaacgctattgattagttgatctgataatccagcaggctccctgatgtgttaaatttcctacttttggaggactataagtatgggcagagtgtatacttctgtaggaaagaactctcagtggaccttgctaagacactgcttctacagcgagattgctacaggcatgacaattccaattattcttttggctgtgacatttaacccttcccaagacaaattttctatagttatccattttttccagccttcctttagattttggaaaaacactttgtcttctgcattgggcctgtagggtctcttgatttattagcatggtttacctgtacgtttttagatttttattttttagtttattatgagtacattccattatctagatctttccctccttcacatgccctccatggccaaaatcatatttgcctttctccttgtcttttaccatctttaaacattccatcagccatgtccctcatttttaaagtatatagcaacttcatgaaggatatataattcataatgtgtagatatcaaaagaaaaggtgaccttaggccaaggcagtggaattttctgtaagtaaggagcatagagatgatatataaacatagtgatgacaaataagcattgaagtttgtttgcagattgtttgtttagagcttggtctggaatagcaagaaacctacataccctccgactcgtctcgctgtagttg

SEQ ID NO: 83349 - DNA, 1138 bp, Homo sapiens
ctatagactgtagatacttatgctgtaagggcctcacagtcaaaagaatgaaaagaagaaaactaggttttgtcagtcatctgacataataatagtccttctagaaactggaggtaaaaacaacatttgcttctttcctctgaaatgatttggaatgtcctgcatatttaaatttgacaagaatagctgactagtcaatggacaggatccattttagtccaaatggaaatccatgaaaaagatggaacggagtgaaaagggcagccagccagatgtccaggggtctgacccgccctggctcacttgcacaccgttccatcaaaccttgagtaaggcagccctcactcaaactggggatccaaatacctacccctgccatctctcctagattattaggaaagtaagaagcagtgctgtggattgacattattcgggacatttaaacattgtacaaaatgtaattgttattttaattaggagttgttctcctctttcccactgaagaattccctcttaggagttcatttctgttatctcttcagtggcccatgcttggtaatatttctccatcaagttctagtctgtgtgtgtgtgtgtgtgtgtgtgtgtgtgtgtgtgtgtgtgtatgttacatttgcttattctgatgaatctttcagcagaaaccatttctcctgaaatctttatcatttcatcaagagtaatggaaatgttacctgtcctttatttgttgcaaaatttagggacaaggaagaagaccgtgtatgttttcttaaaatcaatggccagcacattactgtaaaacctattgattaaaaacacaaagtataatgttagtcatttagtctgtgaagtgatgcaataagggaagaaatttatcctttgacttttgcattaaccttttattgactgcttgcatacccataattaacacacactttagctaaagtggttaattttagcatggtgaccagtgttcactaatgtagctgcaatcccgatcttctaaatgtaagtgcagccctgggggaaatcagcgggcagtgacgcccttcatgagttacaccttggtcaggaggacctctagacaatctgctagcagccagccaatgtgacacctttcggctgcttcctgtta

SEQ ID NO: 83350 - DNA, 1095 bp, Homo sapiens
gtaatagtttctgcagagataggcatcgttctttgtgaagccagcctttgacatgcttagcgtctcatctgtgatatgtgtctctggatgactgtactacctcaggacagtgagggagggtcttatcctaatttcagcatgaattaacttgccccccacaaggggctcctcccacagtgggagttacctcaaaggccagcccaaagacctgtccttggaactgccaagagtttagaaacactggagtcgagttgcaagccaccctgctaatacttcctatttctcaactacagaatggccagttgcccccacagctgcaaggagatagcaaccagatcattagattggatcccaaagaacattccaatccattctccagcaggctttcattgaacaccctcacctcctgctacatcctgggaggaccctggcccagataaacccactttagtagaaagaaagaacacaacagaaatagcacaatgtgattcataatcaaagactgactcagaaaaggagacttcagttagcaggaaacgtgtcataaggccatattctggagtacatttgctctgggaatttgtaacacaatcttagaattccagagctggaaggatcttgaaaaccaactattctaatttcttcattttcaaggaaggaggctgagatctcaaacagtgatatgacttgcccaaggtcaaacagcttagtgaggtcacaactgggcctggtgcttgggtttgctaacttctggttcttcatgtgtatcacggcaaaactgatgctgtgtgcaggagtcggctcctgaggctttaaaggaaggagaaggattaatcttacctgaactcactggggcttaagttggctggaagcagcatgagcttcctctgcctctgaagacccaggcctgactcatttgtgactggatcatttgcctggcaagccagcagcatcctggctaatctctaccctctccctctccccttcagtccaccagcaatctcccttacacccagctctagttggtgccatgcctccactcaggtccttccagtgactcccaccaccctcttgggatctgctaaagttagtgga

SEQ ID NO: 83351 - DNA, 1006 bp, Homo sapiens
tacttatagtaatctctagggtactacacttagccgagaaaaggttgtaattacattatactgcaggaagagtttgtttctcaaaactcccgaaacattggctgtgtcttttaacaccttcacagttttccagccccttgttctttctcccacctcctccctagtttttggtcaaaggtctccttgttgttttcattttgcaggatgtggtttgagcctagaataatgacccatcttggacgcaaatgacgcaaatgaacttttagagctacaaatatctgggtggatttctcctcccctggggcccccggtatgtcaatggaaggatgtaaaaacagggaagacttgacaatccccgcccaaagggaaatatgctttgcaaaattggtggaagccactgggtgttcatgcaaaacacaatagttagttttttgtttgacaagacaacaattggtattttcccttttataactactactttttttttttttgaattgtatctgtgagggttgatgacacttcaatgaccttaaaaactcttgccagtgataccaattctaactggtgattttattatcctccccgcccccactccctgcctttgaattaaatatcaaaataagtcattctcttgcccttccctgaatgatgaagcagtaaataacctcaaagtccaggggatgaagctaaagttgggccagtggtcattctcttaaatagggcttccattgcttctgcaaagggtgaatcaacatcttaatgaatgggcctagaagatgaaatagcccatttcagttgctttaaaataaacaacttattttggcaatgacttgtggcacattaattgctatcagtgagggggaaagtatgtctcagagcttttctggctcatttttaagagacgcttaggagcttggctctacagggaaactctgagtgaggattcctgtggtcagctagggagtaaaggtgggtgcagggggcttcttagggctctccaaatact

SEQ ID NO: 83352 - DNA, 1057 bp, Homo sapiens
taggggtttaaaaacaatgaccttttattacttgagattctgtaggctagcaatttgggcatgtcttaattcagcagggatagttcatctttacttcacatggagttggctgaggtggatattctgggctggagatcccaggttgcctcattcatgggacgttggtgctagctgttacacagggcacctttgttctcccccatgtgacttctctctccatgtggtctcctagcattcgataacctagactgagcttcctttcatggtggcaagagtgttccagaaggagaaacacagggtgcaagacttctgaaagcctaacttcagaagttaaacaacgttacttctgccatatggcaatggtcactggaagccacagggctttccagattcaagggaaggggaaaagggctccatctcttgatgggagcaatagctaactcatattacaaaaaggcattgaggatgagaaggatttttgcaactatcttcaaaaccatctaccaatgtcctccctgtggtcacaacaatcacatctctctggcatgcaaaatgcattctctcctcatgcacaagtcatatgctattataacatcaggtagaagtccaagatatagtcagataaatcagggccagatgcagatgaaattcctccagagaaattccttagagagctgtaaagtaaaagttttctgcacctctacacccaacatacaaaggtaaacattgacagagtaactgcaatagatatttcctttcaaagaagagaaaaatgcaaagcacacagcactcactggtccatagcaattctgaaatccagctgggcacatgcttccgagctccatcctctgggagcatagaatattatttaatcatgacccagtacttttccctaaaacaggatctctaattgtattttcttcccagcttttgtatcagctctctgagctcttggctgtgtcctctgagggccttccttcttcataagaattggctcatatttgcagttaagtacctctcccagcacgcttactgtctataaaaagataggggccca

SEQ ID NO: 83353 - DNA, 1043 bp, Homo sapiens
atgtagtcttttgttgtgtgagcaaggaggacagctgaaagtatttggtgaacagctaaaatgactatcataaatcccaaatctacagaactcaacacagaaaaagtctgtgattcctccaggcaaaatgcaacctgtatccaggaaagctggaagtaggtctcagccttgtgagcataactccatgcaactactttcctatgccaatccccatttcctctccttccttctccttctcgggtttttcattctctcaccccatctattcctgagtgtgcaaagcacttttcagcctggtgatcttaacagccacgggttagggtgtacaagggaaagggagctctgactcacagcaatctgaagtgtctcctacttcagaaatcaacagtgtaaatattccaaagctcttcactgcctctgtgctcctaaaagttaaaacgacacactctaaaatctatatctggcaaaggactggtattggaatatatgaagaactcctccaactcaaaatcaaatagacaagacaacctaatgttttttaaaggacaaaaggattgaacagatagttcacagaagatatgtgaatgcccataaacacatgaaaaagtgcccaacatcattagttgtcagaaaaatcttaatttaatgtaaattaaaaccacactgagatactactacacaactgccagaagagttaaaactaaaaaactgacaacactaaatgttggccaggatgtggagcaactggaactctcatacgttgttggtggaaaggcaaagtggcccaatcactttggggaaaggcgcagtgcttttcttttttaatatatctgaacataacagccaccctatgtcccagcattcccatcctaggtattcacccaagagaaatacaagcagatggcctccaaaagaattgtgcaagaatattcatagcagtttaattcttaatagccaaaaatctggaaatagcccaggttttcataaagaggagaatggataaacaaactgagttatggtcatataatggaatttgggaataa

SEQ ID NO: 83354 - DNA, 1185 bp, Homo sapiens
agaagctcaccatcttgcagtgaaagttgtccatacttgcttatttctaccagaataatatatattttttcaaataataagaaatttttttagaacttttttcttttgagcattttgaaacttatggaaaatttccaagagtagtacaatgaattcttgtatatactcttcaccttgattcaccaattgttcacattttattacatttgctttctttcattctattatcccttatggatcctgtgaccttctacccataaatactttcacagtataattatcgaatttgggaaatttaacattgatacaatactactatctaattgacccatattcagatttcactaatgatcacagtaatgttttttacagtatttcctccaatccaggatttaatcaaggcttacccttttcatttgttgtcatgtatctttggtcttctttaatttggaacagtttttttttttcccctgacatttgtggtgggtccaggccagttgttttatagactgtccttccaattgggtttcactgatgttcgcttgggattaaagacaggaaaatcccagagtgatgctgagttcttctcagttcatcacatcagaaggcacatggtgttgccttttttcaatattggtgacattgccttccaccgcttggtaaaggtgatgtctgtcagtttctccactgtcaagttttctctttgtaatgaataagaaatctgtagagacatactttgagtctgtgtaaatatccattgtaagataattagtagatcttattctaaatagagcaacaccattctttacgtgtatggagtcccaaatcatattggtggtagttaagatgattataatacccattacaattcagtcctactgggaaaatagtggtgaatcaaacagatagggcgttcacatctaatttgtctactactaactaagtggtttaacatcttgaggatgatctttcctattacctttagtaaggagtcccttcctttggcggtaccaacatgtaaatttctgcaggttgtgcactgcacaagaacattatttatattgcggacatggtagattttgtacatttatcttgacagttttcagcaaatgaaaatgaagcatcttgagaaaagggagtctttttctaattttcacaaagtacccattgactgtagatatggga

SEQ ID NO: 83355 - DNA, 1013 bp, Homo sapiens
caattttatacactgctgttttttgtggtctgcatgttctcagcttcctccagatcccatttttctatttgtttaggtcttcctctttcatattgaaggatctcctcaaatgtcttgtagtcattagctgtaatatttaagattacattcttaatggaaagctaattagatcctctgtgtccatttgtggagcttggtggtggatgaatttcactgccatatgatcaggtggcaagccaacattagctatttctatgggggggcttcccactcctggatctaaaagtttgggtctcaagagatgaactttccagtctccttttggagaggcatctcttagctgctggtgttctggaagcagggaggaaaaaagggacaggaagctcatcattcagtatgcttcttttttaagccctgtgtgttgctccagcccttctctatgcttgttatccctaaatctaatccctaaattagagcctctaatttaatctctcctatccaaacagtcacctggatgcagaagggagagtaggagatctgggaatctgactgctgcagacaggctttaaacctttctctccatgtgagcctcatcccccatccaccccatacctggctccctgattcctgagctttgaggggccatgggcttcattctcattgctcctttctgcagaatttatattctagtttcactctgtaacaccaatatattacttctctacccactttctgccttctgaaatggttttgattccctttaaaattattttgatatcctttatccaggtacatttttattctctttttctttgtacagttgtactctttttgtatttctgggtaataacttcagggtgttttaggaaagaggggagattaaatgtatgtagtctatcctccatagttaatttccaactagatgactaattcaaattccttgaatgtttgattggttgatgactctttgcttgcttacaatgctgtcatggaaggatttgtttatttcatcc

SEQ ID NO: 83356 - DNA, 1032 bp, Homo sapiens
ttagagaaactacactcgactttcaactcggctgtaattacaggcaccgtgacgtacataaaatgcaggtacttactcacatctgcagactctattgagtgtaactattagaagacaaacttcattttgcaaactgtaatttaatggtataacagtgtgcagaccagaatatcagttaattttcaaaacattttattctacaccaattagctcaggtcctggagggcaaaatgacaagaggttactcgttcactatgtatttaattaattgaaaaatgctcaaattgcttttacagttgttattaaaaagtagaatcagtgttgccagtgctcaaccataattggaaccccagggaattaaatatttagcattagtaatgtaacagcacttaggacacaaatttctattttcgtaatgaaagctatacactgtgagtgcaagcggctgaaacgacagctgtgacaagtgaaatggcctgggatatttcaataagacacctcattggacagcaagtcttaccacattactagtttgtaagagatctgcaagtttaattcccaatagaaacccgttacccaagtatttagatttctaattgcatgcaggatgaacaattgggcaaatgtcttgccataagtggctgaaatgtatagtgcttgctaaataatcctatataagttcatgcctttgtcaatttaaaaatagcgggactgtcagggaataaagatcttgtttgttttaagtttaattacattttaagcataaatgctctcagtgctacagtgagaaaagttggatattgggctctaatgagctgcaggggtagacggctagagaccctaagggattcactccataaattaactggataaaagtacttggttaggatatagttgatggctgagctgttcttaaaacccagctatagagctgtctctcactcctgttttcattctaaacaggccctgtagagacttaagtagcctcctgttacaactgttcaacttgtcaaaatgtattatattactcca

SEQ ID NO: 83357 - DNA, 1042 bp, Homo sapiens
tatgtgtcaatagtttgttcccttttttttagttcagtagtattctgtggtacgtgtgtaccacatcactcatcaattcggacttctgggttgtatctggtatttgattattacaaatagaagtactatatatatattcgtgtagaggtttctgtgtgaacataaactttcattttcctgggacagatgcccacgagtgaaaattgtgagtcatatggtaattatgtagagtattttttttttgagacgatttgtttatgattttaaaacataaaaatataagttgtagccaaatataaggaaggatttttccacaatctagactttattcttattttagagaaatacttttgaaaaaattgctttattggcaaacaattcctatgtaaaggaataaaagacgcatatactctaggaaagatgttgcaaagctgacaggcaactttgagaaagatgagggcagttttccagtgttactggagacttgacattcaaggatgtattatgatagtttctgaattgatagattctttagcgtttgtcactaccctcaggcctgcagtttttatttgtagaattaactcatctttacaatgctttgttgagtgctgttgcagaaaatgctcatgtaattcaattatatgcagttaggaaaaagaagtatctttttctagtacatggcccctaaaatgatgactttccacaatgctgaatggaggaaacagctctgtttccatcaaactctggtggaaattatacaaagttatattatgctttatgagacatagtgaggtagtacacaaccatatatgctatattattggggagacccactgaaagaattttcaaggataatttttgctctgattttctatcatgtatattgactttattgattgattgattgagatggagtctcaccccgtcacccaggctgaagtgcagtggtgcaatctctgctcactgcaacctccgcctctcaggttcaagtgatcctcgtgcctcagcctcccgagtagctgagactataggtgtgtgctac

SEQ ID NO: 83358 - DNA, 1067 bp, Homo sapiens
ctgcagttgtcatttacgtaatccatttttctagtcttttctcaggctaatgatattccataccttgatacagcttttatttgtttatttgccataatatggagtgataccttcgagaaaattagatatttgaatctaatatcccaaaagtattacttagttttctgtgtttccttaaacagaatcatttccattttcggtgcaggtgttaagtgtgatgcttccataatacatttggatgctgtcagctaagttcacttctgaactaaggggttcctccaaatgttggctgaaattcatcccaaggctggtctgcaagtgagtgtctgcacacagtttgcttgtatgtggagtcgatccaaaatagcatcaatgttggttttaccaaagtatttattattgataatagaggctaagtacaaaatgtagagaatgtcagctacttgaggcctttgattattaaaaattttattaatgcattaaacaagagtacagtaaatagataaattttaggttcatgaaataaaactgaataatttatttttacttactatttatcatggaattactttgaataatttatttttaatggtataattggacagtaaaatttataaactcagtgcttttcataaaaatcaaagtgaagtttgtaatattttatacaaatagaattattatttaagagaaataacctgtttatgcctaattacagtttttaatcatttcagttacctatttcttttaagaataaatttagtgggaatatcagttccagtcatgggtaccaaacttttttagtgacagagtacacacaggtatgtaaaacttgtcatttctcatcaaatagaggctgctgaatataggcaggtaagaaaagctatgagaaagaattgttttgcagaatatttgtctagttgtcagagcaaggaactgaatttattgacacagaacattttattaagtaaaaaaaatggttcttataacaaaaaaaaaagctaattttacagaaggcagtagttaatatagccgccaataaaataaatgtttctctgaatactttccga

SEQ ID NO: 83359 - DNA, 1058 bp, Homo sapiens
tctgttcccacaaggccctcttttggagtatgagatttctttcagaatcagctggaagacatggattaacctcttttctcccaaataatgtaggaacacaatacacagagcacttaagtcattgcaaggggtcgcggaaccccgaaaaccaaacattaggagaaaggggtgcctggctcttgcctccccggggcgggagttcgaacctcaaggccagagcatcctccttccctgcaagtttgttttccaatttggggtcttggtttttcgttcctgcagtttctctcatgttcagaagggctgcggaggaagtcgggatgggctagggcgagagacctgatgaaacaacctgccgagaatgggtacacagcagtcggtggtgaggggcgccctaggctgagacactgtgggctggatggctggactggcgaggttgggaagggctgtgtgggaggaggccaggccgggcagggcgtcccggccacgccccgtccccaacgcgctgatggatcggcttgtcaggagagctctgtgcgcggagcccatcagaaagcacttacctcgctaaactgaaattactgtcttttcaggggctaatttgtgtaactcccatggaggggcttggagggggtttgatgaggcataaaatgatgattaatgaatttattggccgctgctcatcaaacaaggactggagagttcgcgtctgcacccgcggcctggcggcggtgctcaacacaactggggttcagtctccaggggctcagcgcctgcttgagtttccccaagtgcccggtcctgagtgctttccttagctgcttcctgctggcggtctcccccacaaccccatcctaattcggggcacaggctctagctgccgccatcgccccctgcgaaccagctgtccaggcctgcggggaggtcggctgcaggcccatggggacaatggcttctccaggactgagtgtgactgtggcacccgaggcagcctagagctgggggactggagttgccttcccaaaatgttatagtttaccgggttggtacttgggccttcg

SEQ ID NO: 83360 - DNA, 1049 bp, Homo sapiens
cctgcccaagggggctcacagctgaggggcatgtgctggtgccatcagcttcatccaactccctttgcccctagcccatctgcccccttccatgggaggctcattagaactctggaatctggcttcctgggtttgaattgcagctctgatacttcctagcagtgttggcttagggaaatttcatcatctctctgatctatttcccatccatgaaacgcggtgctattcagtccctcctgcacaaggctgttgtcaggggtgggtgagatgagtctaaagatacagtgcctgggactgagtctaacttaggtgtggttcattaaggtcagcgtcatgtcattgcttcctggtggtagcctcagactctttgctgcgccttgacccgtatccctaaccccacagccatgtccactgttggtgggaactcagaaggtgccccctgtgtcttccccttcactttcctgggcaacaaatatgagagctgcaccagcgccggccgcagtgacggaaagatgtggtgtgcgaccacagccaactacgatgatgaccgcaagtggggcttctgccctgaccaaggtacgaggccctggtcattggacagagaccctggacattgcccttgcccctaaacttgctccaaaaaccttcctgagacctcacccacttcaagcatagacactgccccccagacacccacctacccagacccgcccacctgggctgagacaatgcccatctctggtggagccaaggtccctgcttagatcctgcccatccaggtggaggcacagcctccaaaatcagaccctggtagaccagatgctgctactcacctcctgggtaagaactggccttcctgaggggtcactgctcttgtcttccccttcagccaccctccaggcgggcttgtgactaccaaaattggctgaattctgagcacagattaccagagagacaattctcctaagagacattcccactgcacaaagaggtgccttcaaggagctggtaggcagtagaagaaaggaaaaaaggaagagcctcatgct

SEQ ID NO: 83361 - DNA, 1031 bp, Homo sapiens
tatccccactcttcttacctcttcagagaggctgaggagctgggtttgtagagctcatcttttatagagagacataaaaagccaggaagcaggattttaaaatgaatggggttttaagtagaaaattcgcagatactacttgttctgttcctttatagcacacctgtcctgatactgacttggaaagagacaagaagactttggctgaccccacttggaaacaataggcactaatcccaaaattgtgtattgatcccagaattctcaggaaaagaaaaaaaaaatcaatacatgccgcttccagggttctcagccttactgtggggctgtcctcaaaagtctgcatcactgggtcaggtcttgacttctctctcatctctcttcctgtctttcaaccctctctcctccctgcaaccctcagggtacagcctgttcctcgtggcagcccacgagtttggccacgccatggggctggagcactcccaagaccctggggccctgatggcacccatttacacctacaccaagaacttccgtctgtcccaggatgacatcaagggcattcaggagctctatggtaaacctccgggcgggggttgggggtggagggtgaggaggggggaggtcatgtagcctgggatggaggcccagggggtgggaccagcaagatctcatccagccaggagtgctggagacgagggcaggaaatgggagtgttgacctggtcttgggaaggcagagcagctctccaaggggatacttggataactcttccctatccgaacaatgctaatatccatgtcactcttagcgctccatttctgggtttctcccattttctaggtgagtaaggtcacctggtgcaaggttacacaggtttgagcaacccagtggagtttagaatccaggagaatagccaagtacaggacagaattttccatcatgtggaatgaccttaacaatacgggggtggaagtttctagttttcataataagctttgatttttagtatgtagtagaaacagaacaac

SEQ ID NO: 83362 - DNA, 1093 bp, Homo sapiens
aatggccaaattactctgtgtatgggtggtgagtgactgcagagtagaaagaggtggtattcttcatgctatagataaagatcaccactcagttgactaaagactgaggtttaccctaatgccctagttccctggagaatggcaggcagtatctaggacctcattaaagggtctgtccttccattcttctatcatccatccatctacccatccatccatccatacctatatctttccatccatcatccatccagccagccagccatctattatccattatttatgatccagccatccattattcattattcatccatttattcattcatagagtatagtagttgagaaaatggactctgaagccagattctctgggttagaattctgtaactgctacttactggttatgtaatcatagacaagttaattaagtatcttctttgtaccttggtttcctcatttataaaatggggctaatattccaacctatctcctagggctgttgtaaggattagatgaacttagtgctgagaacaaaaacaatgcctgacacagagtaagtgtattcatattagctattgttattgacaaataattgtttggcatctactgtgccaaatactttgctaggctttagtagctggaggaggaagaatgatgttctcgggacagtggggtggggggctgctagatcagtgttctcaaagacaggcgcatgggcctcctataacagaaccatctagagtgtgggtattaaaaggtgggttttctgccccagcttcagaccctcctgactggaactctggggctaggccccaggaatctgcgttttagcaaattctcccagtgattctgatgcacattaaagtttgtgcatcacaagtccagtttgagaaataggcatggagaactgacatggcaagatgaaagaaaagtgatcgcagaggtgttaggtgcttttgtgagcacgtcccagtcaaggaaggcttcacagatgcagcagcatttgagcagagccttcaaaggagaagcaagaatctgatgggggtgacaagttaggaggttctttgagacagagggacctgcagagcca

SEQ ID NO: 83363 - DNA, 1030 bp, Homo sapiens
tattgtctccaccacctggctcccacctcccccaatccaccgtaatcatgggtcccggagaggacaactgctggctcctagggcacctttttgcaaattagcaaaaggtgcctctttatgacagcaaggcccttagagtgcacgacttggtgagcagagtgtgagctggatttatcccccaactcatgtccttgaccaggcaccttctgtaattgacttctaaagccctctgtgtgagccctgattctgggcactgcaaccaggagtgagcaggaagttgcactctgttgggaatggctgcagtggggcccgtggacagacagatgatgggaggaacaggctggcctagggcatgtcagcaccagccaacacaccctttgcttccaccccagggaatgaatactggatctactcagccagcaccctggagcgagggtaccccaagccactgaccagcctgggactgccccctgatgtccagcgagtggatgccgcctttaactggagcaaaaacaagaagacatacatctttgctggagacaaattctggaggtaagggagggcggtgggtaggacagcagcacagttggctgcgagagacagagaagccgccctgaggcttcaagcctcctgggctgagttcagaggttggtgggctctggatgccctctctctggtatctaacctctttggtctctggcacctctgagatgttgccaaaggtgaaccattcttgtacacattgctgatataattctggtggaatatcctttctctttgcagaattcttttgattggcccatgtctggtctggaccctcacattttgaaatgactcactgaagaagggggtaataaaaataaagataataactgctcctattgacactatgtgtcagagactgtcccaagggttctatgggataggaattattattcctcccattttacagatgaggaaacctgggttcagaaaggttaggtaaccgtggctgggcacagtggctcacgcctgtaatcccagcactttg

SEQ ID NO: 83364 - DNA, 1033 bp, Homo sapiens
cttaagtacctactaaatatttatgagacatggggatagaggctctgcatgtgctgttttatttaatgcatgcattaaattaaatacactaaattagacacaaccccattttacagctggtaaaactgtagctgtatggaaagtggttaacacactgtttggcatgtagtaagtgctttataaatgttagcagtaatcatgagattgtttttatggggtcatccaaagtcatataattaaaagtggtagatctgaggctcagactcaggtctgattccatgcccttccttccactgcagctggctgcttccctgaagggctaggtccagtttccgaggcctatccaggagccatcagctgggtgctcccatccaggccaggggggaagtgtcctttagagaggccctgctggttcactgtgtctgtttctttacagatacaatgaggtgaagaagaaaatggatcctggcttccccaagctcatcgcagatgcctggaatgccatccccgataacctggatgccgtcgtggacctgcagggcggcggtgagccacccaggactgtctccgctttctaggactccccgcccctagccagggcccagctccttgcaaatacacacttctttattgtgcagggcaggcaggcaggcggcgcccaggaaaacaaatcaactccttcatcctagtgctgggaaggtttccagatccctgacctctgctccttggcctggctccaggcagtaagacccagaaagacttctcacagctgcagggcctggagccagggcaggggagggcggaaggcctgggccaggggagaaggaacatgggctctgtgccgtggattcattctggggtttgatccaggcccatttgcgttttgcaggaggcctgtgaccacctcccattagcagaaggatggctccatttgagacaaggcaaactttgtcatgctctgttgctcatgtggcaaagatcctccactcaaccagtttgcccctggccccctgctgattaaaacacaaccagt

SEQ ID NO: 83365 - DNA, 1050 bp, Homo sapiens
tggtcttgatctcctgacttcgtgatctgcccgtctcggcctcccaaagtgctgggattacaggcgtgagccaccgcgccccgccacagttgagttttttttttggcggggggacaaggtcttgctctatcacccaggctagaggcacaatcatagctcactgcagcctcgaactcctgggcttaagcgaccctcccacgtcagcctcctaagtagcttggactacaggaatgtaccactatacccagctaatttaaatatgtttttcgtagaaatgggggtctctctatgctgcccaagctggtctcgaactcctgggctcaagcaatcctcctgcctcagcctttcaaagctctcttctcgtttaaaagcttcttccctatgccaggcagaaattcaaagttcccaggaaccttctgtgtgccagaatgtcaggataagggggtcacggtctcttctttctctatcccaggtcacagctacttcttcaagggtgcctattacctgaagctggagaaccaaagtctgaagagcgtgaagtttggaagcatcaaatccgactggctaggctgctgagctggccctggctcccacaggcccttcctctccactgccttcgatacaccgggcctggagaactagagaaggacccggaggggcctggcagccgtgccttcagctctacagctaatcagcattctcactcctacctggtaatttaagattccagagagtggctcctcccggtgcccaagaatagatgctgactgtactcctcccaggcgccccttccccctccaatcccaccaaccctcagagccacccctaaagagatactttgatattttcaacgcagccctgctttgggctgccctggtgctgccacacttcaggctcttctcctttcacaaccttctgtggctcacagaacccttggagccaatggagactgtctcaagagggcactggtggcccgacagcctggcacagggcagtgggacagggcatggccaggtggccactccagacccctggcttttcactgctggc

SEQ ID NO: 83366 - DNA, 1024 bp, Homo sapiens
tggctttttcctgaaaaattgtgtagcaatagatctttggtaaattgaagttgatttttcgtgtgttaggaagctattttaaaaaaatgttctactgaaaattgcagtattatgagtaatggttactcctacttatgtgtactgtgaattcacgtaatcagttttcaaggtattcctaaaataaaacaataatcttgtagcatatcccaaaggtttaatgtcaattgaggaagaagacctttagggagaaaattacatttgcttccttttgtatttttgctgcttagttctgttaaattaatgaaatgtttttagttgtaaatatccacttctttcaaaattagaagctaagttctaataaattgttttttaattgttctctttgatttactcatttaaattttccatacaatatgttatatatccagtattattgctgtggttgctttagccaaaaaatggcttgcctgtaacttttcatttgttttaaaggactgttacgggctgtgcaaccagttttggtgtcccgtgtagatccggattcccgaaaaaacacaataaatgaaataataaagcgaacaacatcaggaggagaatggccccaggtaaaacatggtagatgttaatttaaatatagtgggagtttattaattgtatgtatgtagacttactcatttggatccacagatagcaatatctgtggacacctatactaggtattgttagcataatagatgcagagtaaatacagtagccagtattaagaagtcctcttccccatgagatactctatggaattaaatgtattattcttttttattctccaaactctttgaaccaattttctctttgtgttacaaaaatttgattctctaactctaaatttaattaccactttatagatgagataggggataccttagtatctattaccattatactaaagtatctcctatttcatattttagaagcttaattatataagctcagttatactcaatattgtggtgggtaagtgattaag

SEQ ID NO: 83367 - DNA, 1095 bp, Homo sapiens
ctgttactacctacctgtatgtacttgagaaaattaaacctttctaagcctgcattctcactgacaaaaatggggataatgacagaaaatttatagagttttgaggagtaataaagttacttatgtgctggcacatagtaagtgttcaataagcactaacttttactttctgtctcatctagatgtttctgttcttttgggaaggaagcagcaagcattgtttaaaaatatcttccttcttttgcattttttctcttcgaagatttaaaagaagaattacacaaagaactagaactgcacatttgttaagattgtccttttaaaattattttctgttacaaggaaaaaataaaagattgattatagtgtcataattcttcaatcttcctcatcatttttttagtagaaaggaatgtgcttgatgtagtcaagaaaaaatgaataaactagctttagtgatactgagaatctatgtaagtgactggctttggttgatggatgtcttaaatagtaggctgaagaattttatatattgcttgtatgctaaggaccaagaggaagtgggggactctgggaccaaaagcacaaatgagatgttaacctgagaaacatgtcgcttagtctcctcctcatctgggacaggatggtgcaaagttaagtatggggaaggtacagagaatactgtatttgaaaggagaggggagtggagctgtgaagccaatttcaggtgcaatagaagggaatacattcacataagctgtcttctttataaagttgaaagtgaagtaccatttgtacctcacaagagtgaggtaaaagtggaattgcaacttgaaaagcatggaacatatgtaacatttttagcatctctcagtggtccctaacaggaatatgaaggcaagatcaggagaggtggctgaggatgtgtgattggcactgtgggcatggcagaagtgaaagattctaagtaacaggtcatacagaagtatccgactcccaagtccagtgtagatagtcagggagatgttgccagagggagtggataaagagggatgattgatccagatgtgaccattaggttgtcatggtctatgc

SEQ ID NO: 83368 - DNA, 1016 bp, Homo sapiens
atatgaattcattatcagcctgaaagcttcttgaaagcaagaattgttatttcatctttaaaaacttaatacagactatggactcactaagtaatgtttagatttaaaatatttgctttcttattttcttctcatgaataatttattattccactacaatgttcttcttttcatatacttttctttccctgagatatttgagataattgttagttatacaagtatcctttaaaagattaaatgcgggccgggcgtggtggctcacacctataatcccaacaccttgggaggccgaggcaggcggatcacgaggtcaatagatcgagaccatcctggccaacatggtgaaaccccatctctcctaaaaaatacaaaataaaagattaaatgcctgcatatatgttgaatatgtgcttttaagtacctattttattctcctttacaaatttaacacttaaaatatttttctcccagatacattaataaaataatgatcataaaatgtgcatgtgaattgtaaagggctaataacatgtatctataattctttgtttgtttagattagattgggatggtgttcgtaagcatttggatgaatatgcatctattgcgagttcctcaaaaggaggaagaattggaattgaagaattcgccaagtatttaaagttgcctgtttcagatgtcttgagacaactttttgcactctttgacagggtatgttaaaatttaatctttcacatttttactctgtcagtcctacagtgagtaaatcaatatggtaggcaatttgaaaaacttgataggtcagtgttagaagaatcaaggctgagcctatggtttaattgcatgattttgtttttttctccttaatagtaatattaataattgtgtgtgtgtattgtaacatttattatactgtcatatataataaaatatcatatcatatcatatcatatatatatctattattttagtgtaatatgatataatgtatgtatctattattttaaatacca

SEQ ID NO: 83369 - DNA, 1049 bp, Homo sapiens
gcatgctcataggtttaagaactggattgaaggattactacaagtcactataagtctgacttatagtgattgttattaatttgtgggtattctacatctgatttaaagggatcactaagactctttattattgactaatctgtctagctcttgttactatcctcccatagttgtaagtagtggtgtatcattcatcttcacagatgaaaggaaaagagtgaggaaattgatttctaattctgagctgtagcctggcattagctcactttctctttttaccaacaccattatgtgcatcatagattattccttagtaaaatttagataggtgattatgatttccattctgtaagaaatttaacaatggtcatgatttttcccatttctgctcctaacaagtacttagttcttctggcattactatgtactttgtttaaatactggacaggaaaagtttgtgtatactttagcactttggcaatccagccttcttagctattgtaaacttctgtagatgttttattactgtttcacattatgtggaatgaatgtgtttctttattccaagtttttcctgtctgccctgttcttgttcttggtattagttcaagtgttaaatcttgagtgccaataataacaaacatccttgcctgccccttcctgttacagaatgtagggtgctgtagtgtgcaggttttctgctcatgctgagagttaggacagggcacttaggtggcttaaatgactggaaacaaacagtaaagtcttctatattttaagtttccagttaacgttttatatgtaatacagtatttcataattcacatgaaaagaaccattttgattccaatcccagttactcaggatttgctatatgaagtctattccacaacttatatgatacaatttgaaaaaaaaaaaaaaaaggctacaactttctgagtgtgacacataaacttttctattcagttgtataagctgccttgaaagtttggttctatatgtctgagtatttccctattcaattctcaggttcacttagctcctcc

SEQ ID NO: 83370 - DNA, 1022 bp, Homo sapiens
tggatgatttataagattccttccagttctaaattttgttattctgaatttggaatcttaacagtatattgatttactaatccaataatataatctctcagagtaatttccatgctgctttttccttcatattactaggatgaaaagattcatataccctctcttgtgatcatcaagattctttgtcattcaaaaccactcgtatgttaatgaaattaggggtccagaatgttaccttgttctgtgactagtggtaatgttaagagtttgtcacatttctatttctccatctgcaaaatgacttaatgatgcttcctgacaagtgttacacatagggtttggtagtatagataaaaactggatatctcacaataaagatacaacataaattcaaaggggtatttccaattatacagacaatctatgatagtaacttcagtgtccagaaatcattcttggatctgttcttaagaatttctatttaagacttctatgttgcttagtggaaaaagctaattgcagaagaaatgtatctatgttgagcaataaagccatggttcaagaagctcctcaacctctaaggttcagtaaaaacagccctccagagtgcattagaaaattaaatggtggtggcaaagaaggaaatgatttcctttaatactctgccttctctgaaacatctggagtgatgaaatgtagatattggcgctggttaccatggtgtatacatttgtcaaaacacatcaaactaagctgggtgtggtggcacacgcctgtagttacagctcctttggaggatgaagtggaaggatctcttgagacaaggagttcaagcctgtagtgcgcttatggtcatgcctatggatagccactgcactccggcctgggcaagagagtaagagcatatctttaaaaaaaccaaagaccaaaaaacaaatcaaaccgtacatttaaaatggatgcatttggttgaatgtaaatgtaatcaacacaaataaagctgattaaagaaaaggaaaaac

SEQ ID NO: 83371 - DNA, 1021 bp, Homo sapiens
ttacaagtgcaaaacaagagggaagaatacattcccaaaatgtgtgttctgttctgagagtaaaggggcttcatctaatcagtatgtttaaatatgatactcccttttagttctctcaagtaaaagagaaacttcatttctctccttgtcttgctaagctatgtatattggctcttgttgtacagccacgtagtttccttgcttttgtccagcaagagagctgcagaccttctctgtttctgttttctactcatctcttcctgactttcttggagaagaatgtctccctgcaattccaagaaggctttcccccctctattatctagaaagactttcttcttccaagagttctttcttatgtcttagaggccaattgggataagccttaggaattttcatgtgcactatcattgacagaagagcccctgagtttactttttatttcagattggtttaaactgagttaactgccaggcttataaagaacctaaatggttgatgcttagcagatggtcataaggcaagggccagactttttccaaagtttaaaaccttcagcttttacagacttattcatcataaaacctaaaattacacacatagctaacttattcttctgatctagatatttctgtttctgtttggggattgtacgtgtaattatcagtttagttgagcaaatggtcatttttggtttaccaatgaaagacctgatataaaatttggcccttaatcacagtaattacgatttgaaagaagctgtgagatttttgtctagcctagaccttggtttggggaaggggaagggaagaaaggagggcttaaaactataattagctttttttttttttcagtaagacaagaattatgctttacattggttattttttaaccctcctttttaaatgtgttttatgttttggaagtatttttgcatactttttatttagtagtatccttttacatataggattcttttacatacttttatttggatagcacttcacagttaatttcccat

SEQ ID NO: 83372 - DNA, 1008 bp, Homo sapiens
actctagccatactggtcccctaatgcctccatcatttacaggctggtccctctgcctacagatgtttttctcttcctctttgcttggagaatgccacttctcaggtcttagtcccaacaaatctgaccccacagaccaggtcagatcccctggtacatgttctaattgcacccaggaattctagtcacaggccacattctacatgtcattaattaacatctttgttctcttatcacctatatgcttctaagggccaagaccaggtctggcccaaggagaaatgccaactccagcctcagctcacagaaactgctgctgccccccaaaatggtgaaggtctttatttcatgacacacctttctcctctggcagcacaaaacaaaacaaaacaagacaaaaacagaaccctgctaggcaatttgagtctgtgcccagcctctagcccatatgtggcttgtaaaactggagaaagtgcctgttgctaaggcctcccagggtttcatctggctaccctgggaggctaggtttcccagcccactctggaacccaatcaatgtatagaggccccagattctgggctgggtccctgcaagaactcacggtgtgtcctgggtcactcagagtgtgctgagctgggccagccctggtctggcttcctggccttctgttgatgaaaaagccaaattctgtaaaacatttgaagagatttattttgagccaaatgtgaggaccatgacccataacacagcctcagaagttcctgagaacatgtacccaaggcagttgggttacagcttggttttacacattttagggaatcataaaatgtcaatcaatacatctaaggtatgcatgggttcagtctgggtggggaaaagggaggtttacaggttataggtggattcaaagattttctgattggcaattggttgaaagagttaaggtaatatctaaagacctggaatcaatagaaaggagtgtctagattaagataaggggttgtggaa

SEQ ID NO: 83373 - DNA, 1044 bp, Homo sapiens
gtgaccactttgcttgatcattagaaaggcagccaaaaatccttatcaaaaactgctgcctgaagttcccatcactagaagctcttctgcaggagttgtttccagagacacttattgacatgtaaacgtatgacatgggttttggtgttttactgctttcactccactatcagcttatctgtacccactcaggctgagtgagtgtcaggagacaggtagctgttgcgtaggggagacaggtgttgacttaaccctcaccctctcccacgtagtttctgagttctgagtttgcctgagaacaggacagaaatgtgacgagaggatggggaaggcaggacgtgctgatttctcgagagaggcaaggcagcctacatgagtcctgggctgcaggaggctctaggaaccctggggcctgagactgaggtccagggagaccctaattcctgcaccccacccctcctggttccctccagatgggaggcatggaggctgtcatcacgggcctggcagatgacttccaggtcctgaagcgacaccggaaactcttcacatttggcgtcaccttcagcactttccttctcgccctgttctgcataaccaaggtgagtaggggctgggctctgggtcacctgggggcctctgaggccgcatttcaataaagtcaaacattcctagccttagaactggggctgagctcagggagaacaatgcaggatccagcatcctcaattcagcggcctgacccactagggttaggcccagtagtcttcttccatctctgatgctgaggattccattcagccctgttaattgcttattgacttgaggggcagcaaaagtccctttggaacccatctaactctttattggctgaaactgaggtgactgtaacgtcaatacaacagcaccacagccctatgccctgggttttcaaatagagctccgagcaagtgggacagggggcaggtaagagttgacagacacaacaatcagttcccacgtttgaccaaagagggcctcttggcttcttctctccctgtgcca

SEQ ID NO: 83374 - DNA, 1049 bp, Homo sapiens
aaagcaaaaatcaaacaaaatctggctgagtttagtggggtggttggggaaggtacatagaccctcctcttgcccaccctagacagccctctcatgtctgaacctcagcctgggagttagatttatttgtctctaaaatgaagtcagtggatagatgctttgagggattttgagtagaaacattcatagttaattttcactctggccaatctgagtttgatgtgtgtgttctggaacattcctccagcttttggtggtcagatggcccagagatatgggggacaggaggaagagggtaaatgaaccacagtgagcaggttctaggaggtacctgcatcagacaagctggtggaggccacgtggcaagccacatctactgaggcctcatgctgctcttgctctgtaagacacggagcccagaaacccatctgcacttcctgagacctgcctggggaaacgggggcagggaccaagtgaggcctcatgtgtgtcttcaccgtgctgtcctcacaaggccaggtgggtgcccaaagggagcctgacaggctgttgtgttaatttattgttcttgcacacctgcacagcctccctctggggatcccacctggagtggaccaggggtcttgagaaatggagagttggctgcaaaaactctcatgcactagatgtggcaccttggagggcagggtgagacaagcagcccagaaatactctctcaagtggaggggagaattttgagagtggatggaacagtttggtggtttcagagaatttctaggtttctacttggatctacttctgatacaaacttgcacttggtgccctctggtggtgtttagttttagttccgtaagagaaatgattcctagtttgctaaattggtggcatctttgggaggggtttctgtttatggttagagtctcttacacccttgttggagggattcttattctgactgtgggagctcctgttgcgggatcttgggaaaaaataaagaagccgctgcattcgcacgtcaagaaggtgctttgcctcaaattggggtgttg

SEQ ID NO: 83375 - DNA, 1002 bp, Homo sapiens
agttttcgttcgctccgtggcctttatcagtgtatttatttacactctgcataggccgtgttccatgtaatctacccacaatgcggatttcaggccccacttgccgccgcccccttctgccttagctatcagtttcccctcctaattaactgggggtggatttgagtgatggttgaaaattaaaacaaaatgggatattccttcccttccacactttctcaataaggagcctcgcccctcctttccacttgcaggctcgcttcttgccctatccactcggcagttcctggtgatcccacaggcaggtttgcttggggagggggtggccggcagcgaaggggtgtgcgccctccgggcctcctgtttcggttggcctgtcagttcgagacggaggagttcgtttagaccgtttagcgaagattccacgtcgctttgctgtgacaccttcgtgcacacacagctcctaattaggggttgctgtgcagtaaacaaaaatgattatttttcaacttgacacaatagccgaaataattgcatcgcgtagggaaacaatggaaaataaaaacccctttcgtgggaaggtgggagtgggagacgaagcatgcttgcggtttcagaaccaagatgcaaaaaatcttggatgtgtaacaggcatgacaagcgggttctaggcggcgccatgatggtagggagtagcgactcggagacaattttcccatctgcttgacatgttcttatttttattcgagagctccctggggctttcttcgcagagccccccttggctcgccgcacccttctgagccaggggtaatttagcttggggcttctcttgagcttgtgcaacccaaattgatggggaggcggggcctggggaattgccctttgcaacaaggtgcatgttgcatctgtctggagcccttgcagatctgtaaatgcaagccgcgccacccctttctcccgaggggggacgttttaaaacttcagaagtctgtaatcagc

SEQ ID NO: 83376 - DNA, 1723 bp, Homo sapiens
gtatcctagtaacaaatttttttgagtcctcccttgcagagatggtttttgagatggccacttgactgagagtcactttgagtcaggagaattctactgtggatggggccaggcccgaaaatctaggtggcatttatagaaagcagtttccaacttccttgtgcaatacaattggtgaccaacctatcaggccatatgtacaggttaattaggaagctgtgttgtttcacctggacagatgaaattcagcagaaagccctctttaggttacaccctgtgataacccagtgatttcctaatggggggctgcagtctaatagctcagcacattggattgagaggaagaatgtggatattcagacatcactgaataaaactccttttatttagcatttccagaagagcaaagagtcattccattgagcctgtgttctcatccttgttgtggtgtgctaatttgaagaaactggcttccatatatttccatagtaactgaagtgaaataataaaggaccggctggcaattgctgtttagaacaaagggttaacatcttcatcagcctaggaacattgcagagatactgacataaagttcttctgcttgataagtgttgtaaggggaaacgtgcatctgcttaagagataccagtttagagtgtcatttgaaaagcctgattctcagtacttatattaaaatttttatttgaacatagtgttttgggttcccccccccttgtgtgtgtgattgtgaattcgtgtgagggagctctgtgtcagacaatccaaaatatttcagtactgagaaataaacagtgataattgagacagcacaaatataattttatacataccatgtgtgagtaatcagtgactctttttttgcatggcattttaaataattttgcttgttagggggttgtgacctcacctgtgatacagcctcatcattttgtagtcagtcaataagactctgagttattcagactaatcagaaaatttttaaagaattgtcaattttatttaattgccaaacccttacaaagaaatcccataacaagttgtaattttatgaggtgtagaattgacagaatatcactttaagtgacttcccagttctgaacaaatagtgacacccacttggaccatgtacctggtgaaaatgtaaaatggactgcggaattgctctgggagccacagtttgccctcattcgaggtgctgaattttctgtaatgttgagttcaggctatctgtctctggagcattaagtggaatttttagaaagggagttcgaaggtggccatgaggcattgcatgctagctggtagtctttaccgaaatgggcacaataaaatcgagcactttggttgtgcgtccattcccacagtacctgcttagtgccattttaaaacaaatttaagaatttgcctgatgaagatgtcattgctcatacaaatattccagcctgacaagtgggatgtgattcagagaacagaccctaccctgtcaggaaaggctgtcttaaaaggtcacctgtcaccaaaaagctgatggctttttcctcccagctgaccctgactttgtaattagggtatctactgtttggtatgggttcagggcaagcttgcagtcttcacttgatcttagccaaaaggctgagaagcagtcaagcttgcattctttcagcacaatgctcttcagcacctactaaatgacaggcattaa

SEQ ID NO: 83377 - DNA, 1032 bp, Homo sapiens
cttctaatatgtagccttttcagattggctttttctcttagtaatatatatgtaaggcccctccatgtgttttcatggcttgacaacttattttcttttagcactgaataatattccactgtctggatataccacagttgtttatccatgcacctactggagaacatcttggttgcttccaagttttgggaattatgaataaacctgctgtaaacattcacgtgcaggtttttgtgtggacataagtttttaaatcctttgggtaaataccaaggagcacaattgctggattgtgtggtaagaacaggtttagttttgtaggaaactgccaaattgtcttccaaaatatatagatatatcatcttgcatttctaccagcaacaaatgcgagttcctgttgtctgcaacgtcaccagcatttggtgttgtccgtttttggattttgtccattctaatatgtatgttgtggtatctcgttgttagagaaatttggatttctctaatgataaatgatgcggagcatcttttcatatgcttatttgccatctgtatatctcctttggtgaggtgtctgttaagggctttggcccactttttaattgggtcatttgtgttcttattgttgaattttaagagttctttctatattttggataacagccttttatctggtcttttgcaaatattttctcctaacctgtggtttgtcttctcagtctctggttaattgcttcattttttgaattgcattttgtatctgtttctggtatatagaaatacagttgacttttgtgtattgatttttaaattgatccaccttaattgttgtataattctaatagttaatttgtagattctaaggcccagagaggggagtgatctgactaggttcctatggctagctagtagcagagcaagcatgaatgtggtcctatttctgctgacttccaaggagagaatattcaggaagggttagggaaagccaggtggggagtaggaaataacatttattgaacacctgttatttacaat

SEQ ID NO: 83378 - DNA, 1040 bp, Homo sapiens
gctcggcaggagagattttcggcagataaaatgagagatgacgagacctggtgaacttggggcccaactataccatcaccgtgatacttggctcggtgggccaccagcacttgagcagggcatgtactctgcccctgtgagagcttgacagcaacccgctgcccagtacttcctgcctggtgtgaccctgcctgcccccacccagcttcttcccttgcccattgccatgtctctctctatgctggaaccacactggtcttccatccgtgtttgtaagattttgtgtgtgatctctcactcatctccaggcctttgtccatggtgtgccctattcctggaggcatcttcaccctgctttttgcttggccaaaggctactcacagcccatgcctcagcatagatgtcacctcacggaagccttctttgaacccatagaccgctggtgtttcaattgcacattgaacagaccgcccctcactttacactgctccttctattatcttttcattgtgggcatgcacccacacattttttaaaatgtgaaacacaccactttaggggaatatgctcagttggagctgttcttgccctcaccacacccaccccccaacccagctgctcttctgagttggcccattgtggaaagaagccattgcaccctaggaatatcatggggcatgaccacctaatgtcaaggacacgtgccaacggacatgttagtgcaccccgggagtgtactggtgcccaatgaccataccttttccatcccactgggtcttgtttgaaaccaccacattgggtttaggtctgctattgttaacccttcctattgccctgccttcttggagctccaaagaccttctggcagtgagttctcacctagccctcccctctctggcaagaccctaggtcagggaggaaggtcctgtgtggcaagaaagcctgtcaggcttgggaagtcaaggcaccccattgcatctcttctcctgcttaccattctcacagcagaaagcttcttgggggagtccttagtttgtcag

SEQ ID NO: 83379 - DNA, 1062 bp, Homo sapiens
ttttagtagagatggggtttcaccatgttagccaggctagtctcgaactcctgacctcaagtgatccaccaaagtgttgggattacaggcacgagccaccgtgcccggcccaggacttgggttttagtctgcccatttacacttacggctttgtggtatttagggcatttggctccttgggactaatttcatctgtagcccatctggacacttataaggtctcaaacaatcctcgtttcaggtgccctttagaggatggttcaaaaactttcacatcagcctcagggacagagctgtgctgtcattccaagggcttctggctccactgaggctgaacacaacttggcagccagtgaaatctttctggacagctgatagtgtcccccatctccatgggagccagctaaggtaggacagggtgctaaccagtaactttgctgtgctaggctgcccctgacacaaggcagccacaggaaaagccattatatctctgtagagcaggatgtggcatttatgctgtctcattggaatcagggcttcgttgtctgtttgtttgaggaggattgagcaaaatctggattggttttcctaggcaagaaatgccaagtgtcatgatgtcagggttaccaggtaactgagtagaggaatggaatatatgggtggtgcctggaaaggggagctaatacgtgttcctactacataccagctccaggcttggcacttttgtgcattgcttgccatggtttactgcaggtatgacttgcccagttttacagaagagaaaatggaggttgggaggtggtgactctccctgatcacccagagggaactagcagaaattgtttgggctctagctagttaaatatgagcttagttcagttgccaagtcaacatctgtgtgtgtgcactctgttgagatctgatggggctggagccatcttctctgccttctaatgggagggtggagttcattctggtggatagggaatcaataaaacaggggtataaaaatgatagccccatccattagtaagacagtaagcatttattgagtgtcttctg

SEQ ID NO: 83380 - DNA, 1142 bp, Homo sapiens
ccagtgtaatcttacaatggagatgggatctcttcctcaggtgtgtctgaaagccacctcagcagcctccagggaagtgtcctctcattggtctcagctcagtgtgtggagggctcgggagtggttagaggcaggctcatgcagacaccattccctggaatgtgcttgtctgtatggtcatggaaggattttttctgcctcctcacatccaaattcagcttagtagactgttattgggcacccgtgctggtgccttgcctctggtgtctggctggggaggcagtgtgaacaccagggacttcacatcccagggtgatagcagttttcaaccactttcctagaactgcttggtttttgaaccatggtgctgtttaatgcttttattgagtggtgggtcccatatgtgtatacatttgagcatgtcagtttgacagcatttcttctcttgtcttgaacttttatctgagcctcatatcagaatcgaatttttcccatttctctcaacctttgccaagtcctccatgtaatgcctacacaggacctgaagaggaactccatggtctgatttgggtttaattggttggtcttagatttcccctccctctccaggctcagggtgcctcatagctgggcacttagggtgacaagcttatgagctatagagcaggctggggtgtttatcctcgtgcacagtcacgaggagaaggatgcttataaaactagaacaggatgagactctgtgggatatggtttgatttgcctcagctcaggaagcccaccccgatggagaaggagaaggcaggtagaagccaagggaatgacagtcaaggccaggatgcctccacagggaagagtgctccttccaggaggtggcatcagcaccgtccagctctctctagggctccgtactctctgtgtacatggtggcccaggctttacttcctgctttttggagtgggacctcgagaaccaagcagtcctgccactgcagcccaagcggagcatgcagttctttgccacaggccttacagcgctctgacgctgctcccatggaacttttcccaaccaattcagagcactttgagggccacagtgatgctgggagcctgtgttgtgagtcccactgctatccagggaaggcc

SEQ ID NO: 83381 - DNA, 1111 bp, Homo sapiens
ataaggggaggagaagaaggaagatgaaaaaaatgttaatatttattgaatattcacccccaaatcatttatagattgaacataatccctatcaaaatcccaggtgccttctttgtagaaattgacaagctgattctaaaattcaaatggaatttcaagagattcagaatagccaaaacaatcctgaaagagaagaataaggtaggactcacacctcccaatttcaaaacttgctacaaagcaatgataatcagtacaacatggtactagcaaaagaataggcatctagatcaatggagtagaattgagagtccaggaataaacttatacatctatgaccaactgatctttgacaaggatgtcaagatcattcagtgaggaaagaatagtgttttcaacaaatggtattgggacaactggatagccacagggaaaagaataaatttggatccttatctcacaccatatacaaaaattaattcaaaatggatcaaagacttaaacaaaagaacaaaaactaaaacataggggtaaatcttcatgactttggcaaagcattcttaaataaaacatcataaacaacaaaagaaaaacaatagataaattagactttatcaaaatttaaaaattgtatgctttagagcagtggtccccaacccctgggccacagactggtgggaacccaccaggccatacagcaggaagtgagtagcaggtgagtgagcaaagcttcatctgtatttacagccgctccctatcgctcacattactgcctcagctctgcctcctgttagatcagaaggagcattagattcttataggaatgggaacgctgttgtgaactgtacatgcaagggatctaggttgcatgcttcttataagaatctaatgcctgatgatctgtcactgtctcccatcacccctagacgggaccatctagttgcaggaaaacaagctcagggctcccactgattctacattatggtgagttatataattatttcattatatatagcaatgtaataataatagaaataaagtacacaataaatgtaatgtacttgagtcatcctgaaaccactccatcccccacaaccccagtccatggaaa

SEQ ID NO: 83382 - DNA, 1048 bp, Homo sapiens
caccctgtttgccgctgacactgttgtcaaaggcttcctttctgaatcagaaacctggggctcctgggtagttgtttgggggagaccaccttgcacaggcaaggctcggctgtcactggcgtcttccttggttataaataacaggctctattcttagccaaacagcagttaattctcttcccgtaccttccagagcctctattagggaccttggccgtccttactggagacaggccattccttggcctttggcaggacccattcctttgatacgtgatcagaaaattcaattataaagccaattactgatttcctgagctttacaagggagactggaaagtttgattaagtttgaatttgtgtttggctgattgccagccaaaaccgaatgggcttgtgggagagttctgttgttgctgattctgttcctgttttgtggcagctctcttggggtgggggcaggcacactggtgttgtgttgtgggttttttttagacccccttacttgctgaatggctattcctctgttgtgatgcatgagatgtaaatcccccaaagactggttgccagagcgacgggctggaattgagctcagctaaacaaagtccttcagctttgaagggagaagcgcttgtttcccatgtggagttgagttatagtggccctcaacaaggctgcattcaaggatgcctgcatgaacaggcatgcagagggggtcgctgagcctgctggaggatcttaagcggcgtgtctgggctctaactgcctctaggacctacccagggggacacacagatgctgagcctgaggatcaaggctattcagggtgcctctgcccagctggtcaccctcaccctagaacctgcaggactggccttcaaacagtgacagcctgctgggctccagctagagcccagcacaggtggggattgaaaagcaaccctttgtctctagccaaagtacttgcttttttagatacttctgggaaaccaaacagagcccgtgatgggaccaggttggagttccaggtcagaatctgagttgtttc

SEQ ID NO: 83383 - DNA, 1040 bp, Homo sapiens
ctgtaccctcatccatacagcaagctcatgagccggcaccaccttgacccccggttgcagacaaggaagccaaggctcagggaggccaaccaccttgcccagcatcacacagctgggagtacagattttggactcagacctgggatttctaaatccaaacccaaacctgttttctgtgcgcacagccacccacccggtggatgacatggacactgcgcacctgttttgtctaactggtgtgtgtgtgtgtgtgtgtgtgtgtgtgtgtgtgtgtgtgtgtgtgtgtatgcatgtgtttaaaaggtgggaattttttgttaagtttgaatttcagttcttttcttttcttttttaaatgaaagtgttatagcatcctggtggagttgtaattaggaaattctgggttagtcagctaggcagaattgaaaaataacccggcagtgctggttggagtactttttcccctccttagaaattcaggttttgtcaaactagggaggagggagttgtgaagatggaaaaatgtgtgcagctgggctgggtcagggagtgtgtattctcttctttatgtagaactagacgattaaaaaaatagttatcgagtgggagtgctggctcacgcccataatcccagcactctgggaggcaaaggtgggcggatcacttgagcccaggagtttgagaccagcctgggaaacacagcaagaccctgtctctacaaaataaaaataaaaaattagccagccatggtggtgcgtgcctgtggtcccagctactggggaggccgaggtgggaggatcacttgagcccaggaggtcgaggctacggtaagccatgttcacgccactgcactccagcctgggcaacagggcgagaccctgtctcaaaaaataaaataaaatagttatctttgtgtaggatgatcttccgtatgtgcagacatgaggcagcctgtgaaagatggtaaggaaacaggtgaagaggaaccctggctgggtcccaggctttggcaggaagaggatgcgagccccagatgtggg

SEQ ID NO: 83384 - DNA, 1063 bp, Homo sapiens
cacagccagcccgccagcccctggctgctaggagctgctgccgtgttgccaataccatcactgtgtgtattgatttctcacccaactggtgtccttaacttcatatttatggcttgccctgacatttcccttctcttacatgttccaaattattaaaaacagctgctttataattaattgagcaaatcacagaaaaacactttttttctgtctataaataattccaccttaacttttctgggaggataaaatgctgtgacaaggaaccagcacacacctggtatctactatctcctccccagcctggacttgaattcatctgaaccatctctggttctctccccggcctgaaacgggacctccacgcgcagccgaagtggggtcggtggagaagggtcgcaggattcctgagcagcttttgactgctcgttctgcctgcctgtggactgcttcccatgatttcaccactgccttttgtatgctgagctctgtgccctgtcccatgctggggtggggtgtgccaggggaagacatcactcctgccccagaggaatcacagtcttgttttccagatggacacttggagacccaagcaaccaagtggtgtgatgctgagctcagggtggggtcagaggagagccccatgtggaggctggcgggcagccttcccatagcaagacccccaccagcgaggcttgccacacaaaacgggtgaccagctgccccaagagtcagctctctgtgttccctgcaaggggctctgctgaggccagcattttctgtgtggacagaccctgacatgggagaggctgggaagcaccagagcatgagctggcatcttgggtgggcagtgacttcaccctctggagcagtagagcccctcgtgactgtcagacagtttatggacttacacccttgacaaagcatcacaaagcatgatggctgacagcgacctcagagatgatcacatctaaagggtgacacggatttgtcttgtgtgcttgctatcattgacccccagctcttgtccccggcagtcactgtatttcattcatggcactga

SEQ ID NO: 83385 - DNA, 2149 bp, Homo sapiens
cagcagggaacagcactgaagggttcctccctggtgcagagagaatttgcgcccatctgttgggggctggatgtcttggtcattgggtggtgctgagtgacagcttcatgaaggtgcctggacatggggagatgtgaaatcaaccttctggctgtgttccacagctccccatctctcctatgagagagaaaaagtcttctgttttttctagacgtttcttgaacaaaagttctgaagatgatgcggcctcagagagcttcctcccctcggaaggtgcgtcctctgaccccgtgaccctgcgtcgaaggatgctggctgccgccgcggaacggaggcttcagaagcagcagacctcctagcgctcccttgccttcctcagctgcctcctgcgccctgtgcccgactgactggaggaggcctgtcccaattctgcccgctccatggaaaagcgggcttgactgcattgccgctgtataaagcatgtggtcttatagtgtttggacagctgataaatttaatccttctttgtaatactttctatgtgacatttctcttccccttagaaacactgcaaattttaactgtaggtatgatctcttctggtgttgactggactgcttggggtgggggacgatcaggaggaagtgagcagtcgcctgcctgcagcaggcagcttctactcctgcctcatgcgtacgtcccacaaatgcaggtgtcctgagcaccacacccagtgggaagagtgtgggggaggcgcacagtgtgagcccgcccccacgtcgtggggtaacatctgttatcaaactgctgtcgttgttgtggaagcatgtagactgtgccagaggccagacccacgggctcatgcacccctgagccagcagggcatcttggaaaaggaactcttggttcgatacctggagcagaggaggggaaagtccagggctatagggtgtgatgaagtcacccctttctgtcccactacatctgggactgactttccgagcctccagtccaaagccggcttgatttccgtgaactctggtgctcctgcatctcatgagtgtgccccatgggtcccctcccctctcagcatttccttgtcccgtctggacctggggagtggttaggcagcaagctttggtttatggttttcattcattggtgaagtaaattaggcagtgctaaagcctgtgggtttggtccttgaacaagatgtgggccttgcaagatgggagagtaaaccttgaagggctttattaaagaaataaaaaagaacttttgtatcttttatcctgggagcactgcgttttcctagctgtgttattcctggtttaattcagcagagaaggtaaggtgtgaacctacctgccttggagagggcccaggtcccaaatctcttcaaattcttcacatgtttaactttaaggatttgaaccatgaagtcataggttacagacctcagttttatgccccattggattactttttttttttttttttttttttttttttttactctttgaaagctttgttttgtggtagtccttttgggaagaatccagtattatccacaattattggcaaagtttaaatgtattttacataacggaaagtttttagaatgttgaaaagtaattgaaaaaggtgataggtaaatttttaggcaaagataatttatttcaataaatctttcaaaagccttaccttgaaatgctgttagtaaatttctgtgatttttttttttaatttgttttgctgagagcatagctatttgtttttattgtaaaacaataataataataaaaagcaaactctattggtgtgttgtgtgtggctggaagctaaggcatgtttttgtgtggctggaagctaaggcatctttttccagaggtgccaacgttaaaccccattttgatttggattttgtgtatactattttggttggagggttttttcccatgtttttgaattgggaacttttgtttttcctagtagtgtatttggggaaggcagaactacatttttcttccccttgtatttatatctttttttttttcaggtaagtgtgtagcgaaagattattttactgtcctcgaattacattatacttcacacgttgcacccattgtaggtgccactaattccacat

SEQ ID NO: 83386 - DNA, 1050 bp, Homo sapiens
agctaaagcagagtgaaagacatgagcgtcagagtggaggactcaaggacatgagaggccagggtgttggatgattcagccacatggattttgaagtagccaaatggagttggatgagaagatggtgagccatgctaggaagccccattgaagaggggtcacaacgaggagcttggtagatgacttcatatggtaaagaattcatgttcccagcaggacacactggaagtgtattaaagtgaagtagggcaagtaggtaaagtccataaatgcttctcaacacttaaatctcactagtggtagagagaaaatcaaattggagcacatttgatatatccagagtacttctgggtgaattctcacaaagtatgctaaggaacaatcaaggatgctgacgtatcttcttttggactttttggtagctcctgtcttcgttcctggctagaacaagacacctcctgtccaacatgcagaatgtctcttaatattgccgacaataatcgtgtcagggaagaacatcaaggagagaacttggatgagaatttggttcctgtagcagcagccgaagggagacctcgcttaaaccaacacaatcacttcttccatttcgatggttagttggtttcaacctctgaaactatacctaaggggtgttctcccttaagcagatactattttagttataaattgccctgtatagaccagtttaatattatacagtcatgtgccccataacgacatttcactccatggcaaaccatatatatggcagtggtcccataagatgataatggacctaaaaaattcctgtagtctggtatttactacagtttttatcattattttaaagtgtactcatacttacatacaaaaaaaatttactgtaaagcagcctcaggcaggtccttcaggaggtattccaaaataaggtattgttattctaggagatgacagctccatgcgtgttactgcccctgaagacgttccagtgggacaggaggtggaggtggtcgacagtgatactgatgctcctgacctgtgtaggcttag

SEQ ID NO: 83387 - DNA, 1036 bp, Homo sapiens
acaatctcagctcactgcaacctccgcctcccaggttgaagtaagtctcctgcctcagcctcctgagtagctgggattgcaggcgcctgtcaccacgcccggctaatttttgcatttttagtagagacggggtttcaccatgttggttaggctggtcttgaactcctgacctcatgatccccctacctcggcctccgaaagtgctgggattacaggtataagccaccgcgctcggcctagcaaccattatttagacaaagttcctgtgcataagttactcacttttgaaagggctttgaaggtaaattatatttttgattatcaagaatgttttgctgaacatgctttctctgtaactgtgttgtgatacaggcgcagtctatcaagtggtgtttagtgtgcgtgtggaactgactgaggttcctgctgggcttgttttgtttccacaggtttgcagttgcaactccagaggagctggctgtcaacaatgacgactgtgccatctgttgggactccatgcaggctgcgcggaaactgccctgtggacatcttttccacaagtaggagctttgtgaagggccatgtgggacaggtgttctgtccagggcgtgtgtgtgctttgtgtacccaggctcgagactcatcctagtggaggagtggggacattacctcagcctggccttgctgctggcactgagtgttctgggaagctcttgggtatccttctttgttccttagcctcttccctacatcataggactgtttcccacccatagtttgccatcttagtttctgggtatggtagctgtcttcatatttcttctccattttagctctgaagtatagcaaatatgcctgtaagatttaaaagaaaggattagcggggagtccttgctttcagacagcttattatctaactgggagagagaatatataattttgcattttgtacatgcccaaaagaagccttaagagcacaccagagaagtggattgagatgggactagaccaggaccgctaaacagcacagaagagc

SEQ ID NO: 83388 - DNA, 1749 bp, Homo sapiens
ccgtctcccacaacttttttgccgcttagtattcgattgtcccctttgggagctgtgtaatgaaacaaacaccaaactgtgcttccttttctgctgcctttacctgatgttcatgacagttttcctttgatgtctgaacgcagcaaaacattcacagtgtcaagaggcagcccatcattttaactgaatgtttcttatttgaggatctattctaacacagtttccaggttgtctgcccctgcgagataagcagcattgataaggcacacatgctggtttcgttcattagaacagataatttcagactgatcagatcaacggtattttggctagagaattttgctttcatcttggccttgaatacttatgtaaatcccgcagtgatcagaaaagtttctccaggatttaaagcctcacttggatttaatatggcttcttggatcttgtctccttgcatgttcccatttggggttgaaagtgggctgtaaatgactgagagattaatattccaagttgatagtatgatatgcaactcatttgttataattagtcccactgtgcttcatcaggaagcggtgggatttatggactctgtgggctgtagattaagtctcctggtccttctgatggagagtttagtagaaggcagtgaagggtgaagttcctgtttatctactgctgtgtaaagctgaactttacagtcctaaagaagggagaagcgaaagaactcaactcacatctcttgcttaatttcaaatctgtttttgcatttgagttagcaggtaaacaaagtgatatggagagtgtttttgccatgttaagattataatgtagtctttgatattttttaagtctaagatataaataagcctttgagaaggaacccttattttatttatataacaacactggtattgtttaatggatttccccccgcaggactttattttgataaaagccatgttcagattctaaagttaatatctcttcagaaaacattacataaaagctgttgatttttctgtgatgatgattactttttaggaaatttccttttcttccagcattttcagtagaggtcttacctctggcaggtttatcacttcttactctccgctgatgatattttcatttctcagttgatcctagtgctgtttttcttccatctttcctctggggtctccacgtgtttactttggcctgctttggtttctcagaccctccatgtgctcactgtttgtctcatcactcagtgtatatgtagtttctgctttagcagctgagtagaagtgacaatctcaaaagccttccccagtggtgggacagattaagattgttgagtgaataccctatgtggtggtgcctttgtcaactggatcctccttgcgccctcccctagttctattgaattcagattcaactttttcacgaacactgcctgccaaggccaagcaagacaaaacaaagactgatccttctgccagtgcaagtcctgctagatattaacatattgtaattcccaaaacttatctttttagagcacagtttagaataatatcggtctgatagcatcacaggaggtttttcatgaacaaacacaatttaaaacctttcgaaggtgttattttgggcactttggagggcatatctgtgaacaacactttcccctaccctcagtaatatggcaaaattttataggggataatagataaataaaatgaagcagagtttggaggaaaaagaaaggaa

SEQ ID NO: 83389 - DNA, 2720 bp, Homo sapiens
tccctaattctgatattctcaagagttaaggttgatgtctttattcaaaaaagagatggttaaatagcagtcaacagtgtgtaaatatgagcggagttgtctgtattaaaatgtggcaaattggctggatgtagtggctcatgcctgtaatcccagcactttgggaggctgaggcgggggtgtatcaccaggtcaggagttcgagaccagtctggccaagatggtgaaaccccatctctactaaaaatacaaaaattagtgaggcgtggtggccagcgcttttaatcccagctacttgggaggctgaggcagagaattgcttgaacccgggaggcagaggttgcaatgaactgagatcacgctactgcactccagcctgggcgacagagtgagactccatctaaaaaaaagaaaaaaaaggtggcaaatcgaatatcttggtgtaatatattcgttttccttttttgaaacttactatattttggcccaaattgaggcttgtgggattaggtcctgaacttttacgtggggtttgaatctttaggcagttagagtgataagaaatgcagttttttaaaagttgacttgtactggttgaggtctctattagagccagccatatataggaattgcagaataacatggtggttatgaaagtagattctgcagtcagtgttttggatttgaagcccaacctcagtacttgctggcagtgtgaccttgaacaaactattatacctatttgactgtttcttcttctgtaaatggggatagtagtctctacttcagaggattatgaggaccaagtgaaataatgcatataaaatgcttacaacagtgccagtaatctggtacatacttaataaatgttagtgaaattggccttttgtgaaagcttattgagtatgaaattgctctttctacttcgtcactaatcaaaccttatcttttgccactccactttggcctcctgataggttacaagttgaaatgcatatggggggaaaagagtcatattatttattcaaacacctacttgtcaagtgcaggaactgtgctgagtagtcagagtataaggacatgtagaaacttttcctgccttaaagaacttattagtggataattaatcaaatttatagtcttaattttttttattataagtattcaacaagtgtttttagtgtgtaagatgtgaccagtgagggaaaattggtgtagaaaatgccaaacgtggtaaaaaggcattcgaaggggaaaaaaagaaaatgccagacatgctaagggagggcagaaacatccagataaatttatttatctaatatggaaagtagtatgtactgtctttaataaaggtattgttctttttaaaattcaggttcaattttatttacaactgaattcctgcgcagtggagaagtaaaagaagccgcttgtctctgtgagcacagctatatacagtgtagaataaatgtggtagaaaagtttttttggttttatctcttttgcgatccctaaattgccacctttctattgtttgaatagtaaaattaatatgaagaactagatagtggtgtaaacaaatgtgataatgtttatttactttcggttctgctcatacttttttgtacaacattaaagaaaatggactttttttattttaatttctcattaaacttctaaaattcttataggtgaggatcatttttccccccaccttaggatggtgaatgttgcaacacaatgacaggtttaagtcagtcaagtttattggacccttgctttgataccattcttgggcacatactccaagattgtattagatttttgtgatgaagagcttccattacttctgaaaactatatttatctgagtgagtccaaggtgcaactcctaaatgaattgtgttgcagagaactcccagtataattcactgaccagtacattttataaccatccaggccttggtttgcaagcaacagaccttaaacatacaggaaactattaaaattggctcgatcagtagtcataggaattggtataagaagagactcatttagagctcagagttttcttcacataatgggggtattaattatttgtgctgttgcgaaattatgtgtcttattcttaaagccatggtaaaaatagggatctgtgaaggaaatttctaaaattggatgtattaggttttgaactctgagattgcacaaatattcaattaacttgaagttgtgtacatagagaagaaaatttggttttagcaaatgacagagccttcaaaaatatttttggaataatgtgaatcaaccgaaaactgggggcaaggcagaggacaggttttctcaggttaagagaaaaacgaaattttaaaaactttaaaaaatactgataaattcggatcaaatttgggggaataaaaaatattagagcaaaggagtttgctggttgtgtcattatttaatgatcaaagtatagcatgtatgccttattacagacttgttgactataggcttaatgtaaaaaggaatcttgccagatgtagctacttaaggaaaaaagggtttttaatagaaatgaacttttgattagtatggtgccagtcacagggctattttcctgaatattgggtgatgtcaaaggtatatgatacttgaggaaatcaggccaagtgtagctgagcaattaataaacactcaagtttttttagttggggtcatgtc

SEQ ID NO: 83390 - DNA, 1031 bp, Homo sapiens
gagacagagtgctagaggagtgcccaagtaggaagcctcagtctgtgataacctaatcttggcagtggcataccatcacttctgctgtgtgctattggtcacacaagccaaccctggtacgctataggagggactacacaaagcagtgaataccaggagacaggaatcattgggggtcatcttaaggcagtctatcacaattggtatagtgtacttccatcaggaatttaaaaatatttggttgtttcttgttgtaatgttagcagctcattgatgatcatttcctggtctatgaattcataagggttgtgatcctcatataaaaagaaacttatgtattactgaagtgtgtggtttgtgtagaaaaaaaaaatatgctgctattcctttacttaacatttttcagaagaatgacttaattccttagcatcctctaaagacttgactttattcaaaagagagggtaagaccaagacttgggtacaggcagtttgagaggtgattccaggaagcagcagaatacaggggagagagagaccagaagcagcagaagtaagacagggcatgttattgatctttttacacctgtgggcaactggatttgttctgttaaggaccaggaaccatgtagggactcctataccccattggataagggttgcatgaactcccttgcatttccatgttgagtcttgagtgcttgttgagacagtggcagcaaacagggaaccctctgatacttttcaaacatagctgccccgaaatcagaggtagcgtaatgtggggcacacacacacaaaaagcatgtttcagtgacctttaaagtgtcagtatgaccttttggatttaaataatttgaaatattttaatccatgataatgagtgatgatgttactgatgctcaaatattcctatttttgctaatggtggaacttcttaaagttggatcctgaattctttaggcaaattaaaaagccctatgactttatagctcctttacatgacaagatgtttcaggtcaagcattgcac

SEQ ID NO: 83391 - DNA, 1031 bp, Homo sapiens
tctaaaactatcctaaaataaaccgtttatttaagaccaagaagaatgcttttaaaaatagaagaaaacatgaggggaaaaacaaccaagagttgaaagttacagccagtgggaatgggtgaagcaggacagagaactgcagtttctcaccatgaacattgtagaactatttttggccacttaaaatatgtagagtatgactttggttaaaataagtttagtgttctgctatacaaattaataaaaatgaaagctgaattttgaacacaatttttatgttgatactagcttgccagttttgaactaatattgtatgtcttgggcagagtgacatctatattaacaaatcatagaaaatctgtatggaaggcatattatccctatgtttcaattaggagcactgctaagaattttctgttcactgaagaaggggatttgtgagtacatatatttagttgtttactggcttatttctttttgacagatactgggtcgtcaggatggagttttgcaagactgggtcattgacgattgcattggtaactggtggagaccaaattttgaacctcctcaggtcagtgttcagttacatttgctgggcattttggaagcagaaagctcgtttaattctagccactttaaaaaagattaaagtagaatttgacttgaaattttcttttcttccctccttaatttaaattacaaaattaagccaagcacttcttattttaaaggaaaatgtaaaacaaatacaaggccgggcgaggtggctcatgcctgtaatcccagcacttcaggaggccgaggcgggtggatcacctgttgaggtcaggagtttgagaccagcctggccaacatggtgaaagctcgtctctactaaaaaatgtaaaaatcagctgggtttgatggtacaagcctgtaatcccagctactccggaggctgaggcaggagaattgcttgaacctgggaggcagaagttgcagtgaaccgagattgtgccattgcactccagcctggacaacagtgagac

SEQ ID NO: 83392 - DNA, 1013 bp, Homo sapiens
tggcggcccctccctgagagcacccggttaccgtgactgaacggcgtcctgcggctccaggcctcagccacctgctttttcaaggtttcttccgtaacagcgtccgaaaactccgccatcacctccttctttcccttttttcccacccgggctgggccgggctccgctggccgcttcccattcatctcttcccaaggcacagaaccacgccacgcagatcaagacgctaccttcctgagggtactgcaactcccggcatgtcccctttatcgtgtttcccggccctacccaatgggaagcaccaaagtaagagaaggcggaacctatacccggtttaccaatgggagctccagctattgcagccatcccaccagcaattggcccactggagctcggtctggcaggccaccgcccctctacttcctgccgccagaggctccgggttcacttccggcgtgcctacgcctcctcttgcgctgtcctgttaatggcgggcagtagccgctgaggggattgcagataaccgcttcccgcacggggaaagtctaccctgcctgccactttctgctcgccgtcagcgccggagctcgccagcatgtctgtggtaccgcccaatcgctcgcagaccggctggccccggggggtcactcagttcggcaacaagtacatccagcagacgaagcccctcaccctggagcgcaccatcaacctgtaagtgcggcgcggccttggcgggcatttctctcgtgaaagctcctatagactctccgacgcgcccccggcttttcggcgcgcttcacgcctctgcacctccccgcctccaactcccgctggcggatgcgcgccttcctccctctctcaggcccctttctcatcctccagcctccagggttagagtccttttctgaaaggaaggcttgttcccatcctatgtattcggtcataatggggaaaaacggagtttgcttttaactcatcctttccccacctctccagaggtaaccgacttcaaa

SEQ ID NO: 83393 - DNA, 1050 bp, Homo sapiens
gctggcgagctccggcgctgacggcgagcagaaagtggcaggcagggtagactttccccgtgcgggaagcggttatctgcaatcccctcagcggctactgcccgccattaacaggacagcgcaagaggaggcgtaggcacgccggaagtgaacccggagcctctggcggcaggaagtagaggggcggtggcctgccagaccgagctccagtgggccaattgctggtgggatggctgcaatagctggagctcccattggtaaaccgggtataggttccgccttctcttactttggtgcttcccattgggtagggccgggaaacacgataaaggggacatgccgggagttgcagtaccctcaggaaggtagcgtcttgatctgcgtggcgtggttctgtgccttgggaagagatgaatgggaagcggccagcggagcccggcccagcccgggtgggaaaaaagggaaagaaggaggtgatggcggagttttcggacgctgttacggaagaaaccttgaaaaagcaggtggctgaggcctggagccgcaggacgccgttcagtcacggtaaccgggtgctctcagggaggggccgccacgcagaggtctagggatctctgaaaaagccctgggactcgcgcccagccttgggcagcggggccgcaagggaagaggctcttagaggactttggccacctcctactctcctgcctcggctgctgctccctttcactccaaattcggttgcaatttagaaacgtgagaagagggagaaatggaggccggagagttttgggaagcagagggtatgcaagagatagttgcattctggagtcaaagattactgagttagaatcctctcccctgattgggcgtcgccaggcaatggaattaaccttattaaacttcagttgcttcctaagtaaaatgggatagttcataatatttacctcggaaagtcggtgaatgggagcgacacactaatgcttgcaggcttcagtaaatgtttccctgagtaaggcccaatacacatgtggacaaatacaggagtgg

SEQ ID NO: 83394 - DNA, 1029 bp, Homo sapiens
ccaagatcacactgctgtaccccaacctgggcaacagagcaagactctatctcaaaaaaaaaaaaagaaagaaaagaaaagaaaaacagttgagctttccattttagtgctgaaaaacttgtctgaaaatcagtaacttggactagaccactggtgtgatgagttgttatgacaaaggccaaactgctgccatgacagggcatactttaaatttaggagaaagaaaatactgagaaaacatgaaccattagaacaaaaaataacaaatataatgtaggtagagacttacatttatttttctgggaacattagacttaaactatgcaaatttgaactgagaaacatttctcagaatgtctcaaatgagatcggagaatggatctcttgaatacaatgtgatctccaggaaagaaaagttgtggcctagatccaaacagttgtgacctagatcccacactgtggcataacaagttatcttttgtttacatttctaggaaaattctgtttgaagatttccggtcctggctttctgatatttctaaaattgacctggaatcaaccattgacatgtcctgtgctaaatatgaattcactggtaaggaagataaaggcctggtgtctgtaagatataaaggctttaactcagcattaatggagagatggtatctgtgtaccaaaacactcaactgaatgtccctgcaaagcatccggatcttcctgataaagacccagttcatagacagaaatacccaccttattggaaggcataagcagtggttgtctttcagaatatgatgaaagctactgaccatattttcagcaaaatccccataacatacatacacaccaactgtacatacaatatcaagaaattcagagtgatatataaactctattcttagacttcctaaggaacaaccatctccttcaatgccattctcccttctcttttttattttgaaggcaataagtgaatgcattcttaaaggaaaaaaaatcaaacaatattgcaggtatatggtgtaaacc

SEQ ID NO: 83395 - DNA, 1910 bp, Homo sapiens
acatgcaacggatacgtcatcagtaaccaccccacgggtttactgtgatgctgcacaattattaagccttggctgctacagagttgtaacctgtctgcacttccaaccggtttgggaatgcaagcagcattcccaagtcccgctttcacccgcgcgctaacggctcaggttcgagtacaggacaggagggaggggagctgtgcacacggcggaggcgcacggcgtgggcacccagcacccggtacactgtgtcctcccgctgcacccagccccttccgcgccgaggcgtccccgaggcgcaagtgggccgccttcagggaactgaccgcccgcggcccgtgtgcagagccgggtgcgcccggcccagtgcgcgcggccgggtgtttcgcctggagccgcaagtgactcagcgcggggcgtgtgcaggcagcgcccggccggggcggggcttttgcactcgtcccggctctttctagctataaacactgcttgccgcgctgcactccaccacgcctcctccaagtcccagcgaacccgcgtgcaacctgtcccgactctagccgcctcttcagctcgccatggatcccaactgctcctgcgccgccggtaagaggctggggatgcccagtgtagactgtagcgctagagaagcaatttctgacccctctttctttctctggtcactcaatttcaggacaggagttgctccttcccaaagagttttggggtatctttctctccattctaggttattcggagccccctttttaccgttaaggagatctgagttaatggcttgctcaagttcccaggaatcggttgtggactgaggaactcggccccgggctcttagtacgccgtcccttgttcaggtatccagggacggttctcacctctgtcttttctccttgcaggtgactcctgcacctgcgccggctcctgcaaatgcaaagagtgcaaatgcacctcctgcaagaaaagtaagtgggatcctctctttcctctaccccttccctgtcctccagcctgtcccctctccaccatcctcaggggaattaaagcagtctggggatgccccattgcgcggaaattgttgcctcctcagtgatccttatcagggagagcaggaatccttattcccggtgtcgctagtactcatctctgccgcctcctgtctgcccccaggctgctgctcctgctgccctgtgggctgtgccaagtgtgcccagggctgcatctgcaaaggggcgtcggacaagtgcagctgctgcgcctgatgctgggacagccccgctcccagatgtaaagaacgcgacttccacaaacctggattttttatgtacaaccctgaccgtgaccgtttgctatattcctttttctatgaaataatgtgaatgataataaaacagctttgacttgattctgtctctggtttcctttatatgccttaaaaataacggactggggtgagggattgaactgggagggcagagacctgggctgtggatggaaatgtgagccgttaagaaagagtgcattctggcaagccaggctactgcactgagcttcagcttctgtaaaactgaatggcgctgtgccagatcatatgggagcaggagggacacatacatgatcactttcagtttcacgtcaaatgtggcacagaaacttctccattcctcacttttactttcaatttccctgcccaacttcagttcttcgtgggattttagacttgaaagtgactacagagggtgaaatccaactccccagtggctggaatctgacatccggtttcccaaactccctgtggggaatgaccagttttgttttgttttgttttgttctccattagtcacagacctaaactctggtaaaataaggagttaataagaaaatgaaagtttaaa

SEQ ID NO: 83396 - DNA, 1690 bp, Homo sapiens
gaaacgaaaatcacatcggtggcggttgctctgcacacaactcgctcgctaccgcacgctccacgctctgcactacgccgatccggggacaggagcaggaggctgtggctgcactcagacttcgggacaggccgagctgaaaaccgtgagaggggtggggtggaggcgaccgaaacgccaaggctgggttcccggaacgcgcggggactagggtggaaggcaacttcggggaaactgggaaaggcgaccgggacctcggggacgccccgtaccccgggcgtaaactcactcccgcgttagcggccccaaagcggggagggggtggtcccgtggtccgcacccaggggagctcagtggactgtgcgccttgcctttctgctgcgcaaagcccagtccaggtcatcacctcgggcggggcggactcggctgggcggactcagcggggcgggcgcaggcgcagggcgggtcctttgcgtccggccctctttcccctgaccataaaagcagccgctggctgctgggccctaccaagccttccacgtgcgccttatagcctctcaacttcttgcttgggatctccaacctcaccgcggctcgaaatggaccccaactgctcctgcgccactggtaagggatgctaggtttctggtccttaggatacctatttccccgccacaggatagatgtccctaggagtagaggtgttttttgagttctagctaagtggagtcatttatttcattgatctagtgcttttccactcagcgccttcatcatccctagaacattcctattctaatgcctcccatttcagaggcgagaggactcaggctcataattctcctgctccatgtcacccaggtagtcggggactgctaggctgagccccagtactctgcgcagttcctggggtggatgggagacaggagttattggtttttcgggattaaggacataaagcccatcctagcctctacagatagaagtaagattaggcttcatggtgccctgagttggacaggagctatctatcaggcctggcaatgcactcagctggcagcatttgttgaccaactgctgttatcttctgtataaaattcactgcctttttctcttccttgcaggtggctcctgcacctgcactggctcctgcaaatgcaaagagtgcaaatgcacctcctgcaagaagagtgagtgtggggccatctccaggaatctggggctgagccaagtcagaggcaggaaaccagagctgggcatggaggagtaggccaatgatccatttcccacatccccttccccagcaactgattcaggatcagagccagatctttagacgtgatggattcccaagtttcgttcttaaaatagacaaactgaggccaagagtgcaccagcctgccaagcacagacatgacacctaaggactttcctcccctaagtgtgtggttctggggagccagccttcctttgtccttcataaccccagtcactgcctttccagccttctgccaggtctggggctcagatggagataagcttttcacagaagaccctcactcgaaagatccaccacttatctcccatctccgacagtgcatgccatcctgaactaagtgtcctctggggctggggacagagcttgggccaggcttctctgggggcagggaagtccccggtcaagtctggt

SEQ ID NO: 83397 - DNA, 1245 bp, Homo sapiens
gccctgcacagaggatggcgcactggacactcatggactcactgctgtaccttctgcatcttactcactgcccactgcctttttcgcttccttgcaggtggctcctgtgcctgcgccggctcctgcaagtgcaaagagtgcaaatgtacctcctgcaagaagtgtgagtgtgggatcatctccaggaatctggggctgtggctaagcttggaagggaacacaaggctggccctgagtgcatgcttttgggaactggtcttcctttgcccctgttggctgtgtcattccctctccaggctttctgctctgagctcagatgggtcagggcagactttttctattgggacacaaacctcaaatgtaccatcagaacacagctgtgccagcctaaaaatgcatcctctgggtgtgggggctgaacttcagccaggcttgctgttgggacagagaggttcctggtcaagtcagctgtgacctctcactctccccttcttccccaggctgctgctcttgctgccccgtgggctgtgccaagtgtgcccagggctgtgtctgcaaaggctcatcagagaagtgccgctgctgtgcctgatgttgggagagccctgctcccagacataaatagagcaaccagtactaacctggatttttttttttaactaccctgaccggtttgctacattcttttttctattcaatatgtgaaagacaataaaacacttttgacttgattctgactctccttttcctttctgtggcttggaaataacagttggagtgggggattgaactgggaatttaaagacctggttctggatggaaatgtgagcccctatagtctgaataccttcaggcaagcccggttacctccctgagctccatcttctgtaaaatggaactgcactgtgtgggatcacatgacggggttggggggacatgcatgatcgcctcgggtcatgtcaaatgtgcaaatgtggcagagaaacttctccatttctcatttttattttctgatttccctgctcagcttcagtccctcatcagattttaggcttgaaagtgatgacggggtggaatccaactcctcagttgcttgagctctacacggggcttctcgaactccacagtgaagaaacattttctaattccaatccatcccaggcctaaacctttgtaaataaaataatattaattacagatataatgaaatcaaacacaaaatacagaaaccattttaagattcaa

SEQ ID NO: 83398 - DNA, 1149 bp, Homo sapiens
ataatctgacccactgttactttcccagtctcattttctgctccctccctttccaaacgtcagacatgctttagcctcagggcatttgtgcttgcaagttaatatccatgtagtttgcactcacttcttccaggtcttcactagggaggcacctagtgaggctttccccatttcccgcctcccttcattgctttagttgttcttagcacttatatttcacgtatttttcttgtgtattgttgtcttccccctgtagaatgtgagtgaggggatttttatctgttttgttcactgatgtgttcctagcacctaggtctggcacacagtaggtgctcaaaaaatatgaactagatgaatgttactggcactcttgcaggcatggggatgcagtggtgaatgagacaggcctgccctcattgaactgataagcctgtggagggtaccactagcaataaaagcacagataggaagtgtgatgtcagggctgtttcttaaaggaggacagggatatttgaatagagacctgcttgaaatgaatgagcaggtcatgggactatctgagagcattgctggtagtgggtagagcaggtgcaaagaccgtgcagtgtgaacagctggagatgtggtgagcctgagggtctgaaccagcctcttcatagactgatgtagaaaataaggttgacagaaagatggatgtgccaaggagggggacaggttggagcaaagatccgaaggtgagagggcccactcctcatgaaaaagtttatttaaagaatatggagttagagggaagatctttcactggtgtgttcagggaacaggtcactttaattcaacaaatatgtatctgatcctgttatgtgccagacttaatgctgaggactcagagttgagcatctgtggaccttaccctataggaaatttgccactagagagggagacatatgtgtgatgaaataatcacaactgctgcactagggaagaacagtatagaagattcagagtagtgtgggaggggttggcataggtgggactttcccagctggctgcagcatacataggagttccccatgtgacaagatagggttggggatgtgttatagagagtgtgtacttagcatgtacaggagtatgaagggaggaaacagg

SEQ ID NO: 83399 - DNA, 1050 bp, Homo sapiens
tttgagtctgtggaaggagacaggaattctggtctgtgacttgatatctgtgcatttgttctgatggcagaaatcaatcttggggctgtcaatatgcacagaaatgatctgttttttcacagcctgactcattttctctgtcaggcctgttcttgggctatgttcaggaacaaatcctgcttgttgatgagctgtgtcctcgtctgtttacaaaaagttctgctgttttgttaagcttgtaacagattcaggcagtgtttgaaacctgtctttcccttgatttagatcttttcattttttctcccatctaggatctgcatctccaatggatactgaggggtttggtgagctccttcagcaagctgaacagcttgctgctgagactgagggcatctcagagcttccccatgtggaacggaacttacaggagatccagcaggcgggagagcgcctgcgttcccgtaccctaacacgcacgtcccaggagacggcagatgtcaaggcgtgagtactggtagggagacagcattagtactgggtggcttgcgggcaggatctgtttcttctttcctgccttgaattcagatccaatctgtgaatgacagccactagccagattcttgggaactcagaaagtgttgtaaacaggacagcagccttggtttgtttccctgcctctcaggttttctagcctgtctgcctcaccaagttatgagctgatatcacagggagagatgatcacaaggtgggagggggtgaaagagccctgtcatgctgaatctggtcacagaagttcctgcttgggttcaatgatcattgggtcataaatggctcccgttatgttaatacgtatggaccccacagataagttttaccttcaaagctagagagcactcagtgatgaggacagtttttaagagcatttggaagaaattgatgagcagttagtgatgagaaaccatccaagtgaggagtgattctgtctgcttgttgtcagtgacccgggaggctgcttctgaaaggccttggaaatacagtgcccccagctga

SEQ ID NO: 83400 - DNA, 1688 bp, Homo sapiens
cgctgtgccaggtctggaccatctctggggtgacagccatgaattagacatggttcttgctctcaaggagcttataatgtggggagtggggcagaaaaaaactatgctgctttccttaagaaatgtgatttactggttatttactgtgtgttacaagcttggctagacgtgagattttgcttaattttcacaaccatcattaggctacaatctccacattagagttgagcaacaaaggctcagagaagtcaagtaactcttccagatcacacagctggcgagtggtaaagtcaggattcaaacctagtgaggttgactccagagtgcatactcctctgattgtgatggaagggcatgggaggatggagagggtgctgctacttgtgcctttgatgggtccggaaagacactgagattctgtgcaggaaatatggaaaattgtcggtcatctcctcagtcttcatcccttgaacttgagaaagaactaagtgctggtgttaatgtgggacatcgtctgctctaagcatttaacagatgtcacaggagtattatgtaggagtgggctacattcttgttcttgagagctgaatgttttggctgctctgtcgagtcagtaaggatgttgtggaaattcttctgtagacctccccaaaatgttattttctaaaataactagttggttttggttctgttggcattggtaaaggcaaatcagaggaaccctggcagggattttttaccctgcagccttgcagctaaatgcagccaactgcttccctacactgctttctcacagcccaaccagcctttagacacttctgctaacttgccttccctgcaggctccttacctgctactcctggctgcctgcagttacccccagtcttgagcatgcaggctctgtgctgtatgcaaagatactgctggagcgaaaggcccatgatgccatcttagttgctatagttataatttaattgcatcagctttacagcctattaagagcaaaaagggaaaatgttttcttggtaacaattatcggtcatgctctcttgtaaatttccattctttttcatttctttctaccttaaattcattattttagggaggaggaagttggaatgttgaaagaatgggcatagggtggggcaggtgcttaaaaagaaaccaaagggctgatgactgtgtttttccatcttcttgataggcagagacataaagtgtggtgtgaatattttagtacatacaagatgagggcagaagagagaactgagtaggaaaaattttcttacatgaaataagttttgaaagaaaattctgtctttaagattttagattgtaagatttaagattgaaatgttatgtgccaaatttatttatttgtccaaatacactgtgttgaatattttgttttagagaatagctttgatagctttttttacgtgtgtggtttgatcttttacaattgttaaattttttcacacatgaagaagagtatgcttaacatatataaaaatgtaaatcgggttttacagcccatgagccacatacagccttaaagttttattggaacacagccaggcttatttgtattgtctgtgctgcttttgtgctacagtatgagagttgagtagttttgacagagatcatgtgccctgcaaagcctgaaatgtttactatctgctgtttac

SEQ ID NO: 83401 - DNA, 1042 bp, Homo sapiens
acatacttctccatgttcatgcaaagcatatgtaaacatttattaccccaaagttttacagcagattataactctccttgtgataatactataagctgttgtttaagctcttactgtttgttaggcgctgtgccacacactttacacgcattatataatttctttttaaaataaccctgtgaaagtgttatctgtgttttaaacttgaggaaagtcaaatagtgagtggccaagccagaatttcaaatccaacttagtaggaattcctcatatttgtatggtacttttcagtttctgaaggattgtcacaggcactttcctgactggtctgcagtgcctgagaggtaggataggcattttcccccacattcaacagaggaagaaactgaggcttagaaagattatgtatccaatattttcagtgagtgacaggtgagacttgaacccaggcctcctgacattttatatgcttcccatgtatgctgggaacagtccttgtccttctactctcctggaactggaaggagactccagcttccatgactttctgctcatgtgggactgcctggcttttgggaattgaagcaggtagaaggcagggaaccttccaaggatttttgcacccttacagactgaagtttctagtacaagctttatttataaagccgtccctaccctagattccctgtctccttcgtcagtcctttctctccctgcatatgcattgcataagccgtacactgcataagccacacactgaacagtttctacaggtgtcaactacttaaatgacctttcttttctgacaattctagtagataatttttaaattctgaggttctcaaaatcctggtatatattaaaattattttggcactggatacattcttatgtgtctctggtagagtacagcaccatgggacaaaatttagacatagctagcaaaattgacccagcaattccacttctagggttttgtcccaaggatatactggtaaaaaacacacacaagaaaaccctgtgcacagggatattcattaca

SEQ ID NO: 83402 - DNA, 1871 bp, Homo sapiens
aagggaagccatggagaactggccttgaattctggtttgattgcccctgggcaaatcattgatcaccttgaacctttagtttccttagctcatgaatgacgtttatactaggttactcctgaaacttctacaatattgtagttcactgtattcatctacggaggctgtaagtgtaggatggtggttaagagttgtgctgtacaacccgggaggctgaggcaggagaatcacatgaacctgggaggtggaggttacagtgagccgagatcatgccactgcaatccagtctggacgacagagtgacactctgtctcagaaaaaaaaaaaagttggggggagcttgtgccacagaactagatgtcctgcctctgccacttcctgactctgtgactttgggcaagctggctaacctctttgtaccttagttctctcatccataaaatggggatgaatgatagcatgcacctcatgggtttctttactatgacatgtttggagcagtctagtctatggtagtagtatcgttttattctagacaaggctctcaaattcaggcatgattagaacttgaatctgttactacaaagtacagtgttatggctcttattccaggtgatgtctatggaaagatataaaacaactatgtaaaagtgtctggacagtatataggaagttttgaattaaaaatgctctctagtatttgatgaagcatattagatgtcctaatcctaatcctaattttccccttacttatatctccctattctatatcctcacataggtcagttctcctcgggtctcggggacttgacatatcccacatctcccagcgattggagagtctgagtgcagccaccacctttgagcctcttgagcctgtgaaggacactgacattcaggtaagggctgccaagtgcaggtggaacccagagcatataacccaggctgaagaccctggccctttattaactagcagattgaggaatttcagttttctttgttaactttcttcttcctcagatattaagagaacagtagattcagctttggaggtatagtggaaaacattgggttattttcagagctctctgtgtggctgaatttaagaaagcaattccaacctgcactttttagattattataattaggagaacagatttctcttccttccttgggcttaatccaaggctcagagacattagttgcaagtttctttcgctttctttgctagatctcaaataattttactattcgtcttccacatttcttttttacatcttgcttgtattggttggcaaagagctggggaaaacttagagtactatttactgaaacctactcaatgatttccaagaagtgtttggctgcattagtggcaccaggaaatagtctaatagagcactccagtctcatttaaccaaacatgccacaagcaattgatagctgttttaatctaatcagaaactgacgtaaaattgttaaggaaaaaactcacggtctgtttagtttttgaggaattggaacactgcatttgcattagagtgaagggacagtggggcaccattttatttttttatcattgatttacctgaaaatgagaggatgccttctgcagaggcaaattctagtagaaatgggcaatattatttgggctcaatttgaattaatactctctatcctagtaaccttcctaagaaccattttagtccatctaatggccacatttctcctgcatttatttgaattcagaaacctaaaactactttgagttgagagttgaagaactatagatatttttcctattgctgctatgttcccaaagtatgagaatccagtttttccagttttatatgctaaatcatttttgcatg

SEQ ID NO: 83403 - DNA, 1079 bp, Homo sapiens
aaggcttactagttttgaaataagttctctgttcacttcatcttcttgccagcaaaggcttaaaggagaaaatttagctttggcctgatctgggggaactccgttttatcaatagggattggaggttttaagttgtattgtgtggctcagttgacctgtgcttaataaacttcctatacacgtatccttccctgacttcttgtttagtaaccaagcataagagccaagccagcttgcattcctggcatggagtgatcctcctcttaattcttctcataatgtgttggttatccaagaagagtaaacttggacattttcagtgatttgtctttagaaaagccagatatactattcgatggactttttttttcatttattttaattgcttaaatgagatataattcacataccataaatgtggtggacttttgtaattgaacttttgtttttcaatcaatgcattttttttttgaggtgagaatgcaccctaattccatgtgctatcagtcagagggaaattattatgtcagtttataagccacttaaagtactgttataaaaaggaaatgctgatgcattctttgacaagtaccgtccaggactttgtactatccatcgtttgcattacttataagcttaaaggcattttgccacttatgcattgtctttttctatttggtaaacattgattatatttccttctgcttctaatggagcttgaaattaatatgggtttttgttgttaccattttgttgtttgtcataatcaataatgtttgcgtgcattgtgaatgcattttaaaaaaattgctgtgaccaccaaaggtagtatattaaagaaacgccacttaaatatatgtagggatgatactagtagaatttttttaatgtttattgattttattttttggaaatggtcataaagaaggcctacatttgtgtaatagaggtgaagagtgataacaggacatactactaaaacagctgtactggatctgttctaaatgactttgtggtgcttgggagtatgcgtcctctcacagagatccacttgctcacttctgtctttggagaaaaaa

SEQ ID NO: 83404 - DNA, 2154 bp, Homo sapiens
ctgctaagcatgtttaccaaggaaaagcattattaccagagctgctttagcaaatccgaggaagagatgaagtccttaagagttgcatctgtttgcctactgataatttgtgtaacgattctgagaaatggtttaagtaggcagaacatccctatcttccatcttgtttctgttcttaatatgcctgagtaggctcttctgcacaaaatggtgatctagcccaaattggatgattttgaactgatggactgtggaccctgaaggaataagactttgctgtctaaatattttcacataatataaaaatataagagactattccatggaatctaatggtgtgaaggcttttagttaagcatttgcatttatttatctcctttgttatattcctcttgtccctaagagaatgaacaggatgttcatgataccctttcttttgagtttttagagggatttaatggatatttgaatcttgctgtttctcagcttatgacagctgcccatcctggacttaaaacaacctatagttaatgctcctgggctcagtaggagtgatgaatctgattatcaccagatccaaagtctgttagttgaagagaaatcctttcctggaacaccaggtacattttaggccaagatttgggtgtagtgactgaattgcatgtagaaaagacattacatcttactgtgccctgttctggttgagggacaataagtggtgccaagctttgtcccctatatgaacacagtggtgtctacatcacacctacttaataaacatatttgctgttccttgtcattaaaccctgacccagtataaatcttagagctggtaaaaaccattaaacctgtacaaaaaaaaatataatgtcttcacagaggcaggctaatgtgccatcctgtttcatgtttataattaggtagcctaatgctgatcacagtggtaagaaattgaaatgatttaatttttctgcctgtccatgataagggaaaaggtaggcattgtggtctggtggcaaagtatgcaattacattaaagtattctgtgaatggaattaaaaatggtaactttggaataaaaatgggtcggggaaaatgtgaaaaactgcttttatgtgagccagggatataagatttcagcctttttatttatccattcacacttactcctgaatgcaaggctttcagaagaagcaagtaaatggatgctgaatgcattctgaacgagcgggaaatgacaggcttttttgtcttctaggaggtttcttatatcctgtagtgagcaagagagtatcaattaccaacttaaagaagaaagaagttggaatggttctctaagagtattttggaacaagccccgtggctgaaacatttaacattttaatagaagacttcagatattggccaggctctggtgcctttgaactggagttgagtcgtcccctccctccttcaccagctatctcttaacctgccgataccagtgatgccccagcactctggtgatgagaaacatagattgacatcttcagtctggcatctataaattgctcggttgcaggaaccagaaatgggcatgtctttttatctgctgaactatttgatactggagtggttgtgatttaaatggtggttaaagccttgtcaaatattgaattgttttactgtagaccagtctgttgttctcagatggcagccctttacccatgtgccactttgatctgcttgccacagcaccttgtgatctcttatttctgtttttggaatgttcgatccaaagctgtgcaggcctgcagcctgatgtggcagttggcaaactgaggcttctcagttacaaaactttggggcccaggttgttagtgtctcactaaaaatccatgatctgcgatggaaccgagagaggggattacatagaggggagacccttggctttacttcttttcatttgtttgtttggtagggaccaggaaaagaagctggaaggtaagatgggtaacatcccctactgacaagacctagacttagaattttcttgtgctgcagtgctctaagaaccagtgtgtatcgctttcttttaaagcatctttccatttcacagatgctcagcttccatcttgcacttcagatttggagaggctgaatgtgttccccaag

SEQ ID NO: 83405 - DNA, 1024 bp, Homo sapiens
ctaacatcagggaagcaaagccaaggtttattgagcatttattatgttcagacgtgtgctaagcacttcctaggcttgctcatttaatcttcccagcaaccctctgaggtggatacttactgttaaccccatgtcacagatgaggaagctaaggcttacagaggctagatatgccagaccagagctccagtctgttgatttgagtccaatactgtgctcttagctgcctaggatttaaattgcatttgcagactaagactgttttagtgaaggagggaagtttttcaggatgtattagaaggaggaaagttagtgaaagtataaaatagaagtataattgatcattcatttagagcaaaataaagagtagaaagcccacagtgccggagaaaagtatcttttgaatggatgtggtaggcatagctcttatttacacaagcttagtagtaaaataacgttgattgagggagaggctggagcgtactttctcaaccctgatgtgaactcttgcggagcgttgggaggtggtggttgaggggcattcagttttacagaaagaccaaacctgcttcatccgtttatctccaggtgcttgcttttttttgccatagttttctgcttgctgagctgtcagtttaatttactgtctaaagctcagcctattatttttcaggtttgctgccctacaggtacactgtaaaggatttctgtgaaatcctggagcagcttttagtttcaaaatgccaaagctttgtgcttgtgaaaataggttgtgttcagcttcttgcttgatcatctttgttttgttttgcttctgaagctgaacttgagttagaagcatgatgctagaagcaatttaaagggcacatcaaatttttactgtaatactgaactattgattgttgacttatttgtaggtttaatgcaaacccatttccttacttagcgtctgactggccattaagccctggcagtgtgccggaatgttgaaatcttgtattgtataatatgatttgtctgtcta

SEQ ID NO: 83406 - DNA, 1048 bp, Homo sapiens
ggagtgagatgacaaaaacattaaatctgtgactttgagagtaaatgagaaccgaatggctttaaggggggaaaattgacttccgccaccccctccagtcacacaaataagatggacttacttcagaaaatttggaaaatggctccatagtcactttcttgactgttgtactcccccttgaagttgttagaacagataccatttggggagtgttgaactttttaaacagcatacttgaaacggtagccatcttttgtttgaaatgacaaggaaaattgataatagagaagtgagggactggtacatgaagtgtgtgttagaaatagactgtaaaagtggccctcataggccgggcgcagtagctcaagcctgtaatcccagcactttgggaggccgaggctggtggatcacgaggtgaggagatcgagaccatcctagctaacacggtgaaaccccatctctactgaaaaattaaaaaaaaaaagaaaaaaacacgtgaccctcatagctcaaaattggtcaattcctataaattgacacacagtctgttcctttattctgtaacggaaaagcttccttatgtgctaaaagggatcagagatgtgctgatttcatgaacaacccttacatcatttcattgtcccctcaaactatttggaaggctggttattgagaagttctgtgactttgtcctaatttggaagatttagggggaagtaataggcctggaactttgtatgaagtttgagggacacatcatcataatcttttcatttgtataatactttacagtgggctttgtcattctcttgttccacactgcagtgtatgagatggattgagtgagtgttggcatcatctttatttaaaaggggaagaaattgagactaagatagattagttactgtaaaaggtggaacttgaacccaaataattctttataccttgtcgtgtagtcttacttttcttatgccttgctgaggaaggcatcaagtgatggattggttgggtaaatgccgtattattcttttctgcaaagacactaagc

SEQ ID NO: 83407 - DNA, 2189 bp, Homo sapiens
ttttcctttatgtgacttggtgctgagtttatgctgtctgagtaggtcattgctcccaagcaaatgaaaagtagcaaactgaaacaaatgccatatttggaactttaggtggactggaaggaatgtcaggggttttagagcagattgaaggaaagattttttggttttgtttttgccattattttgctttctgttttatgctggataccaccttctctgttcccttccctttcattctttttctttttcttttttggtcttttctcctttcttcctttcacttttgctttccttctgttctttgcatccctctctctgccacctgtccccttgcctcagcctttttagactggctgtcagcaggagctgccattgctaatgggagtgtaccggatgcctcagcggtattgagggcagaaaaaggataaagaacatggttgggtagaattttttctcatttttctgatcaagtgttagctgtgaaaacacggctgttagaatggctcccacagcttggcagtatgcacccaccaaagctatcttcctgtggaatgaacacagttggagagtgagtttggactccggattctttataccttgtcctgtagtcttacttttcttatgccttgctgaggaaggcatcaagtgatggattcgttgagtaaatgccatattattcttttctgcaaagacactaagctagttctttcaccactggtcgaatttcttaatgttttgtccctgcctttcctctgaccatttcttacctgttttctatggaatgacatttccccatcaggggcctggaagctctgtggaagcctagccttgctgtctatcagaggtgggcctcttccttgtttctccactgccctacatactctccttacttgtgttttctgcatttgcaaaccccaaataaatggaatttagttttatttgtctagccagtttgctcatgttctgctcttgtaatatgtaccctgaagtgcatttccttactttggccattgcctgaagcctctgctaattttctacctttgttttttagtgtctgactcagcttggtattgagggcctgtaagagttttctgttacagtactgtgatagtgcgaaatatgtatttggtcttggaccctgtttcctccagcctgctgggaagagagaggatctgaaggttaagttgatcaccagtggccagtggtttactcaggcatgcctacatgaggaagcttccataaaaacccaaaaggaagtcttctgtgttgattgtcattgtgtggtgagagcagagtagacacagtttgaattggtttttcctcacaagtacttagtaagtcaaggtttgaggtgagagttgcaacttatttattattagatgattgattatacattaaagccaaatctaagtagggggagaacggggaagaaactgaccaaggaaaagaagacatttggttgcgtttcttgtgtttcggaaatgaagttgtaaattaatctacctcccaacctcatatatgcttttcactatttgttaactattcattctactttcttttttgaggatggggcagtgttatgggatggggtttattttggagcaacaaacgcattgcagagcctttcaggcatctaggcttttccttgggggttaggaaggggaaggagccactgatctcatctctgtctttgtattaactttctagctcaggttgggtttaatttcctcctccattcctctcctgccctgaacacctttggcaaccagagaaaagccttttggtcagtgattgtagagtgtggcgctcagaccagcagcatcagcatcacctgggaacttttaagaaatgtgattctcaggctccccgcagacctattgaatccaaatctgtgagggtgcgacccagagtctgtgttttaacaagtactccagcttgagatgtactgaattaagtgataacagaagtctactgtaggtaaacctgcttttctaggtgtctctgccaacttttaaactcagtccacctgtggactaatactgaattttcactaaacaaactgtaaacaaagcagactgcaaagcagtgtatttatcttttaagtgtttgagtccataaagaatttataagcacctttgtttttatctttgcttcatcaaggacatagtgttcaatataatatatgttta

SEQ ID NO: 83408 - DNA, 1558 bp, Homo sapiens
atttttagaaatctgggaggctgcttaaaactgtagtgaattgccctggagaaatattgaggactatacttcctcttcccattttagcctcttcccattagtaattgcttttattggggaactacttcttgaaaacacatttaaaatggaaatcttacttctgaaatttctttcaccgaggtgcatttcgtatctggcccacttataaaccctgctctcactcttttggtttatagtcatatcaaagtcagaaccaccactctggggcagcaggaacttattagctgggaaagcttacttttccctgttgtttcttaactcctgggcagtctagtttgggtatcagcaagagagaatgaactgtaatttgttttagtgctaaataaggctgtgcagaaatcttctcttttttttattgactgcctaaatctggtgttcctcacttaaaataatattcaggatgaaatgtctgcaataaattagcagaattgcttcttcattctcagctaattagtaaggacagatgagctgtgaatgccataccactgactttgggtcaggccgtctcattttccccgaacttccgtggctgtagttgcatataatgaggaagccaactttgggaattgaatactgttggtaatgatgcttagtcacaaagaagagcttagtgcctcggtacattggccaagaaccgccttagtatgttaccacctaaggctggaattatctcagggagctgaaaagatttgaaagaacaagcaaaagtaatatttagctcccctttaagtataactgcctgcatctacctgggcagggcctagtagacactaataaaagttaagaagtggttttgttcagtgcccgttaaggacagcactatggagataattcgaataaatacaaattctggatgctgccctctggaagtttgtcttctacctatagagccaacaccgacattcctgcaagatcaaactgtccaagctgtgaaaagtgacggacagactgaatgagagcgacacaggattctaaatgccatgggaattcagaggcgtggaagcggttaataacgaatgaattctggggtagttgggaaagactccctggagcagatgggccttgaaaaatgaaatgggtttagcttgccggaagtgaaagaagagtaataacctgaccaaagtcagggaggtaagaaatggaagttatgtgctaagaagtaaaatctgtcagggaagggcagtcagacatggaaggagtgactgccaggcagtggagtgtaggcggcaggtgttgaaagtttcgaagcaggtaaatattgagcagaaaggagggagggcatggcagtacttatggaagttggtttggccagtggaaggatagctgctagatgacattcagaggcaattgtagtaatacagctttgaggtgacaatagccaggaccaatgtggtagctgagaaaacagaggaaaaagatgtgtgagggacatttgggataaaacatctgccacatgtggtgcctgatgggcttaagaaggatgttcagaaattacgtg

SEQ ID NO: 83409 - DNA, 1124 bp, Homo sapiens
tggggcaaggagaaggatgggtgctttttgttgaggctaaggaattggaagattaactagattgagagttgagatttcatttccgtttctgatgttctggtaagctatcactgtggaaatgctcctgaagcatttggagatggggtaagaaaatttctcagaaaacagctccatacagaattttcaagagccacaggcctagagagaagaattgtggcagtagaaatgaatgtgtaataggagaaatgtttagcaggaggcaaagggccaaggtctcagtgaggagaagaagccaggaggaggttggtagtggtggggtggaaagggagcagggacccagctctcccagctgtatctcagaaagctgggagtttgctcatagagggagtcatcactcagcctcacctggcttccttctttactcttaaaagcacttacccaccagtactattgatcttcccagcagcctggagaacctggcagaagacagagcagagcccaccaagtatctgtaaaagtttttctgggtaaagttctatatatggtcactgtactgtagagccctacagttgttcacttgaatattattttacctggcaattattatagttctacttgaaccacaaaagttcaatagctcccttttctagactgtaatctctacatttgtttaagtgagcccactttaatcccttatattaatgaatgctggacccgttagtttttaacccttttctttttgctttagtttttggtgtctagggttatgtaaagccaaaatacaaaattaaacaatggactaccaaatttaggaatagatcactttatgttcagttagtgacgagtaagtagagaagcacctcctttgtaaggtggcttctttgtagcatttttgttgtgacctccttacctattcaggcatctggggtctgaaggcaggatagttaacacttctgctcagaggtcctttccagccagcatatcttgcaactccaagccagccactcatctagtttccttgggatactcgtagatggaggaagaaggggctgagctgatttagaatttattctagcataaagaaataccctcttaatttatttgttggcaatactaaagaggaa

SEQ ID NO: 83410 - DNA, 1010 bp, Homo sapiens
cagcatgttgttgcagtgcctctgaaagacaaggtcttggtttgtttgaaaatttgagataaatttggaagcagttaactcatttgatagaagaagtacttgattcttctgagaattgttcagatttgtatcttgccattctaatattttttcttttaaaaatgtattgggtggggcagaatttgcttaaatatttaaatagttggttattgggatttttgtgaacttcttctttaagtagcaagtagtgtggtctttaggatttttaaaggagatacatgtgaagtgcaaaattcttgtatgaggtggaatatgaaaatagaatttattttatttactaaaaccagatccttctttgggattgcaggtgagagtgagtgagtgcgtgtgtgtgtttgtttgtgtctgtggtgtgtctgtgtgtaggattctttaggaattcagtcctttatatttggtgattagggaaaaagtactattagagatttttttgaactatctcacaggaaatgttttagcataaggcttgaaatgagaagaactaaacagtaacaccaaagaggaggattcctaagtatttactaaatattggcaatttaaattgagatggttcttttttatttcttaaattcagtctcaaaagagatcataggagtcctttaagtatatttcaaatttttggctagagaatataatttgtgtaagtgaaatgaaaacttcctaagtcatgtaagcattatctggagggtgatagaattataaatcttgcctgcaatacttttaataccttgattaatatcaaagatacaatacatttaattcggcattaaaaagcagcttgtttgttgtcttctcttaaaagcaacaacaaaatatgatgatgcatatggctttttatcctaaggaatgtatttgtattgtgggacctgtggggtctggacctctttctgaagcatgtacttggaaattgttcaccctagttgaggggtttatttccctttggaggtgtg

SEQ ID NO: 83411 - DNA, 2192 bp, Homo sapiens
tgagaggaaaaagaaatctgaatatagtaaatttaaaagagttcaggtttcttttcactgtcttttaaaagcagtctgttttccattcctgaaaagaatggctggattttaattttagtgtcttatttttgctcttgtttttaatgaaaatgcttccgggttaatgacctataatagctgattaaaatacacaagaaacaaatgttttgacaaaacaagatttttgttttcaaagatcaatagattgaggctttcactctcactcatggggataatttttagtgccttctacttaattaatagttgtgacttcaaagctgcttgtgtaaaactcctgtttgtaattgtaagcttataaatcttgattcttaaaattaattggatttgacccggcttatttctttgttcctttatactgttactaagaggaaacaagtggattttaactttgatttgtgtttcttttaaaggctgaataatttttatcttttaaaccctgaagaatttatagtgcatgtattttatagtaaactttaccatgaagaatttgctcaacatgctttattagctgtttcaggagttgaagcttcacagaactgggtatctgaaaatccttttaacttgatatcaaatttataaagccagctgttcttctagctcttgttgcactagctcctgtttatcctactcactgagtgctgtcttctctaattaatagatgttggaaactagggagacaatgattttcttcacatcagccttttcattgacataggaaggttcggttgttgtaagccctggttagaatcctacaagatccataaatctgtggcgcaaatattaacttacggaataagagcctagatctcagcataattttttaattatggggacagcatttaacatgtttaaatatatggtagaatgcaaagggattcttttcccttggtttttatgaggcttgcaccttgaaatgaaagagttttaggtcagcaaattagaactccattttaactgcagatttgtttgcataaaatgtttggttggatgacatggggggtatcacagagcctccctttgaaatttttacagtaaaactttgttgaagatcctggtcttttttccttttgttggctttataataaggctaggtgttaagtaccctgggggaggtaggagagacccagtttcttcctgctttctttgcctccaccatggtctactcaagtttggctgctcggaagagcctctcctttctggtacttgtaggggattcctgaacctcttcaatctggaaactcttcagttttctcatgaaattttagcctggctgatagtgaagagtcagggattggttctttttgcaacaaaaaatgtatttgtatcaaaccttttactgctctgacagtaccataatgtggataagcaagcatgtcagccagctcgctaggaaacattccgtggtactaagatggcagagaggaaggagtaaaatggcgtcaccaggaacactgtgataaggggtggaccgcacgaattattttctttaaattaggtttgaagacacctttaggagcactgccttgcctatttacaaccactttttattgttagaagataaaaattttgagattttcgaagtaaagatttaattagcacttatatgtagatggcttcaaatgttccttctaagaaattgatggcaagtatggttaaaatagaatttaaagtactttgtgttaatacttctgaaatgccttgccttatgctttctttttcttttttagtataaaaatttactccttccaacacagggtgaatttttagaaaacaaaagacagtgtgcttctttatggtgaggtgaagtagcattcctacgaaactatgttatttgtctctggttttcattctagctctttgtgggttttagttattttatatataaaatatatattttggccaccttcaaaaacaaagcttattttctttcttttgtggttcaaggtatggattattttgcatgtgaacaatagtcatagtggtaatgacagtgttgatttctcacctgttcccacctctcatgaagttggagttctgttgctggccttagggtttagtgcaatcagctcatgttatagttaagtaaaggaaggcttaactgcagttaaataactttctcaaggtcatacatc

SEQ ID NO: 83412 - DNA, 1006 bp, Homo sapiens
atgcattcccattttatactgcagtgcggttttagcatccagagtcctttggaagtggattaatgcatttccaaggtggaaatcagttccctgaagacatattgaaacattttttatcatccctgaatgtatcttccttatcttatcttgcccatcaccttagcgtgactgtgattaatattttttagatctatttataccttgggtgaggagagggctctgctgctgctctttgaagccagacatactgtgacacactgttaatattccatttgtgaagctagattgaaccattttctcctccaaatcctctcttttcttgcgtctccaaagtttagccctaacctttttggagtgattgcgggaaggggataaaatgctcacagttatccctgctttctctcctggggttacctcagcagtctgacagcagttgcctggctgctctccctcccccactggacttctgttggtcctgcttcccctaccctcccaggagaggagagagaggatggccagcagaggcccttccaccacagcctggcacatcctgctgcatcacggcccttctcactaggacacgggctctggcctgattttctggaggtggtaaagtagcagtacagagcagtcaattcctttccctatccctcttgtgacctccaaaggaaagttgcttctacaaccctacaagggtagcatagggctttgctggattttggagaagagggaggttctgctgagaagcattttttccattagtgcctgggtggccatcatttatcattttattcatttatattatgcccttaacttgtttgcactccatacggagtctcagagcccttcagtaactgagccggaaggactgcttcctgggatgaccagagagagaagtgcaaataacagaaatgccccagggcccctgaaaagggcagaactggctttgcagtagtagcacggagatttaaatggccatcataggaatgcccttaaccttggcctt

SEQ ID NO: 83413 - DNA, 1056 bp, Homo sapiens
gttcagaaattggcaagaaggtttgggagaggttcagggagcattttacttagaatgagctgaagcaaagtaatggtacaacttacattcctgtcttcttagaatgtggatacttctccattgcactaactaaagtactaactttagtaccaactgaatactcaatagtattccaatacttattggacttcttgttttatcttggagcagatcctttattgattaatttttaactgctttattatattttctttcttccttcattgctttctagctgttgcttgtgtcttagcaatggtttttcaacaacaatgaccattcctgatgccactgctcattttgtgttgatgttattttgatttggaatgttggctgcagatttcctattaatttgtatgtattgtacatattaaaatgagagatgatacatgatttttgtagcacccggcacctatttttatgtcataccagataccttctggtaaatgttcagcctgctgtagatgcctcacttttacattttgatatggtggattgctggttggtctgtttaatggaaagagacatgagatagtctcttgtgttttgaaggtcatgaaaacatgactattgccttgtaagcccaaattaggctcttgtttatttattttaacaggaaatttgtgtgttcatcaattcagactctgtgtaactgtccaactgtccaatcacttatctgctataggtgggaaggacagaactgtgaaagaaccaatgtgagcacttttttgccatctgactttcctggctaaggtggacactgaatgtttttttcacaaaggcccttatttattgtagttttcacttttgggaacaaataagccaagagaatttggccatttggcgaaaacaaacatccttttgctcgctccctttttctacagtaggaattagctgccatctgtattctgaaacccagagtttgcatgataggtaaaaataaggcagtttcatgcctttcttgacctgagccatttaagatccactttggctgccaggtccttgagatgtgactac

SEQ ID NO: 83414 - DNA, 1101 bp, Homo sapiens
ccactgcactccagcctggcaacagagcgagactccatctcaaaaaaaaaagcaaaaacacgaggctgggtgcggtggcttacgccggtaatcccagcactttgggaggcagatcacttgtggttgagccaacgtgttggcctcatcatggccaacattgtgaaaccctgtctctactaaaaatacaaaaactagcagggtgtggtggtgcatgcttgtaatcccagctacttgggaggctgaggcaggaggatcgcttgaacccaggaggctgagtttacagtgagccaagattgtgccactgcactccagcctgggtgacagagtgattttagacatgtataaatgcaccagtagtgacatgcttgtaccttgcattggagtataggtggatctgatgtgtaaggtaacttgagttcttcatattacaactaagactttgatctctacatgtcaattgatgggtcatcttccttgttcctactcagccccccaccagcccaagctatggaaaagaaactgcccccttgtatgaagagcaaggtgttggcggggaagtgcactctgtatatctgtctgtctgtctgcaactgtggctatcagaataatgtctcagcccttttcctgtcagatctcggctgaagcaaataaggacaatgaacagcagcaaagaggtcatcctgggcatctctttcactaatggaagtcaccaacagatctaaatctaatcgatcctaataatagagctacatgtattgagccttgggtcaataacttgattacattatcttattttttttacaaacaaataagctgaggtttagggagtttgggcgacctggctaaagtcctgctactagtagtaaatggaggcactaggatttgaaactgtcaaatttcaaagcctatccttttggccattgtgttacaggcatttaacctgtttatattaaactagacttgtaggctgtcttttcacctcacctgtattaaacgagcagtggacatcatcagacctgaaacagagagtgcacatggcaaaacgctggaagaaatgtgtaaagaaaggatttttagaatttcccagatattggccaacaa

SEQ ID NO: 83415 - DNA, 1011 bp, Homo sapiens
attacagggatgagccaccacgtgtgaccagaaaacaacgtattaagtgttggtgaggatgtagagaaattgaaacccttgtgcactgcaggtagaaatgtgaaatggtacagcctctatggaaatagtatgtcggttcctcacaaaattaaaaataaaattaccttgcagttccacttgcagttccacttctgagtatatacccagaagaattgaaagcagggatatttgtacacccacgtttatagcattattcacaaaagccaagaagtggaagcaacccaggtgtccatcagtgaatgaatggataaagaaaatgtggtatattcatacagtggaatatttttcagctttaaaaagaaaggaaattctgacacttgctacaactcttaaggacattatgctgattgtctctggcttatttcactcacaaaaagacaaatactgtatgattccatttatgtgaggtacctagagtagtcaaattcacagaaacaaagtagagtggtggttgccaggagctaagagatggtggtgatgattgcacaataatgagaatgtacttaataccactgaactatacacttaaaaatggtttatgtgggctgggcacggtggctcacacctgtaatcccagcactttgggaggccgaggtgggcagatcacctgaggtcaggagtttgagaccagcctggccaacatggtgaaaccccgtctctagtaaaaatataattagctaggcgtggtggtgggcgcctgtaatcccagctactcgggaggctgagacaggaaaatcacttgaaccgtggaggcggaggttgcagtgagccgagatcgtgccactgcgctccagcctgggcgacagagtgaaactctgtctcaaaaaaaaaaaaaaaagtttatattttaccgaagttttattaaaatgtcttaaaatcagtgaaatacggtatgttgcaaacagttgtcagtaagtttatttatttatttatttttttggagataaggtc

SEQ ID NO: 83416 - DNA, 2061 bp, Homo sapiens
agttatgtaactatataaaatatatagttatgtaactatataaaatatatagttatgtaactatataaaatatatagttatgtaactatataaaatatatagttatgtaactataaaatatatagttatgtaactatataaatatatagttatgtaactatatataaatatagttatataactataaatatataaaaatatataaatacatttatataaatatttataaatatataaatacatttatataaatatttataaatatataaatacatttatataaatatataaaaatacatatatttataaatatataaaatacatatatttataaatatataaaaatacatatataaatatatataaatacatatataaaatacatatataaatatataaaaatacatatatataaatacatatataaatatgtatataaatacatatataaatataaatacatatataaatatatatataaatacacatatatatatgcagtgtggttgtatcattcagatattaaagcaccctgtccccaaataccctattctcttctccctttgtcttccccataggtaatcactattagtactttcttgtgtaaatttgcgaagtgtctttatacaagtatatgagactgtatgttcttatccccattccttcttacagaaacgttagcttactgaatgctctgttctgcattttttcttttttcccttcatgtatcccagaggtctttcctgagagggattttgaggctacatccaggagcagcaaaaaagattgtctccctttatctgtgatttttgcctttgtgccagagggagccagggcttgccacacatttaccaccctggtgttgagggaggacagccctgggctttttgctagcttttccaaatcagcagtgactagttctgaggctttgtccaagttacttaattaaccctgcagaccttcagggtctttactgattgaagtgagattattggggaagattagtgataatgtaaagcacctgacccataatagccattccctattatcttttaaaagcagtttcatgaaatttagaggtgaagatttaaaattacgttacaaaaattatggtgctaggtgttttcaggtaatatcatcagtgcttcctgataagtctttttttcccccgaagttgtttcatgagtagctaagattctttttgcacatcgagataagaaaactgaggctcagagagacacataatatgctcgtgagacccaggatggttggcctgtggactcttactctactgaagtctaggtcaaggataggtaggttggcaaagggtaactgcacatccggtatctattcctggtttgttcctgatttaaacaccagggtttttggttttgttttattaaactagcccccaaataaacagatgccaaagtcattgtgttgggaaattgctcattaaggaccctgttccttatttcttagacctaaagatttcagactgaaatcagtctttggaaacgaaaaacaaatgtataatatcgttggtcaaactaatgtttctttctcaattctttgtgaatctgagcaaataattagaacagctcatggttttataaacttcactttttaaaatggtgttaataggttgtgttctgtattgggatttggatgtaattataaattgataatgggatgttctttcttgattgctcttctcgtaaaaatagaatagtctgtttagtagactcttcttacttgacctcaagtccccttggaagggagttatctatgcttttcctatctgttgtgacacctggcagagtagtttgtaaatgttggcaagtgatgtatacaggtctttcttaagattatccagggaattgcccttttccggaatcttacagattttgttgtttgttgtttgaacttttttcctgatgtataacgtatagatggaaaagtgcacagacgtaagtatgcaactcaggctgagtgcagtggcttatgcctgtaattccagcattttgggaggctgaggcaggaggatcacctgaatccagg

SEQ ID NO: 83417 - DNA, 1061 bp, Homo sapiens
aacatttaaaggtaaatttaacctgagtgtagtctagtggctgctttgtggtattagacatagtctatgaacaatcccttaatgtattgtctggaacatgactcagcaggaaatctcactagggaagctaaactatggcttaataagtatagataatgatggtaacattccacactatgatatgtaaacagtgtatgttgaacatagtctctaattttgataactcttaataccatattccatcacttctcagtcatgcatctgttttacatctcaacatctctcaaatcaggatatgtcttaaattcagcagtatatcattaacagcattttaaaatttcttattgatacataacagtgttttacaataggtggactattagatgaaatgaaatatagtagaatatgaactaacagtttgaaaactgcagaccataggattctgagctgtattttgtggctccctggcagtttccttggggatggacccagttcacctgttaggggtttgagtaggagttcaggtatagaaagtgctctgctgctctttcaaaaagattttttaaaaacctcatctcaacaggcccttgtctgatcttgtgcgcttttctgacagtagaggaatgtagacccactctgctgctcttccccatcctgcacccaaacacaacctgtcagtggtgtatacccttccagtttctcccaggggcttacatgcacatctgtatatcttatcgatttattatctcaaatagtatcattttatatattagttcctataattttgcattatgttttttgttttacatattttacaacttctcctaggttaatacacataggtgtctgtcgttttttagtagttctaatagtgttccagcctatgtgtggcccaagtattcctctcattttgtccatggtcacacaatcttagtagggttaataaggtcacacagttaatagctgggttgcatttaggaccctagtcctctctggtccctggttggtgtttttttcccagtagtactggacttttgcctacaacttttaaagctaactat

SEQ ID NO: 83418 - DNA, 1078 bp, Homo sapiens
ggatatatgtacagctgtgtatgtggcaggcacttagcaaatatttactgaatgaatgtccaacttgccctggtctcacatcttcagataacagaaaagtaatcagcagctgttgtcttagtgtggattctagtgtggaaatgtctgaatcaggtgtttgactctataaactgctttccctcaactgcctgatatgattgatgaaaaagaggcccactgataaaaataatggcctcactagtgtgaagacatgggaagggaggatgaggtagagagggggcttgagattcaaacagaatgttggaaagatgtacatttccagaaaaagtcattgaggtattgatagggtttatgcagcccctcactcttttttagttaatccaatctcatgcctgctctcttctcatgtgttcatagtaaaagttgcatgttattgaaatccctaaaatcatcactttgaggaattcttaactaggaaacagacttttcacagctctgttaaagacaagaatatgtttatgatgtgatttgatttcttcacatgactgaatactgtccctaactgattctgaatgtgtatttatccacagccaagctacatcagtgatgtgggaccccctggtcgaagctctctggataacatcgagatggcctatgcgcggcaagtgagtgtgattttaagggggattaagccaggaaaatcctttgtgaacctctagggagtaaaaggaaacaaaaacttgtaaaagtcaaaccctgaaagcaagttgtattttttcatttagagaactagttaatattttagcataggccactggagaattctatcaaatagggtaatagaattactcacatttgatttgaggaaattgaaatctgtcctttacactgaccatggcatctcagtatgcatttttggcaatagtcccatgtacagtaaagcttcaggtaactgcgctgcttagcaaatggagttccatattaactgaattacctggtaggctgttggtattaacaaatccttttttcactctttgttgaaagaaattttctaaatgcttttttgtcttaataagca

SEQ ID NO: 83419 - DNA, 1057 bp, Homo sapiens
ttgctgctttctcccacaaagtacaaagaaggaaaaatatcctgtttcttgaattgagggcagtgggcctccatccccttaagattatcctccaccagcagtggtccaggaatatctgctcagccattaccacctcccagattctttgaggggggacccaggggtcccacttgtggccctcaacattatccacctcatcctcctccagcctggagtagggtggttggagacaaaaacagggcagctatggaggtgagcaggggacagtgagaaactgttagaccctgtgctctttaaccaaggggtctgtcttcagctgccagttatttagtcagtggcattccacatgaattgaattacctggttagctgatggtattatcagaagtccctcttttaccctttgttgagagaaattttctaaatgtctttttgaaagtctctctctttggggtgccattgccacgtcagactccaggcagctgaaacccccagcttcatcaccttcccacacatgagatcccttccttccaacccctttatgttttgccactggccttcatttatttcctcctgctccaattttatacctctctctttttactccccctgtgcatctgtattctttacccttcaccttcattatatggctgactcctctattgccatggagagaagcctgatgaaatacaggcttctgagaagagagactatgtgtcttctacacctgcaaagactaaagatgtcattaaactaacatttcatagcacatacaacaccgtaatattgtgtctgtttacacggctgtcctctccactaaagagtgaagctttatatcccatgttgaacagtaccttgcaaaggaaggcctgtaagaaatgctcattgagtgaataagtactacgtcatggtttaaaaccattttattgattggttggatgattgattgagacgaagtcttgctctttcacccaggctggagtgcagtggtgcgatctcagctcactgaagcctccacctctgcctcccagattcaagtgattctcctgcctcagcct

SEQ ID NO: 83420 - DNA, 1053 bp, Homo sapiens
aatctagaagagtgaatttacgatttctactatcatcattttagctccttgaaaataaaatctaaagtaagagtggctttcccataccttaaatatcacatagttcattttccttaagaaaattttacctgaagaacagagattctttccaggagaaatggatattccacatgtgccacacctgctattctaacacttgtggagggaggcagtgcccaacattccccactccatccatgaaccctataccagggccattcagtccttttgaaagaattgagtcctttgccttggttattaggaagcagcagccagagcccttccattctcctgtcttcccctgggtgcttcctcactaggacagaggcacagacctgcctgtggttcttctccccctggaccccgctgctcccgttcctcaggtgtttggaaggtggggtggcagttagctttggtgtgttacccacaaccccaacgcaactggggagctggccagtgtggatggctcagccactccgaggaaggaaaggttggccgaagcttctgccggccattgcctgcttcaggaggtttaaaaagaagagaaaatagatactttgccatttactttgctttttatcatttcagatttatatctataatgagaaaattgtaaatggacacctgcagcctaacctggtggacctttgtgcttccgtcgcagagctcgatgataaggtagcacctagagctaactcaagtagaaaccggggtccagtgttccgatgggcctagcaacttgccgatttggttgaaatgtgctgcggagacacgccattctgtggaatgaaatgttaactgttcttcagttttattttaaataactttgggtggttttcttgatgatgaatttttaaaaatgcatcttcaaaaggccctgccagtatcaattgatagtcacaagagttctcttcaagccgtatttgctttgaagtcccatcaggcttttactccccactcaccagtttccctccttacacaatctagtaggctccttaatgagagcagaattgt

SEQ ID NO: 83421 - DNA, 1690 bp, Homo sapiens
tcctgggttcaagcgattctcctacctcggcctcccgagtagctgggactacaggcacctgccaccatgcctggttaattttttttgtatttttggtagagacggggtttcaccatgttggccaggatggtctcaagcttaatttttttaaatactaaaatataagacaatgtaaacagatctaaagaagaaagtcaggtttcaccaatcattccaccacttaggaagagtcacatttgtctggacattctaaaattttaatttttgagacagaccatgaaaacaggcttttctcttttgctttggaacaagtataaacctgctttttctccaatcagtgctatcctgcaaggactcatacatttaaagtattgccaagggttcagggaacacgttgtttttaaggagccatttacaggcagaaggattctggggagagggagtcccagctgtgtggtggtaacacagaggaaagaacacccgctcctttcctgggaggcgtcttttgaagggagtgagtgggaaggaaaatgggaggctgtgacgctcaccaagtaacgtaagagcggtggcccctggagcgtctctgggaggacaaaaacctgtattattatgttaaagtcttattttaagcctttagaaactcagataaccttgtaaggactgaaatgcagctctttgagtttaaacttctagaactttggatgattataaatggattccttgtctctgaagggataacccactgagattcagtgttctcgtgacttgtatgtggttttaattatgtacgtggttatgtcagacctggaatagtaattgatctgaaaaccaactcagggcaggggcaggggtgctcatcggtggatggaactctgaagtctggccagcagagacgcatcttctgcactgagcttaagcctagccgtcacagacagatgacattaacctcatcccccaccacattctgccccctttggaggtcagagtgccacaaagaactagataatttctctggccctgcagcattgtcacatgcagtttcatttatgtgcagagcatttccgacatgtggaccatggtaaaacaaatgacagacgtgttgttgacaccggcaacggatgccctgaagaaccgcagcagcgtggaagtgcgcatggagtttgtcaggcaggccttggcgtaccttgagcagaggtaaggcagcagtagcacagtggggctggctttcacatcctttgcagtcaactgtttctcagatcttaagttgtcctcaggctaggtgtgctgtaggtataatttaagatttattatgttaaattgaacaaggttcagagttgtaatcctgtttcagaaatcctgtttcacttccctaccaggactgtttctgcagtggtataaaaatcacacgtcaaaaaatcatggtaaatgagcactgttcgaattccctttttctttctccacactctcttaatacgtaaggccgtagtgccttaggtcataatctttttctaatgtggttcagccattactccttaggctcttttctctccacattttaattttactcccaggcatgttactaccttcaaaccctaggaaaactcgtttccccttatttttgttctgactctacttggttaattcccataagtcagggtcattctgagctgataatgcctgtgattta

SEQ ID NO: 83422 - DNA, 1018 bp, Homo sapiens
ggtcactgaggggtttgtggcagtgcctttgtgcccgaagtattgttcccttcgttagtaggacccatgccatcatccctccctgtggacactccttccaactctgaattggccagcaggggttgtcatgagtgtgcaatagaatctctttattttagagacagggtgctgggcccctccctgctggcctgagaagagaaagccaagttgaatacacttgctaaattgcaggcctttgccactcagcctctgcacctgccagcagccttgcagtaagattgccttttgtcaataaaacgatacttcattaggaagtcagaagatttccttgtatgttactgaggtaattcaaacttggtacagcagagaataggtttttataccaaatactgtattaattacatgagagctactgaaatgaacaccatcagacacattacattcactagcttccattccctggttaagaaaaatctggagctcaaaatggatttttattctcctagtataggaataaagggtttataaaataattcatccaagcgttagctgaatttttgtgtttaagttttgggtttatcaatcttcagccataaagaacctacatacatagtagcatttatttgttaccagtcagcaaaatgagtcagaatttcttatactatataaaaacttcccaggaatttttttttttttgtaagacagtctggctctgtcacccatgctggagtgcagtggcataatctgggctcgctgcaacgtctgcctcccaggctcaagcagtcctcccacctcagcctcctgaggtgtgtgctaccatacccagctttttttttttttttttttttttgagatggagtttcgctcttgttgcccaggctgtaatgtaatggtgtgatcttggctctgtgcaacctctgcctcccgggttcaggcgattctcctgcctcagcctcctgaatagcatggttgcctatcaccatgcctggctaatttttgtatttttagtagagatgga

SEQ ID NO: 83423 - DNA, 1442 bp, Homo sapiens
agagtgagaatccatctcaaaaaaaaataagggcacttgttaataggcactgcatcccagcctgggaaccacaacaagaccctgcctcttaaaaaaaaaaaaaaaaaaaagatcattgtcatgaaagacaaaaatagtggtagaattaatggaattatcttagattaagggaaagtggcttgacaattatattttcttgatgagattctggatttaaaaactgtaaaggacactattaagaaatgtgggttatatttttgataataataaattaatgttaagtttcttggtatcataatgatactgaggttaggcaggagaaggtcctagttcttcagagccatatggtatttatggataaagtagcccctgatttttataacatattttcaaggggtttgaggggagaaaaatgttatgtgtatgtgtagagagaaaacataaagaaatgttaaaaattggtgaatctaggtaaaaggttatgtgcattcattgaactattcttttaattttttgtaggtttgaaagtgttcaaaataaaaagtttaacaagaaccaaccagaacattaggctgtgagctggagcaattattattctgtatatccacccttaatgtatttgaagtccacagttgtgttcctccagggattcttttgagtttcctcagtgatgagaaatctactgtgatccacagcccactgagtaataatgtagtttgcttcattaagcatgtactatttcctcttctgcattgagcttgaagtctaggccctgcccttccaagctacagtgtaatgtcatggatatgggcatagagatgtgtaataaatgttttcagtcttccctgttttttcctttaaaatttttccagttataagaattacacccttgtgactgtctttggaaatttgcatcaggcccagctgggcggggtgcctgggacttaccaattggttcgaagtttcctgaacattaaactgccagctcccttgcctggactacaggtactgacaactttctctgtgtgatcagttacacccccagagcagttgccctcagatgggcattttcagttaaaatgagggtatctgtggagactactgtgtggagatgggaccagagaggggtgaggacagaaggtaaagacctcttaggaggctgatagtacagaagtccaggtgatggtggactcagctccgggtggagaagagtgcatggagaagatgtcattgggttctggacatgttttgaaagctgagccaataggacttgctgaagaacatggatttgagtgtgagaggcagagtcagggatgacttctgagatttttggctaaaacagctggaagaatggagttgaatgtagtttttaggatgtggtctcttctcagctcgtggtccagttggggagattatcatacagtaatgcaaagccctaaact

SEQ ID NO: 83424 - DNA, 1033 bp, Homo sapiens
taaataagctgtagtattcagagagtgggaacggagctgtctctcagatccccagtgcccagcagtacctgacaccaagatactgagtaaaatgtttatgacgttttataaacttgagtgctataaggatagtctcttactggtcagtgacatctttagcctttgctttgtgggattgtaggagtgcatgtgtgtatattatcacaaaagaacatcacccagttactatgggcccctgggattccatggaaaaaccacagggtggctttggatcaagttgggtacaaagcacttcagaggaaaagctctggagccatattgccacttaacagcttacttgaacagatgacttaacccctccatgcctcagtttccttgtttgtaaaacaggaaaaggctgttaatggttctcactgcagggagctgttctgaagattaagtgacatattataaaggagaggggcttagctcggttttagcacatatgaaagcagtcagcctttccttgtttattttgagcacttaactgttcctcttttaggatggagaggtggaaggccatcctgtgtgggcgctaatttactactgcatgcgctgtggagacctgcttgccgcttcacaggtagttaatcgagcccagcaccagctgggagagtttaaaacctggttccaggagtacatgaacagcaaggacagaaggtatggtgaatgaggtggcacgcccaggggcagccatgcagaatcaaaggggcatccttcactgtcattattctcttttccctggacgggcccaaaacaagtttctgcttgggggaaaaaggaagttttgaaagcaaatagaactctcttgggaataaggagtgaaaacattaaaagaatgccccattctgacactgatgtctaggcatgcatgcatctgtgtttgggaatttttctgttcctacaagggagggccaggtttaggagcatgatttgacttattctgtaaatctaaggcacatcaaggatgctttataaaatgggactttttaaa

SEQ ID NO: 83425 - DNA, 1148 bp, Homo sapiens
ccagaagcccctgtcttgctcatgttagaatttaaagtagggttaatgtcttaaggttcccccagaaggagatttgagtgcaagttgtttatttaggaggtgatctcacatgaataagggagtgtggaggccagggaggggctaagacagttaagggaaggattcactcctgtccatcactgcttgagtgctgctgggttgtgcaatggagttctaattccctggcatttctcacctgcccatgaaggcctcagcaaatagaaaaccggcaggccaatagatacaggtgcaggtagttgcaagtcaggttaaagcgatggtaccgaggggaggggatggggcagagacagtgtctcttaccccggatgaaggaaggcttccctgcttttatgtgtttgggacctgggacgctttcagatgcccttgaggatttttattgagtatgtatctatctgtctgttcccttatgtctgtagattgtccccagctacggaaaacaagctccggctgcattaccgtagggccctcaggaacaatacagatccctacaagcgggccgtgtactgtatcattggcagatgtgacgtcaccgacaaccagagtgaagtggcggacaaaactgaggattacctgtggctgaaggtaggcactgtttcccctgcccacatagggctttaccccttttctgtgctcaagtccccgcaaagattttacctgcttaatgtatgatgccaatacagtgatcaggaccagtgggttcctcgtctcctgtccccattttttgttgtgtaattcccagctcataaccatagccttaaacacagcttctagctgacatcattgagcatggctgctgaacagctacaactctgtgcatgtggctcagggtgtcatttgtaccaatgcatgtgtttctcttggggatttagttgaaccaagtgtgttttgacgacgatggcaccagctccccacaagacaggctcactctctcacagttccagaagcagttgttggaagactatggtaagattctggacataaccacctttcccttctcttgtccacttaaggtgactacttcagttttcctctgggaaaatttttcatctctgaacttttgtctttcttccaaaactcctatagattgt

SEQ ID NO: 83426 - DNA, 1703 bp, Homo sapiens
gatttctgtgactgtgagtaaactgaaactcctttgaaatcttcatttctctccttgagtgacttaacagggtaaaggagataaacactctctgtggtccattttaaggtccttagctctgtttctctcccacctaatgcaagcagttggagttttacagcacagtcacagtttccagtaatgttatgaggtctagagaaggtggaggagccaggtcacatttcacatggcagtttactgtattcagggcccccttgatcaattcagactcaatctggtgctttcttcctgtccagcaagtcctgtgggctcacagggctgctgcctgggggttgggccaccagtgagccccttctttctaagttggttttatctcctctcctctcctctctcccaggcgagtcccactttacggtgaaccagcaacccttcctctacttccaagtcctgttcctgacagcgcagtttgaagcagcagttgcctttcttttccgcatggagcggctgcgctgccatgctgtccatgtagcactggtgctgtttgagctgaagctgcttttaaagtcctctggacagagtgctcagctccgtgagtatttgggattggattgacagtaatgtaaccacagcacgtcccccttggggcgacggtggccacaaaaccacaaccaataaggatttgagcaaagggtaccagtcattttagagcatgtggacagttgagctttttagatgattagtgttaagggttcctgcttcccccccaccccccagcattagtattcccttgaaagttaagtatataaagtgatgttcaaagtactagctttgtggccagtctgattgcctggaaaatgctgaagaagcagcccctagagttatgggtctgattcccattagggctggctttaatgacattggaaaccccagccaggcatgtgcatacctgcctgggatgagagagtcaggggagagagaggaagtaaatgtggatgaatggctgcaggttccttattgttgcagcaaagtcatcccagagcacatgccataatcgtcagttggattatgttttcactcaaagaccagcatattagtaatttatggcaaagtgctgttttctccactctgggcctggggatgaattgaggataggatggtaaaagggactggccaaagcttatattagcaaactttgactgggctgcaggagtagatgctgctgggtctgtggattcagcttccatagtttctgggttgcatgggtcagaggggcagtgtggttgtgacccattctgacccccacaatgcagtcagccacgagcctggtgaccctccttgcttgcggcggctgaacttcgtgcggctcctcatgctgtacacccggaagtttgagtccacggacccaagggaggccctccagtacttctatttcctcaggtaacatttgcttttgaccatttacttcagctagtttcaatttctgccattctgagaatgactattagagacctcatgtccagactggaaactgagttgtttatttcccttacagggatgagaaagatagtcaaggagaaaacatgtttctgcgctgtgtgagtgagcttgtgattgaaagccgagaggtgagtgggtttccttttctctcctccccatggttttcagtgtgcatgtcccatgctcattccgtattgcgtgtttac

SEQ ID NO: 83427 - DNA, 1020 bp, Homo sapiens
gatagagcttttgatgtaagtttcaggaaaggtgtttgaagtgcaggttaatgtacaccctcgaaaattcaaaacacttcatggaatttacttaaaacaaaggagctgttgccagtatgtttgttgtataaagaaagacaagtacaatcctgggacttaaaaggagtttcctgtgtggctttttttttttttttttttttttttttgcctattcctttcccctttaatctgaaaacagagaagtttctcaaagtaatttgcaatctcagaattttaaaaattgtgtcaggaaatgatgataagaattaagttagctagttagaatcaaagcctttgtgtgtacaaggaggaatggcgttttctatgaagaagccctttggagtatgtgaggtgctgactttacatgtagagagatgaaatgactgtgatggttgtgttacatggggccggtggttgttttaaacagatcattgagcgcttgaagctggtgcccctgaatcaggaaagtgtggaagagagagtggctgccttcagaaatttcagtgatgaagtaagttccttcttcctgagttgtggaattcctttttccccacttccaccaaaagctttttcttttcctgtacctaacagctttaagaattctagttacagtaactatccagactgagttttccagagtggttccctttcagataccttggcctggcttttctgtgagtgcatacatccccatcagattattgtctgaattcctaattgagaaaatacagtcacttcagtgattgacatgttcttgggagaaacaggtttctggttgatctgtgaagtctggtttaattcttctattatccgcttgtgctagagggtattttagtgcttaactctgatcatctttaagtagttccattgggtacgtgaaacacatcatgattcactgccacctttgccctcccttatctgttttgggatttttttgtttttgaaacggaggagtctcactctgtcacccaggctggagtg

SEQ ID NO: 83428 - DNA, 1138 bp, Homo sapiens
acttgcgtctttagacaaaatggattggctgggcacggtggctcacgcctgtaatcccagcattttgggaggccgaggcgggcagatcacgaggtcagaagatcgagaccatcctggctaacacggtgaaaccccatctctactaaatatacaaaaaattagctgggcgtgttggcgggcacctgtagtcccagctactcgtgaggctgaggcaggagaatggtgtgaacccgggaggtagagcttgcagtgagccaagatcacaccactgcactccagcctgggtgacagagtgagactcctccgtttcaaaaacaaaaaaatcccaaaacagataagggagggcaaaggtggcagtgaatcatgatgtgtttcacgtacccaatggaactacttaaagatgatcagagttaagcactaaaataccctctagcacaagcggataatagaagaattaaaccagacttcacagatcaaccagaaacctgtttctcccaagaacatgtcaatcactgaagtgactgtattttctcaattaggaattcagacaataatctgatggggatgtatgcactcacagaaaagccaggccaaggtatctgaaagggaaccactctggaaaactcagtctggatagttactgtaactagaattcttaaagctgttaggtacaggaaaagaaaaagcttttggtggaagtggggaaaaaggaattccacaactcaggaagaaggaacttacttcatcactgaaatttctgaaggcagccactctctcttccacactttcctgattcaggggcaccagcttcaagcgctcaatgatctgtttaaaacaaccaccggccccatgtaacacaaccatcacagtcatttcatctctctacatgtaaagtcagcacctcacatactccaaagggcttcttcatagaaaacgccattcctccttgtacacacaaaggctttgattctaactagctaacttaattcttatcatcatttcctgacacaatttttaaaattctgagattgcaaattactttgagaaacttctctgttttcagattaaaggggaaaggaataggcaaaaaaaaaaaaaaaaaaaaaaaaaaagccacacaggaaactccttttaagtc

SEQ ID NO: 83429 - DNA, 1389 bp, Homo sapiens
tcacaattgggtcggggcaaaaggatctaatataggccggacatggtggctcacgcctgtaatcccagcgctttgggaggccaaggcaggtggatcacctgaggtcaggagttcaagaccagcctggccaacatggtgaaaccctgttgctactaaaaatacaaaaattagctgggtgtaagggtggtgcacacctataatcccagctacttgggaggctgaggcaggagaatcacttgaacccaggaggtggatgttgcagtgagccaagatcgcgccattgcactccatcctgggtgacaagagcaagactccatctcaaaaaaaaaaaaaaagatgtaatagaaaaccaggaaagaggggagaggaaaatgcctgcaggaagatgccagaatatgaaaatacataatgaccatgggaaccgggcattttggtccactgagtagggatgtgttttgcattttaaagtcatatatgactgcagactctgaattagaaatatttagagaggctgggtgtggtggctcgtttctgtaatcccagcactttgggaggctgaggcaggtggatcgcttgagtctaggagttcaacaccagcctgggtaacatagcaagaccccatctctactaaaacaaaaaattaaccaggtgtggtggcacgtgtctggagtctcagctacttgggaagctgagatgggaggatcgcttgaggccaggagtttgaggctgcagtgagccgtgattgcaccactgcactccagcctggctgacagagcaagaccctgtctcaaaaaaaaaaaaaaaaaaaaaaggaaatatctagaggtgtgaaagcaataacgtgtatggcaacaaatgagaggcagtgctggagagactgggagcttggagtccgcgtctcttgcagccaggagctgggtccgttcatttgtgccattgctgagggcatgtctggcacacggatgccaccaatatttacagagcagtaactccactcctgaccaacgctgctcttggtgctggggttacaggcacaccaaaagccaaaaagcctctgctcttgagaagctgacgctccagagggaaaagcagacacttgccagtggacccataagttatttcagattgtgagagtgtctggagaaaacgggtgcagggcgtagtggccagggaaggcctccctcaggagggggccttttgctgaggaggccagggctaggggaagtatgttccagctcagggcgcacccaccgccacggcccaaggtggggatgaacgtggcctgtttgaggggcaagaggaggccatgcgcgactggaatgtgaggagccgggcaggaggcaggtcagagggaggccaaggccaggtgcagtggggctgtggaggcca

SEQ ID NO: 83430 - DNA, 1046 bp, Homo sapiens
tgaggattttaatttgctactgtgccataatcttacagtgggcttgatgtttaatttcaggtgaaattcaccttgtggcttttcttagaaaaggcatttatagatatagttagtaaggaagttcttcactaaattgaagaaaaatcaaaggcatatctacctacttgaaattcttaacagtaaaagactgctgtgtaaataagccacagacttcacggtgctttggtctcaacagtatctgcctctgtcgtttttattttagtttagcagccactgctgcatcaggggcttttgttccaccaccaagtgcacaagagatacctgtggtctctgcacctgctccagcccctattcacaaccagtttccagctgaaaaccagcctgccaatcagaatgctgctcctcaagtggttgttaatcctggagccaatcaaaatttgcggatgaatgcacaaggtggccctattgtggaagaagatgatgaaataaatcgagattggttggattggacctattcagcagctacattttctgtttttctcagtatcctctacttctactcctccctgagcagattcctcatggtcatgggggccaccgttgttatgtacctgtaagcagatggtttctctaatataaattacactacactgtgttcacactaagcagattttgctctttttgtttcttgttttttttgagatggagtctcgctctgtcattcaggctggagtacaatggcacaatcactgcaatctccgcttcccaggttcaagcgattctcctgcctcagcctcctgggtagttgggattacaggcgcccaccaccatgcctggctaatttttatatttctagtagagacggggtttggtcatgttggccaggtggtctcgaactcctgacctcaagtgatctgcccaccttggcctcccaaagtgctggtattacaggcgtgagccaccactgcgcctggccagattttgctcttttttgagcagtctcagttactgtagaaggagatgtgtttaaatagtatatcactctg

SEQ ID NO: 83431 - DNA, 1016 bp, Homo sapiens
aagccaagatcacaccactgcactccagcctgggtgacagagcgagactctgtctcaaaaataataataatagttgcagatctagttgtttcatttgatatttgctgccaggagcagtcaaaactatgacaacatcaacacagttgtgctgtggaagcctgagaaacagccctatccagcctagggcatcattccctggggtcctggctgcctgctgctgtgcctatggggcagggggcagggatttaccctgccctttcctaacattatttggtgttcatcatagccctaattgttttctcattgtttcattacctcattgtttcattacctgtaggaaggcactgatcctgaaactgaagaccccaaccacctccctccagacagggatgtactagatggcgagcagaccagcccctcctttatgagcacagcatggcttgtcttcaagactttctttgcctctcttcttccagaaggccccccagccatcgcaaactgatggtgtttgtgctgtagctgttggaggctttgacaggaatggactggatcacctgactccagctagattgcctctcctggacatggcaatgatgagtttttaaaaaacagtgtggatgatgatatgcttttgtgagcaagcaaaagcagaaacgtgaagccgtgatacaaattggtgaacaaaaaatgcccaaggcttctcatgtctttattctgaagagctttaatatatactctatgtagtttaataagcactgtacgtagaaggccttaggtgttgcatgtctatgcttgaggaacttttccaaatgtgtgtgtctgcatgtgtgtttgtacatagaagtcatagatgcagaagtggttctgctggtacgatttgattcctgttggaatgtttaaattacactaagtgtactactttatataatcaatgaaattgctagacatgttttagcaggacttttctaggaaagacttatgtataattgctttttaaaatgcagtgctttacttta

SEQ ID NO: 83432 - DNA, 1035 bp, Homo sapiens
cgtcccggtgagatgggcacgtgtactgtaaccccaagacctcagcagggctgggggaaggggcaccgggtcttgggtcaggcagcctggggctgagatcccccttctggctgcatgaccttgagcaaggcattcaatctaagactcagtttctccatctgtcaatgggggcagaggatttgggtggggattgaatgagatgatgcaggcgaagtgcccagcatatagtgagcagtcaggagctatccatttaagtcattccgtgatgttgggccctcagctggacagtttgggggtgcgttatctggggaggagggaggcagatgctgatcctgctaccatttttgggtgtggacatcctgggaggctccctggaggaagcatgctgcccccattgtcaagcctgtggaagggattctagggccaaggaggaggatctgtttccaaagaagccccgaggtgagtgtctctttcttttgcgttgcccagctggagttcgagtgcatcaaccccaagaagcagaggaagaagaagaactataaaaactcgggcatcatcatcctgcgatcctgcaaggtgaaccagcgtgggcaagcacgagccaggggccaggtttcaggccacacagaagggacagacagagcactggatctggagccagcgaggcctgtgttcaaatcccggctctgccacatcctggccctatggccttctgagcttcacctcaccaggcctcagtctcctcatctgtggaatggagatattaacgaggcagagcatgtccagggttactcttctctcacattcctgtgtggaggccagggaaggcacgagctgaccttccagggcctgtcctggtgggagaattgtcattgcgagttgctgccgcccacggtgggcatgcaaggggcagaggacattgggtggggacaccctgtcctctctggcatcagcgtcactgtgactcccatggtacagccggggccactgaggcccagaaaggcaatgaagttcatgtcagcagtggccaggctg

SEQ ID NO: 83433 - DNA, 1298 bp, Homo sapiens
taaaacgagggtgatgatagtattggctgcatagcattgttctaaggctcctctgtgggaaaatcccttggtacagtgcctggcacatggtaagtcagtccccaactttggaaaagggtgatgaagtgacagtctttccccttttattgcagagccctcatcctgcaagtctctcggaaacacctccctgagtggcccctccatccactgcccctctgctgcagtatgtatcggcatcctcccaggcctgggtgcctactctgggagcagcgactccgagtccagctcagacagcgaaggcaccatcaatgccaccggaaagattgtctcctccatcttccgaaccaacaccttcctcgaggccccctagtttctccgtccctacacagggagctcctccccaagggtagatcggaccgttcatgctgcctataggcattatgtccctcaaaaaaaaactcctttgcctgcatcctgtgtacaacatgacatttttaaccaatccaatctaaaaatgtgccagaatccacctgtggcccgaatcgtgtttggttcctctttctactccactgcagatgaccaaacctgtcccgctgccactttcctcactgatattgggaggagggcaaggcccagccgaagttccactaaaaatgccccaggagaataggcaccggctggcttgccaaagggtttgggttttattgctttctgttttttcttttcccgacagcacaaagaagtaagggcagttattggacaggtgttatttaaacattctattgtaaatgaatgtgttgtttggttctactgcattgtggagcatgcgggggaagagaactgacccaggtagtgaaatggagcccttccctggaactaaccagtccttgatgttgtgtgactaagtaaagatgataaaccccatctgctgggggtgtcacttcacactcggcatgcattgtgaaagctttccatacccttggccattccctctctcctctctctccaaccccatttatgcaggaagggactgctaacaagaacgcttccatctcaaaccttttctctgcctgggaaattattttatgtttgtttttgaaataaaggatttagtttaagattctaaattttagagaaacaaacgtaggccttgtttactaatagccagacatcagaactgcaggtaggtatgttaatgagatgacttatttctggcagctcctggaatcctaatattgtaaatgagtgggacacacttgcatattgtgaccattctattgaggcccttctctgtttaa

SEQ ID NO: 83434 - DNA, 1092 bp, Homo sapiens
ctgaacagcaaatgaagtttgctgttcctaacatgttccctcctaatatattgtttatcccgttatgtttaaaattcatctgtttctttttctttgagttgttcatgttttccattcacttttctatttggttgttggttgtttttttaacagatttggaagaactcttagtatcttaaggaaatttgcttttatgatagtacaagtatttgctcctgccttttttttgtagccttgctctatctctgtagccactgtcggctttcatttgacttttctccatctccgtgttttaacattgcttatctttggcaacttccttttcccttcttagagcttcttgcacaaacaagcaaatacattgatctcctgaactttgtgtgcgggccgtttgatatctcttctaactgctcagtggtattgtttgcttactcctggtttcctatacttggaactgtgtattcttttcacatttacttgaggtgtctgggtaaatgaggtgttagtgcatctaaggcaaaaccctagaaggtagtatgcttgtcagcctgtggcaacaaagtatgaactccaacccttactctgcagtgagctcaggttatcattttcgtatgttctcttttgattcacgtttagtttcacattttctgccctaagcaacctacaaccttgccaagtcatttgactttcctcatcagtaaaatggggataatgcctatacatcaagttgtagtgattaaataaggccggaaacatttcagggaagaatggaagggctggagtagagttcttaacttttcctttcatcttcaagtcctgcattttcttttcttcctcctccttctttctttctttgttttgtttgtttgtttgtgtgtttgttttttgagacagggtcttgctctgttgcccaggctggagtacagtggtgccatcatagctcactgtaaccttgaactcctgggctcaagcaatcctcacattagcctcacaagtagctgggaccacaggcatgcaccactatacccgactagtttttttgtttttttttgaggcagtgtcttgctctgttgcccaggctggagtgcagta

SEQ ID NO: 83435 - DNA, 1027 bp, Homo sapiens
caaccacaaactcccaggctcaggtaatcccccacgtgagcctcctgagtagctggggttaaatgctcttggcataggaatcttaaatgtatttctacaagtaagctagtcgctctttatatggtacttatttcctggtaggaactatacaaatgaatcagtggaaaggaaaacttgtgtggattctttgaactatctcaggcagacagctgtgtttcagagccatctttttgtcattctaaatcccttcttcctactcctgcattcttgcaacagaaaccaggcaggaagtgtcctcctttgctaggaattaaggctccacaagaagaacgctccctgaagcttgcttcagccctgtccttagcagtgggaggatttccgtcttgggcccctatgactctgatagaaattcaggcttcccccagcgaagattttgaacttaagcactgagcagagccagtgaatgcacaagttggccccatctactcccaagtcacgcatctgtctgaatactaagaacattctctattagtaattttctgtgttaatttggtatgacaatgtggtcctgcaaatgcagaagttggcaggaaacttcaccaaatgggtgagatcagagggcaccattttgttctctttggacagttaactgcttttggaatgaaatttgtcagatttgcaatctcttttctttcttgaaacctcctagataattggggtatttggtctcttcacttaaactcttctgataccacagtggtccagattccttgattatatttctgtagctaacttccattcttccgttaggccagttctctacccccacaggcactctgactttcatccttcttttctatgtaaaatagaactttaaattccattcgcccttgaaatatggtcatgtgccacataacgccattttggtcaatgatgggtgcatatatgatggtggtcccataagatcataatatcgtatttttactatgcctttttctatgcttagctatgtttagatacacaaata

SEQ ID NO: 83436 - DNA, 1033 bp, Homo sapiens
actgatagtcagaacaacattctgcaaaatttgatttaacccttgaagggggaagcatgttttcagggaagccacatttttttttctgttttctttatattccttaagatctgttttcctcatcaagcatgatattggccatgtccttggtaatagtgggttttgtggctatgctcagattttcattgagaatcagaggaaaaggttgcttatctgtattattttgggctttatatgctgtcttcctccatggtctctttcatttatctttgaattggctggatttgactggcagaataaagaagggtggggcatttatttaaataagtaggccagacattacatcgcacagccgaagggctagtgggttatatttgttgtcttcccttttgcttagtttgacccttaactggtaactcacaataacctcaagaaggttggaatttctcaagagaacaagaaggaagtggaaaagaaactgactgtgaagcctatagaaaccaagaacaagttctcccaggcgaagctgttggcaggagctgtgaagcataagaggttagtcagcactcacacaactcagatttctctctgaccgtgtactctgaaacaccacttgtaatggaagccagagccaacgcttgcctcgcgtgagtcctggtgaagttcccttggtgtgctcacctatctctccctttccagatttgaggccttctataggctttgaccctcgtctctctgatcacttattcaacaaatataaataatagctactcttcagtggggatctgccacaccaggcattgtgttaagtgcttcctgtgcataatcccatgtattcttcaacaaccctatgaagtacaattataatccctgttttgtagatgagaagaccaagagtttgagaggttgagacccttctttgtgcaagatcatagagaaacagagagctagagttcattatttgggcttctgtctagaaaaatgaggtagtgagtcttgtgaaaggatctgtgtagggtgtactgagagcaag

SEQ ID NO: 83437 - DNA, 1629 bp, Homo sapiens
gagaactggtggcccctctctgaggtccaaagggaaactggactttgtactatttttgtgttatccacaccctcagatcatgcagagacttgactttgtctttaaaaccttttgtgattccaaaataatatgaaaacaatctgaagtgtatatctcctccccgtccacctctctcccctctccttttcctttcagaatgtccagaggaggtttatgaccctcgatctctatatgaaaggctacaggaacagaaggacaggaagcagcaggagtacgaggaacagttcaaattcagtaagcttcagaaaacagagagttcaaggggctctgtggggtacttttgacgcacttttgccttgtgcagcacttttcctaactagccgtggaattgtcttgattttcgagtctccggatgcttatttggtggaaaagagacagccttcagccttctagaccacattgaatatttttgtttagagctcaaaacacccattttaattctatggtaatatttagtaatgggaaaaaatgccttgtttttttttatgccctgttatctattcaaacgccatggtatttaccagttcttttttttttaatcccctgaagaatctgctgcttatttaaaaaggggaaaggaaaaatcttatttttccctttagcctgctaagtgtgccttgtttaattatttcctcagaaaacatggtaagaggcttagatgaagatgagaccaacttccttgatgaggtttctcgacagcaggaactaatagaaaagcaacgaagagaagaagaactgaaagaactgaaggaatacagaatatcctttgtacttggaggaaaacctgtaaggtgtccattttctcatcagcatctatggatgttgtctcctcatcaacagaaagagggttttctacctggtgatctctcaagtccctttgaacactgatattcctgtaattctgaaaagctggtagtggtttgtggagtttgtgttgtgtgcaagagtgttatagtcaaaagtccacatccttcttagggttaactcaaggcatcaatcctactagtactgggattagattctgacacaggtgggcagtgcagtcagcttcatccaggggagaaattgggctctgagttttaaaagaacatgtttagcaactttcctatattcttagtaagatgttctctagtggtatagcatgccctgtcctgatagaagggctgagaaagcagcaaagatgactttgctctagatcagtgttgccttttggtcatccacttgaatgtcttcatagacatcccaaatgaaacttggctgaatcaaaattctcaatactgtgccacatcacccccactctcatcacactgcccttccccaaagtctcttctttttctggtcctcccagtcccagtaactggtagtcctatgcctccaggtgcctgggccaagaactgtttccaaaacgtactccaaatctcttgaattgttggtatctactgctactgtagtagtagtagactttcttctcgactcctgtgaccatctaattggtttgtttctgctctcatcctcaataatctattccttagacaagaaagggaactttaaaaaccatacatggcatca

SEQ ID NO: 83438 - DNA, 1037 bp, Homo sapiens
aataagtaatatacactctgctatctttatttccttctctcctctttgaagaaaagctcaggtagaaataacagattcggtaatcttctgtgtcaaaatatgcataaaatggttgaggtgattgtgggagtgagaaaagagaaggattgaagttcaaatcttaaatggcacagacaaggggtttacagggaggaaggtcagaagagatataaatgaagagtcagattagtattcaggaaagtacgtggaactgaagttgggagatctgttcttccagtctcactttctccattcatggtttgtgcaccttccctgctatacagactggacttgaacactaagtcttcaatagctgagattctccatcttaatctacttggaggcaagagcaggtgaatcaagatagtgtaatgtctcagaaacaggaatttcaagaagaaacaatgtcagatgttacagaaataaaggaggatgagagctgggaaaaggatgggatgctcaggaggccaatttttctagattagagggacagagaaatagctgcaatatgagatttactatggaacaccaggtaataagaattatcccaggtcctcttgccaactgtgtagataacatcgatgttaataaaaattctctgatatgtcaggaaaaatgtattcatgtgctttcatcaatggcctataaattaaactatttgagagttttttttttttttgagacagaatcttgccctgtcgctcaagctggggtgcagcggtgtgatcttggctcactgcaacctccgcctcccaggttcaagcgattctcctgcctcagcctcctgagtagctgggattacaggtgcgtgccaccgtgcctggctaatttttgtatttttagtagagacggggtttcaccatgtcagtcaggatggtcttgaactcctgacctcgtgatccatgcgcctcggcctcccaaagtgccaggattacaggcatgagccaccgcacccggccgagaattttttcaattcaaagttggaagataatttttag

SEQ ID NO: 83439 - DNA, 1505 bp, Homo sapiens
tttaggtagaaatgtaaaattctagggtttgtttttattgttgttgttgttgtttttggcatattggaagatttttaaattttctcttttaaaaatataggccgggtgcagtggctcacacctgtaatcccaacactttgggaggccaaggccggtggatcacctgaggtcaggagttcgagaccagcctggccaacataatgaaagcccatctttactaaaaatacaaaaattagccgggcatggtagcacacacctgtaatcccagctactcaggaggctgaggcaggagaatcgcttgaatctgggaagcggaggttgcagtgagccaagatcgtgccactgcactccggcctgggcggcagagcgagactctgtcttaaaaaaaaaaaattatatatatataacaagaatgaagagagacatttactgggacaccaatggcattgccgtatcctagtatttatttcccaggtttaaatcatatctaatctgataaattcatttccttcagacatgattatttttctccatcttataaaattaaagtaactaggaatgtttggctcagaaaagcaacaaattaggaggaacatgggaattgtcttcaaacaactgaagtatggtcatgttagaaaagatttgattctttttgtatagtcccagtggattgaacctatgtattgaatttatagtaaaacagatttcagttcagtttaaggaagaactatcctaacagtcaaatctgcttagagagggagttggctgcctaggaagggaatgcagtggtccctcttgaagttttaatatatgagttggatgaccttctcctgggtgtgtatggtaaattcagatgtcgagtggattatcatattaggtgggctataaggactatcccaccctgaattatttactaggaaaaatgggtgatggaaagaaaccagatgattaatacaggatgagaaaggagacacggttaataggggataagaaagggggaaattgagggttcggaatgtctctcccaaccattagagccctagaaagttcacgttttctctgccagagacatttaagaaattgttggctctggtttcataagaggttgttctgtagaacttgaggaatttttggcattttcacagagactgaacagttctgcttcagtaatgagcctctggctggagtcattgagtgctgctaaatcagaagtgtccaggttgtgggctttaggtgggagcaacagcgtctgtcagttgatttcatttctttctagtaattttcacaattcgctcttattgttacattaaactaaacctcagcaacagtagtattcaggctgagactattctcttgttctgaacgtttgggtttgttttttcagcttccatttctagctttactaaataaaaatgttgcatgaatattctcagcactggaatttgaagtaggaagaaagctgaagtcgacatgtctttgttttcaactaagatttagtgttttct

SEQ ID NO: 83440 - DNA, 1965 bp, Homo sapiens
acctgattcttgtggttggtatctaaaatggaggctagtcttgtgggactcacccctcaacctatgggatctgacgcggtctccatccaggtaggtagtgtcagaattgaactgaattagaggacacccagctggttggtgtctgctacagaattggttggttgcttggtgtgtggggacatatccctcacagaattatactgtgttgattgttgagtgagagaatagcaaaaatgctttggtttggtttgggttttttttttctctatatcctcaggcaagttttatttcggctttggaaaaaactgctgtttttcttcctgtgagccccagatgaagttgttggtttgtatttaggagtcacaatatgtaaaaaatacaatgaatacaatcattcatgcatagtgagggaagtatttatattcagagaggtgcatgtgaatgaggatcagctaagggaaccgatatttaaattagttatctttcttctagtgtgtataggtgaattcaagataaatgcacatttgagaccctgcccttgtgctatggaaagataaataaatcaatactttttttttaacttcttttttttccccctcgccaggcaaggtcggtcttgtgctgttgcccaggctgtagtgcaatggccctcatagctcactgtagcctggaactccttggctgaagccttcctcccacttcagcctcctaagtagtgcaccatcacacctggctaatttttaaatatttttgtagagagagagtctcactgtgttgcccaggctggtcttaaattcctggccttaagtgatgctcccagcttggcctcccacagctttgggactgcaggcatgagccactgtgcctagcctgtttgtctgtttgtttgtttgtttgtttttaatagagttggggtctcaccatcttgcccaggcaggtcttgaactcctgggctcaaacaatcctgccttggcctcccaaagtgctcagattgcaggtgtgagctagtgcaccaggccttaatttcttttcttttttttttttctttttctgagacggagtcttgctctattgcccaggctggagtgcagcggcgtgaaatctcagttcactgcaaccttcgcctcctgggttcaagcgattctcctgcctcagcctcccaggtagctggcattacaggcacatgtcaccacagccagctaatttttgtatttttagtagaaatggggtttcaccctgttggccaggctggtcttgaactcctgacctcaagcgatcctcctgcctcagcctcccaaagtgctaggattacaggtgtgagccaccatgcctggctgaatttcttattgtatgtgtttcatagatgcctgaaagattattgcaaagctgaattttttattgtatgtgtttcatagatgcctgaaaggttattgcaaattgctccttatgataaacatttaaaatatggattaaatttctttttctgtggtttagtttttagattcttttagtctcctttgctaccggaatatgttaattaagctttggtgttagaagattgacttcactttgcctagtaataaatactaacagcgggctctctgttagtagttgttgttctctaaataaattttatgatataggaaaagtcagctaaatttttaaaaatctaaataactgtatcttggtagaagtgccttctggccagaaataagtctttatttgaaatatagatgagttagccagatggcaaattcctcttagttgctgtcctgcattttgaagtacagtgtgacttgaacatcagagtaaaaaatgttggaaagcaataatctatatttactcacaaaaggaaatggattgacctattgcttttgctactgaaagtgaagccttaaaacaacagaacacagaaacctgattctggtgtgttttaacatgtacaatctaattaattttagaatt

SEQ ID NO: 83441 - DNA, 2062 bp, Homo sapiens
acctgggttccagcttccttacggaagagatgagctgcggctgctgttagggttagggccaggcctgttctcagtccgcgcacccgctccttgtccggagtagccgaagcctggggcttgcgggcccagcctgaggggagctgagggtgcccgcgggaaggcatctgggtcgcggcgaggaccctttcaggcgggcccaacactgccgggcgtttaatggggtttccccaattttctgctaggtagggccacccaggtttcaagtgagtagcaggctccgttccagaggtcttggaacaggtccaggttactcactcggatgtgcggcgtctggttggaaatggttgaatcccagaatggcagtgcaggatgggaagcacatttattgtgtgccatgtaccagttgctgtgccaagcgaattttctattacggaaaacaagccagctggcccgttttgcagaaaacttaagaaacaaagagagttgaagcgtcatgcttgagagttggtggtccttgtgactgtcagtccacacagaggaaagggggagacctgtttgttcgtagtcgtggttctttaatgttagtggaaaacaagatctcctggggcccttttaaaatgcagtttctcagactcccgcacgctcgggtagcccgactggttagttcaggagtgggacccaagaagccagatgcgagcctggtgatcggaattcccgatgacctcttgcctaccacctgtgacataagatttgtcgattcatcagttatttggtgtattcatgtgtccacagggacaccataaaatggaaggcacccttctgaaatatttgaagggaatcagtgggtagactcctttttgatacaaagtattgagccgacagcagcttttacagtcttttagttagatgacctgcgaacaatttgtaaggatctgaaagtagaggctgcccgattatctttctcaactgaagtcttcatgtccttaccctgtggggaagtgcttcatgatataagaaaggaataattgtgtcaaaaccatttagttgattatcagtcttcactttcatcttccaagaatggtgatgcttggttagaatcaagctgctgctttagctattgaaaaccacgtatgtggtaaatcaagtaacaagtgcgatgtacgtacagggtcagtcatagtgtaattatgcctttatggcagctaaattaagcattttcaacgtgttcaccattagtcaccttttgaacatactttgtcttcattcttaaatattatgtttcactctttactatagaatatgttgttaagattgttttgtctaaaatcaagtatcgacaagtttaaaaaaaagattgttttgtgtttggttttctgtatttccactatgctctatggaactatgggtttgtttttgttcaatttgtttggtatttattagacttcttgaatctgtggattagtgtctttcattaattctgtaaaattctcagccattttatatgcatatattgcttcttcccattgtttctctttttttttttatcgatttaactaaaccttttcactcttttctctatgtcttttactctgttctttcgtagtacattctggataatttattctcaagttatttccattgttattaaactcggcctctgaaatcttaaatcatatattgcaatttttagtttctgaagttctgtttggtttgtgacacttttacagttttttatttcttactattttgaggcttaattttatttctttaaacatggaaagtatagttgtttttataatctctatgtttaattccactgtctgaattccctttgggggagtctgtttctgttgtccattattcctgctgttttacttcccagttcacctttactttgaagctgtagttcttttgggcacaagattaagatggagagggaggtagttgtcagactccactccctggatgggctcctggcttgaacttgtttctgttatctcataaaggcactgaaactttagcttttaggtcagagaagtcctcaggatgaaatccattttga

SEQ ID NO: 83442 - DNA, 1054 bp, Homo sapiens
catttgataaaactcagcacgttactgtgcttaagatttgcacatttcagccgggtgcggtggctcacgcctgtaatcccagcactttgggaggccgaggtggacagatcatttgaggtcaggagtttgagaccagcctagcccacatggtgaaaccccatctctactgaaaacacaaacattagctgggtgtggtggcatgtgccaataatcccagctactcaggaggctgaggcaggagaattacttgaacccgggagacagagtttgtggtaaactgggatcacaccagtgcactccatcctgggcaacagaatgagattccgtttaaaaaaaaaaaagatttgcacatttcagtgtatgtaaattcgactcctaaaaacttgaagtttattgaagtctaattagtgatatgcatgctgaattatttaagagaaagtatactgatgcctatagtttactttgaaatatgtaaaaaaaactgaatggattaatgatggataagagatggatagcgataaagcaagtttagtaaaatgttagtagtagagtctaggtggtggggataaagcaagtttagtaaaatgttagtagtagaatctaggtggtgggtatatagttcacagtttacagtgaactctaattcaattttctgtatgtttggaaaatttcataataaaatattgggagtggggagtaaatgtgatgatagaagctatctctttaacacacttagggaaaaatccgaaaacattttctaatgagagaacatcattaaaattttcaggatgttacacattttgctattcatgctatttgacttagcctttgtgggggagggttggaaaaaaagtcacatcctctaacactattttggaatgataaggtgaagattataacaatagtaatttagtgcccaaagtctggtttttcttctttatggtcactcttgtaatcagcttttccttcctaggcagtgtaattctgcagtcctattttcaaagaaaagaaagtgttctttctcactgatctgtactatggctgaatgcaagca

SEQ ID NO: 83443 - DNA, 1091 bp, Homo sapiens
catattaaaagtattgccacttaggtggtaagaagagtccttctactaagcactggcatccagtgataaaaattattaaatcagttgatgtttgtcacagatgtgtatttaaattgtgtgactagctttttttttttttgtctcaaagttgacttcaccagctaatgttgtctttgaagttaaggtaaagaatataggtattggccaggcacggtggctcacacctgtaatcccagcactttgggaggctgaagtgggtggatcatgaggtcaggagttcaagaccagcctggccaacatattgaaaccccgtctttactaaaaatacaaaaaattagctgagcgtggtggcacgcacctgtagtcctggctactcgggaggctgaggtaggcgaatcacttgaacccaggagatagaggttgcagtgagccgagatctcaccactggactccagcctggcgacagagtgagacttcatctcaaaaaaaaaaaaaaatatatatatatatatataggtattacagatgtgttgcctttatataatctcatcttactcattttctattccgttcagtctcttaacccttgatgatatccttaagcagcgtatcatttaggttcattttgatgcttcgtaagatggacctcatgggaaatatatggagccattttttcctttgtgttgatatgtactgtacatgtcacttatggatataaccattctaatggctttttaggctgacctctccaaaagactgcattcaaagatagtctcagttcattttactggacaaggaaattaacatttttgacccaagaagaaatgccctttagtatttcagtttgccccctagttcagtcggtgtgtccttcctgctgtgccaggttctgtggtaggttctatacacagtgatttccaaatgtggctgccatcagagtcacttggggagcttttaagaaaacacaagcttgggccggcatcccagaaattctgattctggctattcgtagtgggaccagggatttgcattttaataagtactctaagtgattctaatgccgtctatgggatgatcaagctacaatccct

SEQ ID NO: 83444 - DNA, 1029 bp, Homo sapiens
agaaagacaactctttttttatgataaaaggagcccttgaaaaaaaatgcacacatccttctaatgtatttctatatagacaggaaaaactatacatgtggttttaaaaaaatcaatgataactcctctggtctataagaatatggtttggcaatcaactttgtaacagaatgataaaaagaaattattgattgattgcgaattctgttatccaaagctatctctttgtattggaaacctataaaaataaccaaagataattcttcattagaatcctaatatctataaaatcagactaggaaaatttgagtaattaagtggtcaagaatcttttattcattttcctttttctcattttcttttagaactgccattggatgtccagaatcccctgtagttgataatgttgggaataagctctgcaactttctttggcattcagttgttaaaaacaaataggatgcaaattcctcaactccaggttatgaaaacagtacttggaaaactgaaaactacctaaatgatcgtctttggttgggccgtgttcttagcgagcagaagccttggccagggtctgttgttgactctcgaagagcacatagcccacttcctagggactggaggtgccgctactaccatgggtaattcctgtatctgccgagatgacagtggaacagatgacagtgttgacacccaacagcaacaggccgagaacagtgcagtacccactgctgacacaaggagccaaccacgggaccctgttcggccaccaaggaggggccgaggacctcatgagccaaggagaaagaaacaaaatgtggatgggctagtgttggacacactggcagtaatacggactcttgtagataagtaagtatctgactcacggtcacctccagtggaatgaaaagtgttctgcccggaaccatgactttaggactccttcagttcctttaggacatactcgccaagccttgtgctcacagggcaaaggagaatattttaatgctccgctgatggcagagtaaa

SEQ ID NO: 83445 - DNA, 1056 bp, Homo sapiens
tgttactgtatataaatctacaactgcttctgactattacagagtattcccttgtatgcctgaaagtattatattttgttacattttcatctggtgatggtcacttaggttactgccaaatttttgttcttacaaacagcactgcagtgaacagcgcaaatatgcattgatttttggacctgtgtaaaaatttatctacaactgttgggtatatgcatacttaattttattattgccagatcattcttcagaaatacttgcatcagtcaattatattgtttaaacaggcagcacctaatgagtacctgaaatgaccatactaattcccatatcacaaggttattctctggattaaatgacttaagatgatagtttttggggctttttttttttccacactaaaacagagacccacaatatgtaaacaaataagtggtgagttcttaagcagttagaattgtttaatggaaaacatctcattattgaagttcccctgaaggactttttaaagatttctgggatcacaccactgaattaaggtgtataatgccactttggagcaatgtctagaatgttaagtagttccttaagtttggttttgtttcttgtaataccattttatgaagtctaagcatgtagtggtatttccagaagaaaacttcaaaatgaagatgcgtatataggcccttgcttccataagtcctcaaccgggattgtcgtctctcttcctggcatttctctgaggtaagtatgaaggtgatgttgaccttcctggcttgtctcagttggcactgggcctctgagtgtaaagctgagagtaggctgtgatctccagttttactcctgtgcttttaccccaggacacatagtagtctttgtctgtatccacctgcccattttgtctgtgggtcattgtggacagtgactggaaatgagcacatatggtatacattcatccttacaggtcatagctcaggttgtctcttctatctctttccttacatttgtgttcatttcttctgtccctttttacctccacacctccagtttgaattc

SEQ ID NO: 83446 - DNA, 1114 bp, Homo sapiens
tgggctggtcacctgaggtcaggagttcaagaccagcctggccaacatggcgaaacctggtccctactaaaaatacaaaaattagctgggcatggtggcatgtgtgtgtagtcccagctactcaggaggctgaggcaggaattcacttgaacccagaaggcagagattacagttagctgagatctcaccactgccctccagcctgggcgacagagcgagactccatctcaaaaaaaaaaaaagactaaatgagaaggtgggtggtatgggtaatgagagccggggtgtcatgaaagtcagacttcctgatgaaggtggaccctcagctgggtcatgctatagatgaggattttattgtgcccagaggagggaaaaaattggtttcttagctaagggaacatcacaggcagaagtccagagacagagaattgtctgatgagagaagacagtgttcagagataggacacagactgagtagccagctagaaagggtttagggcctgaaaagccaggcagagggatttagatggatatgagaagaaatagaatgctgaataggctttccagcagcagggatggtggttatgtgaggtttccagaacttaggaggtaccagggaagtcagtgggaatcatctgatgttctggagctcctctggtggctcccaatgtagcagtagggaaagcacagctatgagaaggtgtcatgttcaacagatagacctttccttaaaggggaactcatgtgacatgagcttaaatgtaactaaaagagttcacttgttgctttctcctgtctaccatcagcatttgtagaattcctttcagggaacagcttaaaaactgagccattaattgttaatttaattatttataattttgcaacttgttagtgataagtggttctttttaggattctaagtaaaatatcatttttagtttataattctaggtttctgtttggcttgcataaatgaatgtgagaatgaatattttatttaacaaagccctaatgtaagttttattaagtaaaataacatagtgtatttaacaggatacttttgaaatttccaaatctataaattaacctagtgactttaagaaaaaaatacaag

SEQ ID NO: 83447 - DNA, 1050 bp, Homo sapiens
taaggccagagcattgcttcaggccaggaattcgagaccagggtgggcagcatagcaagactcaatctctacaaaaaattttaaaaaatcagccaggcatggtggcatgcacctatgttcctagctacttgggatgctgaggcggggggatcacttgagcccagtagttcaaggttacagtgatccatagttgtgccactgcactccagcctaggcaacagagtgagaccctgtgactaaaaaaaaggaaaacaaaatagtcaaagctctttggctatgttttccctagaaattttaattgaagtctaatctagtctccaattctttaattgcctcttccccctccttagcaatactaatttgctgagcaaatcattctaccctttcattgttaattcaaggattatgtctttccaaacaggtgaaaataaattgactatttctgaatccagtattagtgaccggcttgtcacattggagtcctgggctaatgatcctgattatctgaaacgtcaagttggtttctgtgcccagtggagcttagacaatctctgtaagtgggagttgtcctttattaaaatgtccgtttccatttccagactcatttctttcataggctcactggtcttccttttgcaatggtaagtatgagtcctcataaggacctctactggcaggttggatatattctagcagaaaagtatcctagagaccctttagacaagaattacatggtatgcttctaatttcagcattttcctgttcaaaaacctttactggcacccagtttcctgctgcatcaaagcccttaattatatggcactgtctaaccagctctttccaacacaaatcatcccactgtcctacaaacaggtcctgatgattcctacctctggacctattcccctcacttggaattccctctttacttctctccctttcccaactttgctcttcaaaacccaagtcatgtcttacctacatcatgagaattgttcctgatttttctcttttcctcctccaagggctgctgggacaaaaactactata

SEQ ID NO: 83448 - DNA, 1050 bp, Homo sapiens
tttaacaatattgagtcttccaatccatgaccatggtatatctttgtgtcctctttgatttcttgcattagtgttttatagttttcattgtagagatctttcacttctttgattaagttattcctaggtatcttattttatttatagcttttgtaaatacaattactttcttgatttcttcttcagattgtttgctattggcatatagaaatgctattgatttttgtctgttaattttatatcctgcaactttactgaatttgctttttagttctaatagtttttggcagatttttttaggttttcctaaatataagatcatattatccacaaacatggataatttgacttcttcctttccattttggatgccctttatttcttcctcttgtctgattgctgtagctggcactagcttcttcttttctccacagcagcctgccttagaaacatgaacactctttcttttgcagttttaaaagaaggtagacagctgacctatgagaaagtgaacttgagtagcattagggccatgctgaatagcaatgatgtcagcgagtacctgaagatctcacctcatggcttagaggtaggtaatgcttctacagttggaccctttgggggatgagagggtaattattttaatccttgcatagccagttgtcttagggctggtgcttcccactctccctgtattttggaaatgttgctgacttcagggggaagtctcaaagagctgcttatgaacagaaggtaccataaggcactagatgtgtcaggattaaagaactgtttgaagaatggctgcaaacaattctttgattctgtatgttgccaaatgccttatgtagtttggttttgtactttttgtcactgaggatggacagaggaggaagcaatagtccaccagaagttttaataaggaaaaatacactcaaccttcccagtagtcagttatctttggtggtcttcaggccctcatagttgattgacacattttttggttttgccaggctcgctgtgatgcctcctcttttgaaagtgtgcgtt

SEQ ID NO: 83449 - DNA, 1147 bp, Homo sapiens
gaccctatagaacagagtgagcatcagcaagagaagcaagtaagatggtccccaggaaggctagcccaactaagtttagaaaggagaagagcagttgggcaatgtggcgtcctggccagtcaatgtgtgccgattgtttatgagcaacactcaagttgatgttacaagccagctacctgtaattcatcatatcccataccctgccttggtcttatttttgacatagctttagtcacgtggctccacaggggtccagagcctggagtgatgaacccagtttgtcatccccaggaatgactcagcctgggcccctgactctgcctctctacgtttgttgtcttttgaaacgggttatctaattggctgtgcacttaagggaagtagagtgtgtctcatttcacccttagctataccagcctctcttctgaaagaaaggcacagtgattccagctgtgattaatcctccctattacttctacagcccagaatttctcagtttgagcatatttggagggtttagttatcagggcctcacagacagatgcagagtttaaaggttggatatcttcatgccctttttgatctttgtttctgtaagaatgttaagatctcaaacagctggatctggtcttaatcatctttgagctctctggtcctgtggtcttgcacataatacaaggggtcattaatgagtgctgaaatataaaactttagaactaggtatcttaagtatgatcatagtctccatagtagatatatatccaaaatagagttggaagaggacattaaaagaattataagaaaatttagctaaactttgagcagcaacaacaattttaaaagggatatagggacaaagaaaggaaacctggataaaatgaattacaagagtcaatccccagaggagactgaaaatctaagcattcctgttaccataaaagaagttaaaatggttatcaaagctacctttgccttctcttccacaagtactaaggctagtttcacaggtgaactctttacaactttcagggaataggtagcccaattctatttaaacttggccaaaccatagagaaagtaggaaaaccacaatgttatttttagtaatcataccaaaagctgataaaactcataaaaagaaaaaact

SEQ ID NO: 83450 - DNA, 1457 bp, Homo sapiens
gtggtacttccatgagaaaccatagcagacaatgccctcccaagtactgaaatcacactggaatcccccttgttgggttcatttgattgtttaacacaggatgtgttgtgtcattctgaagtttttatttggggcagaagtctttatggagatgtaaatgacagcgtttctgggttatgcataacttctcactggtcagagacaccggtgtgtcaagcatggatattgcattgcaagacttgaatctataaaaattagaatcacacagtcagtactacaagcaaaacagagaacctgaaagaaggtgcacagactgtaagaaaaaacccaagtttgtgatatttcagtgattccaaagaacattctaggttttttgtttgtttttttgttttttgggttttttttttttactgcagaaaattggtggtattttcacattcatagtgtttctatccaatttcagtacccacatttaatgaggaaaaaatgttttaccaatgaaggaggaattcttaaattagctgtaatgttaggttggagaaaatttggtatttagggtattttcaaggtaccatcaaatcagatttctgtttttttgttaaaaaaaatttttttaatcagtattgtttttacaagtaatatactttgaaactcttgaactaatagtctcaaaaactctagaggacagtctgagaacacgtatttctattgttctaaataaatacatgtttttgaatagttcaatcatgaattattgactatgtcttcatcaaaagtgttaatccctctcagggtctctggtgaagaccttcaagagtttggttttttctcccaggaaattggaaggtagaattgtaaattcatagaacttcttttataatggtgtacctcagcagctgcctttcaatttatgccaagtccttacagagtttatacttgaatagtaaatatgtcttctgagttttacagtgtcttaaactcaatgcacatttttttttcttctttttccaccccttcttgtttgtagttcattatacctgtcctattacagaactgatttccttcctggctgtacatgttggggtgctggatttttttccgtgtctttagtcttccataaatccacacacacacacacacacaaaaaatatatatatatataaatatatatgtaggatacatgttctcttctttagcttgtggtgaatacagtaatttgcattgaagaataaaacatctgttgccttttttgactaagatttcacaactttcattggtgtatactgctaaggttccaagacattatactctcagactttaagggctacttttgggagtaggagagaatcaagtattagaattaagaataaggccacttactcatccagcagattgttattgagcacctaatatgtgctgggcactgtgcctatgtggcatacaaaatatgcttgtag

SEQ ID NO: 83451 - DNA, 1294 bp, Homo sapiens
tcaggccccgcaggacaggagtgcgaggcgggtgtcaccgttgatcagcgcctccatcacaatccccagccgccaaccctcagctgtcagcaaagcctggaggggttgagcgcccgaggcccctccacccctccctggcccccgcctcccggactcctgaccaaatgaccccccccggcaggtgtttcgcccgtgccgggttcatgctcacaagcagacaggtatggggtgatagctaagagcctggagaacaagtttttattaaagtggagtcatgacattgaacgttcatgtcacaaacgtgccgagtgtgttttcttctgtttggacttactagatcagtcagtcattcttaatcgttgaagatgggtgatgggaagttcgttttgctactcttttttctcttgtgcatgtttgaaaacgtccatactaaaaacatttttttaatgcattatttgaaatagcacctaatccaggcatgtttttcagctcctccgcctctgatgcagaatttgatgctgtggttggatatttagaggacattatcatgggtaagcttttaagatactgtttttaaggacttgcttgtttctttaaggacattgaaatcaatttggagagttaattttaaaaagagaaaacatcaagctgcctgcaatttttaatgtagcacaatgtaatacttaagtaaaggcttactgcagtttgtcttagaaacaaacagcccagtactcctgaaaacatctaataagcatagattcagaggctggaagggactgactcaggctaatagggcaccagcagtgtggcgttcttcgcaaaactataggaaataatgatctactctatttcttatgtagggtaagagcaatttcaattttagatagttttgagttttaacattttcatgccataaaacacataaaaccaggccaggtgcggtggctaacgcctgtaatcccagcactttgggaggccgaggtgggcggatcacgaggtcaggagatcaagaccatcctggctaacacggtgaaaccctgtctctactaaaaatacaaaaaaaattagccgggcgtggtagcgggcgcctgtagtcccagctactcaggaggctgaggcaggaaaatggcgtgaacctgggaggtggagcttgcagtgatccgagatcgtgccacttcactccagcctgggcgacagagcgagactccgtctggaaaaaataaaaatgaaaataaacacataaaaccataaccataagcacacatggccataaagaaaacaaggtattaagctt

SEQ ID NO: 83452 - DNA, 1035 bp, Homo sapiens
caggaggaccacttgagcccaggaattccaggcagcagttagctgtgatcaagccactatactccagcctgggtgacagagcaagaccctacctctttaaaaataatattaaaaaaaattaagactagggcaggccagtattgagcagaaatgcagaataaccaataacctgtgttcccttcctatgtactctggaggtccacgttcccaccttcagctctgccttccccatgtcagaggcaagattccaagccagggctctttctagtccttcctttggttgttttctcatataggaaaaagaaggccgaggactggacttaagcagtggcttagtggtgacttcattgtgcaaatcatcttctctgccagcttcccagaacaatctgcggcactaggtcctacctccagccaatgaatgggatcattctggatgtcaccagcccaataggctcagctcatgatgacagaacacatcttggaaagactgactctgttatgtaactcttcatttatgttaagtattaataggtcaaaaccaaaatgacctaaccctcctggacctatttatcctgaaacaccttcttgtattcattaaccatagtactcctccccacctcaagtagacacctctctcaggagcttctgagtcagacgcctctggagcgagccctatgtcaggcactccacctggggggcccttccccagcatacctgctggtgtgtaagtgtggactaacccgccgccaccaccctctgttccagcaggctctgcatgaatctttgtgcacttgcacctctttttcacatgggccacagtttcagtacttcagcctcagtggggttcctgatgtttatctagggtgttactcaagcccagtttgagattttggagtctcctgtgatcacatcttgtctcggctgtaggaatcaacagaaggagacgtcctctacataaaagctccatgtgaaaagctactcctagtcttaacatttgcagtccttgtgtcactgtcttctggtcctgatgtagtc

SEQ ID NO: 83453 - DNA, 1113 bp, Homo sapiens
tctagaagtctcttttaagcattatttttgaaaaaaaaaatatttttatagatgaatactcaggctaacctagtggatgtgatcttggaacttccatgattatccacttaaagatcaaagtattatatgctgtgtgctttttaggtgtttgttagtactgtgaaggcaaaaatgctttctacattgacattcattcctattttactgggcacctatgaatgtatgctgtgtgctagaaatagactaaaacatattcctatagcatgttagtgtgtttgcatgtttgctgaaaatcctttgtgtataaaccagtttgtaaggttctctgggttaggtagggactctgcagtttcttcctgtcaaaatctctcctaccaagatggtgttccactgtccagcccagcatgagtagcaggtagagcacagctttactggctgtttgtatgctttggtttagtgcaatgtgtggtagattacttatcagaaaacatatatgtcatctctagaacgaagaaaaagcatagtagttcaattcccagtgtgtccctttgattttttttttttaatagtaaaaataagaatctgtactgacttttcacttggccattctggttttaaaggacaagctacaagctctgtgtttctgtactgatgtgtcacttattaaatacttttgtaccatgagtaaaacttcaggtgtttcgcaagaaccaccattctcaatgagttgtattctttctttaatgtagccactgccataaggttattaattattgctttggtcttttttttttttttttaaatgccacctctcctgggcttgctttcccttgctttgtctataaatgggaggtccaccacagcccaggcatgctgggagcacttgctaagacctgtggaccagcctgcctacttgagaaaaggccagtggacaagtccagagattaaatgatgaaaaaacgatgataaaggcaaattggtttttcacccttttttttttcttttttttttgggaatggagttttgcttttgttgcccaggctggagtgcaatggcacgatctcggcacactgcaacctccacctcccgagttccagtgattctgctgcctca

SEQ ID NO: 83454 - DNA, 1018 bp, Homo sapiens
aggtgctacgtgttgcttgttaggcttatactacggcgggtctggggctgcaggtctggagtccttgttagtgcatttagtgctggtgagaagggtgggccccagtcttggacgctgaagtcctctaaagacaaggcagagacacagcctcagatcccccgtcatcttccactgaataagggggatggagaagaggtctcagcagttggcctcctgcaagccgagatgcctgccagcctgggcctgcttccttagcgctgtgagagcttatgtctgacgggcagagaggagcaaatgcagtccctgttgggctgactccacgcagggctccccagcttcaggcttgcagggtgaccctgctctgtgacccagcggcggcttcagccccagagggggccgtggcacaggtggtttaggcatagccgccagccatctgactggtggccgcattgctgcctactcctcgccaggcctggtagctgaagaaggcactcactccataggcgatcatcaccaaacacgcaaagaactgaaagagaggtgagaagggcttaaggaccgagagggtgacagtgacacaagctccaaccagatctcaggccaggcaggaggggttgtggcagccgcaccatctcacacttagccagatgcatttcacagctgtttatcatggggctgatgagcaccagggtcctgggataccaacattaccttctaaccatgggaaacagctaagaaccacaggcagggcctgtcagattgtgataagggcaatgaaggagaagataagagtgacagaggggacacctagcaaggatttagttctaaaaagacaacattcaaaggacaccctaggaatctcctagaaccagttcaagcctctatactaacacctgcagccacattcagaagctccccgtctctgtccccatcactgaatttgctgatttcaaaactgccctcatcaggaagagtaaggaaccaaatgcgtgcccattgaggccctgccctcccctgg

SEQ ID NO: 83455 - DNA, 1115 bp, Homo sapiens
gcaatcttcatgatgcctaggaggttcctgacatgggacccatctgctcctccagccaactcctgtccctcacatcccaccatggtggctcctcccacctcctctggatttgttcactctgagatctgtttgcagagtgggtgcttagcagacagagtgaagctggctggggggcacagtggtgtgtagtgctgctgtgtatcaaaagaccaaggtattatgggacctggtttcagaatgggatgggtttcttcacctcatgttaagagaagggagtgtgtcctgaagaagcccttcttctgatgttaaaatgctgaccagaacgctcttgagcccaggcatcgttgagcattaacactctgtgacagagctgcagacccctgccttgagtctcatctcagcaatgctgccaccctcttgtctttcagagttgttagtttactccattctttgtgacacgagtcaagtggctcacaacctcctcagggcaccagaggactcactcactggttgctgtgatgatatccagtgtccctctgcccccttccatccccaaccacatttgactgtagcattgcatctgtgtcctgttgtcatttatgttaaccttcaggtattaaacttgctgcatatcttgacatatcttgagattctgcatgtcttgtaaagagaggggatgtgcatttgtgtgtgatgttggatagtcatccacgctcagtttggaccattggaggaacttagtgtcacgcacaaatggggctattcctacgcttagaatagggcttgtctgcccactttagaagagtccaggttggtgagcatttagagggaagcagggcagaactctgaacgacaatacgtctctctgagcagagacccctttgttcttgttatccacccatatggacttggaatcaatcttgccaaatatttggagagattgtgtggatttaagagacctggatttttatattttaccagtaaataaaagttttcattgatatctgtccttgaaacttgatttgattctccaagtttgctttgcttatcctagtccctgctggtggattttagttgtttgtttggctaattgaagtttggctccaaagcccctt

SEQ ID NO: 83456 - DNA, 1798 bp, Homo sapiens
gtttacagactaagtgtctacacatttacaaagaattacataaaggtatatataattatttgatttttatctgggattatgtaaaagatattttattccctttttcacgtgactcttcataaacacttctctctttctctgttctgcctgttccctcccttctccccactcctgcccccaacccccaacatgtgtatattctctacacattgctggccagtcatacagctttttctcatgtaaatttgtttctaattcctttgcatcctagtgcatcttctgtggatgtagtttaactcaccgttggcctcttgagcatgtggtcaggttgaacatgatgatcaaccaaaaggaggacagggtggacaccttctttaccctggactccaagtttcctctcgaagcctgcagtcactttagcttttcattagcagagaccacgactgtatcactcattgctttgaacactctccaggatctcattgactcagatgagctgctggatccagaagatttgaagaagccagatccagcttccctgcgggctgcttcttgtggggaagggaaaaagaggaaggcctgtaagaactggtgagtgctggggtgactggagcctgccatgctgcctccagtggcttcatgctgaagacatcgcggtgctgtactatttttagaacatacattttccaggctgggcaacacagggagaccatctctgcaaataattaaaaaaaaaaaaaaattagccaggcatggtggtatgtacctgtggtcccagctacttgggaggcaaaggcaggaggatcacttgagcctgggaggtcgaggctgcagtgagccgtaattgtgccatgtatctaatttcactctccctcaaaaccctaccagtaagccactattgtgccactgcactccagcatgggcatcagagcgagaccttggtgtcttcacatttgtttttataaatggatgggaaggattgtagaaagttaatcagtgatgttcatcatcagcgttaatcatcagtgttttttaaatgtaaaagctgccagcatttacaaatcaggaaatttcaagtgaaaacacagatttttttcccttctgttcttgaatttggaaaatatggcaatctgggtccactttccccagcatgataaccagctgaagcttgagtagtggctgccctctgtagacagagcacacacggtacttccctcatcctcctcccacttctgtctccctcagcagcctctcatattgctgctgtctgcctggcctataggcttctgagttatgacactggtgtgaagagaaaaggcttaaagcacattttggcactgttaggatttgggatttctgggtggtgacaattctcgttcattagttactgattttcccgcagcacctgtggccttgccgaagaactggaaaaagagaagtcaagggaacagatgagctcccaacccaagtcagcttgtggaaacgtaaatatcaggatcattcctcagcattcacaaacccccagggggattagaccttcttctaaactaaacacagacaagctccacctcaaatattttagtaacagacgaatgcgtgagcacacgaacgtaggtagtaatggggagagaggctgtctcctgagagtgagagtgggttagcgtgcttgtgctggtcagggagggtcttgttgctttttatttttggcccatttctttgtacttcagagtgggacctgatggttagacagttagctaaagttggttgtgttttgaactgcatagaatatagaactatg

SEQ ID NO: 83457 - DNA, 1048 bp, Homo sapiens
tcaagtctcactctgttgtgcaggcaagagtgcagtggtgcaatctcggctcactgcaacctccgcctcccaggttcaagcgattctcgtgccttagcttcccaagtaggtgggattacaggcgtgtgccaccacgcctggctattttttttgtgtgtatttttagtagagacgggattttgctatgttggccccagattggtcttgaactcctggccccaagtgatctgtccacctcagcctcccaaagtgctgggattacagacatgagccaccacgcccacctggttattattgtttgaatgcctgcgaacccatataggattgagcctttattatttttcctactttgaactataaagctattaattgggattttccttttggcagataacaatagcaaagtgaagacagcatctaagctgtgttcagccctgactctttctggtcttgtggaagtgaaagaggtacgtttgtagacaactttctttgctgccctgcaggtgaggtaatcagtattgcttagaactaggaaacaagaaatgctgtgcatgtaagatacatgatgcttcaaaggacaaaacttgggagaatcggccgggtgtggtggctcacgtctgtaatcccagcactttgggaggccgaggtgggtggatcacgagctcaggagatcgagaccatcctggctaacacagtgaaaccccgtctctactaaaaatacaaaaaaattagtcgggcctggtggcagacgcctgtagtcccagccactcaggaggctgaggcaggagaatggcgtcaacctgagaggcggagcttgcagtgagccgagatcacgccactgccctccagcctgggcgacagagcgagactctgtctcaaaaaaaacaaaacaaaacaaaaaaaaacttttgagaataaccaacttcaaagagactcagcttggcccatgtgggctggggcttgttcttgtctccttggtactagtttagtggtggtgacagctgaggggcatgagcagcagctctgctgcttccaacacccacctctc

SEQ ID NO: 83458 - DNA, 1049 bp, Homo sapiens
gactgaggaagtgataaatgtccatgaaatcttcacaatttatattcagagattgcagtaaagacaggcgtaagaaattataaaagtattaatttggggaactaataaatgttcatgaaatcttcacaatttgtgtacttttgccatggcttcagccggtccctccgtttggggtccctcacttcctgcagcagagcttaggagtgtagttgatgatttccataagtatgttctttcttggtagctattccatgtttttttaaaacacttactattcatccagcttcttggatggatatcgagtggtgtccattctctcagggtgaggtctgtagcttttgttgggggttggaagggaccaggagattatcccaggctcaggagattgctaattagagtcctcttcttttcagctgcccacaaagaatccagctttgacattattttgtcaggtttagtcccaggaagcaccactctgcacagtgctgagattttggctgaaatcgcccggatccttcggcctggtggatgtctttttctgaaggagccagtagagacagctgtaggtaaggagatcttcacttggaaaacatgtttgacagggttgagtcttagagtatgtgtgctgcatctccgtgagcaggaggtatcattgggagatcagtattcctgtagcaaaaccttttccttggggataaattattgttaaaatctgaagcaacatatctggagaaattgtaatctttggctgactcattatgtaataaaatagaaggaaactgccatctaaaaatgggtccttttgcaggtgaataaactttgatatgttcataatatggaaagtgatgcagcaataaaaatgaactagctaactatatgtacatcagcttggatggatatcaagggaagtagctgagtgaaaaaagccaatctcaaaaggctctgtactgtacaaatccattcatatgctcgaaataacaaaattgtggcggtggagatcagagtttgccagaggttagaagtgggaggaaagggttggtggagctata

SEQ ID NO: 83459 - DNA, 1088 bp, Homo sapiens
gttactgacttcacatcattttgtagccctaacctggaaacaataatctaataataaggctgacaatggttcagccctagtgtcttgattccaaaaacctcacttctttattttttcctgtcatcaggagatatcactgactcctgggaccctggtatatcaagtctctgtatcatagccacacctgccaccttgcaaacctggatcttggccaggtgcagtggctcatgcatatcatctcagcgatttgggaagatcgcttgagcccaggagtttgaggacagtctggccaacatagcaaaaccctgtctctatgcaaaaaagaaaaaaaaaaagagaaaaagaaaagctaggtcttttctattagagtctagaggcaaggtaagccctcactattctctttatttccattcccgtgtcagctcaagaacttgacaggtctaaaccagcgtcggtgagaggaaggggtataagctacaatgcctagaagagaatgagcggacagattgaaagagctttgaaaagtataaggtgccatccacataacctggtgttcacgagaacacactaaaggactcctgagtcactaccacagccacctggaaaccacaaggcatttgatgctaccgttctggtcagggattgggctgcttcttcagttcctaataccagaccaagcctcctgatgcctttctgcactgcaactgtgtgattgaaaaatgagatgttcatccaagcagtcaagccacagaaacccagcatgtccctgtcacaatctcatgggcaccttgatcatgtcttaaccttcccttaaccttggggctcccaagccagagtcaaggtctgacgccacctcaaggtgacagctcatctccagcacagcacaggcgtgtgcacacagaggtgttccttgcagccccctccctctcaggtgtcctgagatgctgttcctgggagccccctcagaaaactgcctcacctgagacaagtgcctgctggacagaggtgtgattccaggcctggtgtcacatgacaccagcatgcattgcaggattattagtgtattttgagtctgtaaaaataataaa

SEQ ID NO: 83460 - DNA, 1093 bp, Homo sapiens
agagagtttggattaggcaaaataaatataagtcatagctgtggcatcaaatattcagacttttaaggaaataagcaggccaaatgattaggcaagagaacattgtagtttatccactaccaccaccaccccacccccccgccccccagtcacttcttaaattcagcttggagtgctggacctccccctgcctaagcacttcatgcctctggacctcagtttcatcaggagtcaggtgagggagttgtacttcatgatgcagccctgccattctgagtctaaatgcctctttcccaacaaattcagttctacaaataatattgagcacccatgctaggaatacaaagacatcccaggacctgcgtgaaggaatttctgaagcttgaggtatagacataacatacacaaatatgacacaaggcacactatgacaagtgtcttgagggaagtctgaacagagttttgtgagagaggagttgaaagggagggaatgtcacatctgtagcatagagagcaggcaaggcttagttttcaggaggcacagaggatcttaacctgtacagcaaggaggggaagggtgtgctggagggaagggctgggggattaaagaggcagaaaagcttgggtcagggttctctcagttggcttggactggggaagcaatgggaagcatagcaggacagagcaggtggaggcctggcagggggaggtcctcttccgaccgctgttcctagtgtctgtgtccctcgtttggcagttgggctccagtgccatttgattcctggatttagttggttccatgcaaatgtttatgaatgaataaatgtgtgtttaagtcaagcatgtgtgatcgataatacagtctttaccctcctacgagctcattgctgctagggattgggttctatatttagtatactttgcgcattaaaagaattcagtaaacatttgttgattgagtgtttaaaaagtgctaagttgggcagtccagtcattatatcctaaaatgaggtatggccccataagtctgtgttgcttctgtgagggtttccctgactttgaagtgctcaaatagttcatgttcttggattta

SEQ ID NO: 83461 - DNA, 1050 bp, Homo sapiens
agtccctaacatgggaatgagtcagttgttttaagaatggcaaaatgttaataattatggaaggtggttgatggttatgggatggcagtttcttacgtgcttctctatttgtgtatatgtatgaaattttccataatagaaaggattttttagaaaaggttagtgtagaacttgaaaggtacttttttctgttccttggtggttttattttaaatgatggttacattcccaagctggtcctcttagttcttgggaagctgaactatagagtgtgaaagcattctcctgtgcctcatagccttggttctctgaggaagagtagttcaagggccagagggagatgttagcaatatgtccccagaggtggcctggcagctggtgggagtgggaaagaaatgtgcgtgccagtgtatgtataagttgtctctaaacttgggcagtccatgagaatggtataccagattgtcacagcccacaagaacctggatactgatgaacccctttttacaggtgaagaaacttaaggaactgggcattagatgcaggaagccaagacaaggagccaaggcaggagttgccatctccctttgactcattcctgcttcccttcctgccttaggactgcacatgtgaggagttctgccccgagtgctcggtggagttcaccctcgatgtgcggtgcaatgaagaccagacgcgacatgtcacgtctcgagacctcatctccaacagcccccgggtcattccggtcagtgcgggagagcatcctcttttccctgggatcttttctcttctctggctggctccaagtgggccagactggggttgatccttagaaaatgttggctttccctgttaccctctgccttaatctgatccctagaagtgctaattctggattcctcttgggcatcgttagcatcgttggtgctgcgcaccctctatcacccagggactcttttaaaggccatggaattgttttgcctgaggctaccaccacaccctgaagtgggggttggagtcctgggggcatctgtgccaccacctcgt

SEQ ID NO: 83462 - DNA, 1787 bp, Homo sapiens
agattgcagtctagaggtgctgggatatggatgccagaggaggtgactggggaggtgagcagctaatgaatgcctggtggactccctacaggtgacatcccggaaccgagataatgaccccaatgactacgtggagcaggatggtaagtcttcctgacctgtcaccgtgtgggccagcgggaaggagggaccagacacagcctctcgtgctgcctggtctcctcgaaaattggctttagaccgtttttccagatgtgtgtggtcttgcagtggcactccaagtcagaatttggagaagcatgtctctcctggcccttgactgacttgtgcctctccctgcagacatcctcatcgtcaagttgagaaagggccaggagctgagacttcgagcctatgccaaaaagggctttggcaaggagcatgccaagtggaaccctactgcaggggtggcttttgaatacgatccagacaatgccctgaggcacacagtgtaccccaagcccgaggaatggtatgttccccttaggagtgatggcaggcatttggggtgggtgtggcatagaaatggctgttgttgactgagatgtggcaggctctctaggaacttgggtgccccaaaaggagcagtggcaaccttgtgctgacctgtgtttgacctcaggccaaagagtgagtactcggagctggatgaggatgagtcgcaggctccctatgaccccaacggcaagccagaaaggtaagagcctggttggacatgggaaggtgaagtgtggaagaagggatggttttggttcaggccgtgagttaggcattccctctcccccacctcgcagttctcataagctgaggaggggctgctgactgctaaactagacctgtggtatgtgcacatcccaggggcaggtcgtcagccccttttggtcactgacaaagaggaccctccatttatccaggtggttcctgttctgattttcagcccccaaagaagagattcttcaggtcaacgctaggggcagagatttggacccaagttccacagggtgactgtgaaaggtctatcactggtcactgctcacttggttttccactctctcctcagggggcatgcatacatacagaactttaggattttcacaggtaccttatgaggtagttgtagcctccttgaggttgtgcaaagtgtgttgaaactaccctatgtaagaggttttacatgaaaggaagttagccctggcccaaggtcaagttccatgtgggaacagagccaagacccggaaggaggaagggttgtccatggccagagctcgggtcggccagcctgcctcgcagtgcactcactggactcttgcctcctaggttttactacaatgtggagtcctgtggctctctgcgtcctgaaaccattgtcctgtcagccctctcaggattgaagaagaaactgagtgatttacaaactcaattaagccacgagatccagagtgatgtgctaaccataaattaactgcagcttgcctgcttcagcaaaaacggagattcaggccagcagctggatatgggggtctctcttcagactcttctcgtttctgagaatctagtctactgttggttgagcttcttggcaggacatcagtaccaactagaagtgggtcatagatagattaccagggatgcagtggtgtttaggcaggataggtctttactggccctgactgctgttaataattggcagcagtgctccccagatcccagaaggtccctgctggagtgtttccagtgcacctgtaggg

SEQ ID NO: 83463 - DNA, 1046 bp, Homo sapiens
tgtggtgccagtaggcactgcgcggcagcatggtcgtgggtgtgcagggatacgagtaatgttccgtgcccttgttcagcagctgtggggcaaaggaaggggtcactcccattagtggcttacagtatccctgagcagccaccccaagaccctacctgcctccactgtgtaccccaggcacttggccctgcctgcccgcccgttcccccctccccccgtaccctggactgatgcccgctgcctcaccctcacgttcttctccatttccagcaggacccgcttgtgctgctctgcgatggccagggtggcactgtggacgcgctggtaaatctgctccccctcttgtgtctggaaggtatagagtccttccccagcatcacacatcctggggacacagcacagagggcaagatggtggggacccaccacagacatgcatgtgattagttaggctctcttgcaactgcaagttgtggttgcattccaggccgggaggacaggtagggctgtggtctgggggtccgaccacacggtgcaaatgtgctgagcatattctataccagctggtgcttgaaatgcattataagaattaacccattcagttttctctaccacctccctctggtctctgtaccattaatggtttcctcattgttatgcattttcccaaaccattttatagatgaggaaactgaggcatacagaagctaagtaactcaaccaaggttctgcagaggattatatggaatttcagtctaggcagactgactccagagttcaagtgaggggatacccagtcttcactataattctaggaggttaggtactttattatccccgaaacccagactcagatccacagtcacagaagtagtaagtgcctgaacctgcatttgacttaagccaaagtagtatatgatttttggtaaatagcttcacttgacctgcatgctgtgggcaagttactcctctaagcctccatttcatttcttcgtctgtaaaatgggaacattacattcccccttgggattgctaggccaataagta

SEQ ID NO: 83464 - DNA, 1048 bp, Homo sapiens
cctgcctgaccaacatggtgaattgaaaccccatctctaccaaaaatgcaaaaattagctaggcgtggtggcagacacctgcaatcccagctactcaggaggctgaggcaggaaaattgcttgaagccgggaggtggaggttgcagtgagccggaattgtgccactgcactccatcctgggcgacagagcaagactctgtctcaataaataaataaataaataaataaataaataaataaaacgatgagcgtggacaagggccaaggaatgagtgtggatagggaactggtcagaggatccagccctgaagtgccaagtttagaggtcagttagaggaaagggaaacagcagaggagacaagagaagggagccgggctgggaaggggaaccacaagaaaccgtttcccggaggacagagtgatcagtaagaacagggctgagccctggaccattggatttagaatgtggaggtcaccagtgaccttgatcagagcagtttagagggcacgagcttgatgataatgaatattctgcagtttttctgtccagaaattaaatacgacaatagcataacctatctacacactcctttttaaaaaatcaatataatggccaggtgcagtgactcatgtctgtaatcatagcactttgggattccgaggcaagaggattgcttgtggccaacctgggccatacagcaagaccctgtctctctctctatatatatatatattttttttagacagagcctcactctgtcagccaggctggagtacagtagcacagtctcgactcactgtaacctctgcctcccatgttcaagtgtttctcctgcctcagcctcctgagtagctgggattacaggcatgtgccaccatgcctctggcgcatgttctttgtagttctcctggaactgcattccctatccaagtgcaagtgcccagctcacattgtggggaggtggtcggggttccagagcactgagcatccccggacaagtacctctctcctgctgcacctcaggctcatctgaaaatggctccagga

SEQ ID NO: 83465 - DNA, 1026 bp, Homo sapiens
ttctgaccactgcccagtgccagcctgccctggcaggaggtcagctaagccccaaactctccctggttccctgatggctcagcctggatgggagcaatcctggaccttccctgacctcagattctgccaggccctgggctcagtgccttgcacacgacacccacttttcagatgaggacattgaggcaggggaggcttacccagtgagcaaccccacatctttggggatccagaatttgggctcttgtcccttggtggagaggaggctcctcagccagccaggcacatgctcgtgtcttgaaccctgcccctgccactgccaaatccacgcacctgtagggtgacagggcccgtagagacagcaagggtggcttgcccagggagaatcttggctttgtttctctctggttgtgggaacatgggcctgtgcctcggtttcctcatctgtaaactgtggatcacaatcacatctgcttcagaggctattatgagcatgaagagagttgatagaggaaagcatatgggaaagtgcctttcccatacgtgggaatgttaagcctttttttaatacctctcccattggacagatggctgtattgaggcccagagataacctgaaataactgtgagcacttctccctgcccccgctactgctgggagagctgcggccacctggacaccagtggcgctcactcacccacctccagcctgactcgtgctttggtgaggaggccagtgtggtgggcgtcgggctcccgagctggcgcctgcgcaggctcaggcagtttgtggtatgcttggcagttccaggcagagataaaagctcagccccggaggagctggcatgcttccgggcaccggtggacaggcctctctgcattagtgggagatggcctggcggtggggagatggccttgctgtccaagagccagcccaaccctggtggcctgaaaagttctgcggtgaatggctctggcttggcttcccagactcggggccacttacaccaactgcaaaacaaggaa

SEQ ID NO: 83466 - DNA, 1007 bp, Homo sapiens
atgctcccaggactgtaggattctgcctgtgggtatccacctggggcttgaacacccctgggtgtgggaatctcattccctcacaggaaacctattcccatgttaaatgttatagaagaataatcaatgccaggacagaataggggttctctcatgaagggttcttggcctctgtgggtcaggaagccgcttgagaatgtggtcaaatctaaagatgcccccactccagaaaaatgcacttatgggaccacattctgctcagttgggagagggggttcttaggcttccgaggcccaccagggaccccaggttagcccctcacgcagggcaagcctccaggttgtgtgggggacacagaggccagctctctcctgtctcctggggccaggtctcctcggtggaggtggacgccgtgcacaagcactacctgagcctcctctcctacgtgggctgtgtcgtctctgccctggcctgccttgtcaccattgccgcctacctctgctccaggtgaggcctgaaaggggtgggacaggggaggggaccctccattgcacacacctccaccagggcgccgcacacatctccggtcatggcccgcccgcatgacctggaactgtgtgtgtggttaggggagctgtttggggtaagctgacccttgggggccacgtctcctcctcagatcagtggtgtttggataacatagtatttacaaattttagctgtcgacattgtatttatttatttttatttttattttattattattatttttttgagacagagccttgcctctgtcgcccaggctggagtgtagtagcatgatctcggctcactgcaacctctgcctcccgggttcaagtgattcttgtgcctcagcctcctgagtagttgggactactggcgcctgccaccacacctggctaatctgtatatttttagtagagacggggtttcaccatgttgctcaggctggtctcgaactcctgacctcaagtgatccacccacc

SEQ ID NO: 83467 - DNA, 1027 bp, Homo sapiens
tgcaccctctagggccatgtagaatcctggagtgggggtggggtggggtgtgcacacattgacttgcaaacctcagacagaccgatgcgggcagcccacactcagactcacaggtgcacagttgtgcagacagacgggaagacacagaatgtggatggcatggattctccaacatggtgaaaatgccaaagtgtttccgctctgactttgagagtatctggtttattactgtggttgtcttcctcgctctgcctggctgaggcttctgttaaacgtgcacgtggtgcctgagtctgtgggtgctgggcacacagtaggtgcacagggggatgtggggaacagtttggctgcagccacaggaataggataggggccatgtatgactgcatgtgtgtgtcggggtggggggcagtctgggaaggcttcctggaggagatgtgggcacactcccctctctaccttcccacactggcccaccagggtgcccctgccgtgcaggaggaaacctcgggactacaccatcaaggtgcacatgaacctgctgctggccgtcttcctgctggacacgagcttcctgctcagcgagccggtggccctgacaggctctgaggctggctgccgagccagtgccatcttcctgcacttctccctgctcacctgcctttcctggatgggcctcgaggggtacaacctctaccgactcgtggtggaggtctttggcacctatgtccctggctacctactcaagctgagcgccatgggctggggtaagtggttgggcggggggtgcctcagacctgcctctcccacttggctctggcaaaacccaggcacctggttctgcctctccacctatctctctgacttccctcctggcctccttcactcatcctcaggtgtccttcaccttggctgaatcaaggtcccctttaggaagaagcagtgagccctgtccccaagaaacacttccaaattctccacatcactcactccattgcaaaggggatttacgagcagggccaccgtg

SEQ ID NO: 83468 - DNA, 1036 bp, Homo sapiens
taggcccctaagcttagcttctgactccgctctcccacatcccacacgtcagacaaaaacaacgactcgcaggaaatctatgtgaattgcagacacgtggtcttctccgccccactgcggctgctgcactttaggcagccagcatcccggaacagagctgcagctcattatcctggcctctgggaggagtttctttttccttacgttccaaatcaccctacctgaggtgccccctctgcagattcccaaacctaatttgcagtgcagcttctgactctggtggctttggtgggtgtcagtctttatcaagtggtcttggtgatccagggagcaacagctcttaccaagcattttctaacatgacgtcacctcttgtttgtattgcagccctgtattgagctgagatggctcgagcctaacattccatgatccaggatcgtgacagatgtgcacaggctgctgctgttgctgctgtgggtaatttggaaccacgaggcaccccagggccagaagacgaggcattctgtctgcctggatgtgtgggaactctctgccaacttgattggtggatctggggggggatccacccccaccccacgaggaaagcacagtttattttgtgggtggggcttcaggtgccagccagctgaaggatggccacccctgtggtcaccaagacagcctggaagttgcgtgagtggttttcatttttctttatcaccccatttattctgttagcggcttgttgctgggaggcctgaacccacagctttgtttcctgttcttggcacaggaggagactcctagacttgggagtaagatagaccattatgtaaatcatgactgtggcacttcttagctgggtgacactgggcaggtgacttaacctctctgaggctcagttttcttatatgtacaatgagatgacgcctgcattctatggttgctgtgaaattcaagtgacaggatgaacccatcctaaagcacttagcacagcatttccagttaggctgacagtggggtgagaaatcctgaa

SEQ ID NO: 83469 - DNA, 1210 bp, Homo sapiens
caacatgaggcccaaagacagtaagtgattggccagggtcacaccaccagtgaggagcggagccaaggctgatcccagtattgtctgatgccagagcccacatcctgactttgggggtagagaagatcatacagtagagttcatttaattcacccagtgcttggatcttgactctgcagtaaagtgttatatatggaatcttgaatacctcctctgacagagagctcactacctcacaaggtgacctattgcaccttggctcaaaactaagaatggctggactcccacatttcctgaccctggcacttgggatggtcagtttcattcagatagtgaattatgaatctttccaaaagcaggaaacatgagacaaatctgagtggtactggaggacaccctgaaacacacaaggtttgcctccaggctgggccgctcctggccatggagatgcctgcaaaaccttcaaggaaaggataggagatgtggttcctagggcagtgggaggcgatcaggccccaccccaggagttctttggtcctcgcgtgtcctccctgtgtcctctcagttctcactgctcctcagtgtgtcctcacagccaccctcaagatcccttggacagaggtcacccaagaagactggtgtgtgcaccagggccaccccagccatgccctccacttgcccttcttagggcctttgcccatcacctccatctacctaacagcatccctcatcctccacccactgacatctactcaaataccacctcctccataaagccttcctggatttctctttccaaccaagcagcttctctcccagcttgaacctctcctggtctgtctctctccttgcactgtcttgggtggggttcagtgccctgcaaaccataagctccacacccatggggcctgaactgagtgtggtggttccctggttctgcttccgctggagcacagtctgtggggagagtgtggtacaatttctgcagacttgaggtaacatagggctgtcacctctcaagagaaatgtgggaaaattagttgttggcaggacgcagtggctcacacctgtaataccagcgctttgggaggccaaggcgggtggatcacttgaggtcaggaggccagcccagccaacgtggtgaaaacctatctctaccaaaaatataaaaaaattagccgggtgtggtggcacatgcttgtaatcccag

SEQ ID NO: 83470 - DNA, 1759 bp, Homo sapiens
ggaaggggtcccataggagtgaggaggcagggagaggtctgttgggcccaggatcccagggtgagctcatgccgtgtcctccctcaggggcacagccaggccgtgcggtgtctccggttcagccccgatgggaagtggttggcgtcggccgcagatgaccacaccgtgaaggtagctcccggcctgacctgggcccaggggctgggggctggggtctgctgatcacagcaggctgagtcctcacctccctcctgatcgggctcacatgtcccaagcctatcccgagtggaaggtagcttgtggataaagagcttggcctggattagagggagggtgggcagccaagatgcctggtcaccctgacctcctccctgccctgcctccagctctgggatctcactgccggcaagatgatgtctgagttccctggtcacacggggcctgtcaacgtggtcgagtttcaccccaacgagtacctcctggcctccggcagctctgacaggtgaggaggaggagcgaggcgagttgcttgtgactgctgtccttcaccgccttgtcctctgtgcgtgtctctactgccggtctgtcgctgtctggggtgtcatacgtctgatgatcctgtgtggactgaattggatttcagccgagccaggactggaccctggtccatctcccctggctctggttccctggccccagtgtcccaggtctgtggcttcatgggcaggttgggacccaaggcatctagtgggaccccatagggcagggaggctcgtggctgttggggccaaccctggggccagggccatcgggccgagcctcccccttgcaaagtcagggccagctctgccccagatgttgctcctggtggccctgccctgggggagaggtttctagagaaaagctggcttcccagggacatgtggaggccaggatgagggataggcttcgcagcacagcttggctgcctttgcaggacaatccgcttctgggacctggagaagttccaggtggtgagctgcatcgaaggggagcctgggcccgtcaggtacgcaggctgtggggtgggcggcccagcgctcctcccggcagtggggcgtggctgtgggtgggcctttcccatctccgctgctgcgccctccctgccctgggccctctggattcctcggggtggggaccaggctgggtgccacaggacccacggccatctctcgcctggcccaggagcgtcctcttcaacccagacggctgctgcctgtacagcggctgccaggactcactgcgtgtctacggctgggaacctgagcggtgctttgatgtggtcctcgtcaactggggcaaggtggccgacctggccatctgcaatgaccagttggtgagagagccatggcacccaccgccccccactcccacagggccacccgcctccctccagcccaggcccctcctcctacccccacactggggctgggattttgccccctcggcttgcagtcccagccccacctctccgctttctgcagataggtgtggccttctcccagagcaacgtctcctcctacgtggtggatctgacgcgtgtcaccaggactggcacggtggcccgggaccctgtgcaggaccaccggcccctggcacagccactgcccaaccccagcgcccccctccggcgcatctatgagcggcccagcacaacctgcagcaagcctcagaggtgagggcctggggggccttcgggggcccaggagagggactgtca

SEQ ID NO: 83471 - DNA, 1111 bp, Homo sapiens
tgtcagtaccacactgctttgattgctgtagcttttttttttttaattttttttttatttgagatggagtcttgctctgctgcccaggcgggagtgcagtggtgcaatctcagctcactgcgacctctgcctctcgggttcaagcgattctcctgcctcagcctcctgagtagctgggattacaggcgcctgccatgaggcccggctaatttttgtatttttagtagagatggggtttcgtcacgttggccagggtggcctcaaacttctgacctcaggtgatccgcctgcctcggcctcccaaagtgctgggattacaggcatgagccaccgcgcctggccaattgctgtagctttttagtgagttttgaaatcaggaagtgtgagaccttcagtctttcaagactgttttagctatgtggtgtcccttgatatggatttttctatttctttagaaaatgtcattgggattttgttaggcattgcattgaatctgtagatcactttgggtagtactgacaccttatcaatattaaatcttctaatccatgaacatggaatgtctttccatttattggtgtcatctttaatttctttcaccaatatcttgtagtttttagcatacaatatttaacctttgttaagtttattcctcggtactttattctttttgatgctattgtaaatggaattattttcttaatttcctttttggattgtttattgttagttgtagaaatgtaaccgatttttgtgtgttcattttgtatccttcaactttgctgaatttattagttctaattgccctgcttttaaaatcaaattaattccaacattcaaatcttaattaaattcacataaaactctagacttcctttttgtcataaaatattggaagatgtggcacctctgagctgacattcccacatggcacccaccgcttgaggtctagtggcagctcctgcctttggtggaggtgaccatcctttagcacgctccagccccaccaccctttctgtctctgcttaccaacctcatccacaagttctgctctggctggcccctcatgcattcagcattcttcctacaggtacttactgaacacctactg

SEQ ID NO: 83472 - DNA, 1043 bp, Homo sapiens
ttgaaccttctgactgcagctcttttctggaaatttctcaggggatgtatctgaagctccaggtctctgagatactctggagggcccgaccttgtggagatgtggccaaccacatgggcctggagctgggttcaaaccctgactttggcactacttattagctgtgtgaccttgggacagttaattaccactctgcaggtcagtttcctcatctgtgagatggatgtaataatagggtgtgatgagatgatccctagtgagtcattggtgttgctgtggccaccaccattgttgttactgggagagttttggatttggaatcccgtgagcaggattctattctggctgtgccatgtgccagctgggcagctgtaggaagtcacttcctctctgagccttcacttcccagtctctaaactggggctcacaaatgtcgcattgcagtttgggggtggatctgttgtaagaatggacagaaaaaagatggtcaactgtaatgtgtggtgcatcgtgagctgtcactcccgtgtgccctggtctcctgctggcctcactgtggtttgactcagacttggactttcctggaattctgaactttgcctctctaagcaaagcccgccagggggtacactctgccttgttttccatggtgccgtgtttccagccctatccaccactggcttctgatcggctgctttctcacactgctgttcctgcaaggctgtgtggccccatggttaagggtgagggttctgcaagggtcagccagatgcgagttccggtcctaggtccaccacttactggtcaggtgacctcaagtaagttgcctaaccaaggcttaacctcttaggagctcagtttttcttcctgtaaaatggggataataatagtacctacctcaggggaataggggatgaaaaatggtcttatgaaatccccctgccctactggcaaagccaactcagttaacggggctccattatcactgttgggacctgggcttgtgggagctcaggagtcttctcagacctcctcattgctgt

SEQ ID NO: 83473 - DNA, 1138 bp, Homo sapiens
ggtggatcacttgaagtcaggagttcgagaccagcctggccaacgtggtgaaaccctgtctctattaaaaatacaaaaattagccaggtgtgatggcgcacatctgtaaccccacctacttgggaggctgaggcaggagaatcgcttgaacctgggaggcagagattgcagtgagccgagatcacaccactgcactccagcctgggcaacagagtgagactctatttaaaaaaagaaaagaaaagaaaacaaaacaaaacaaagaaacacagtcagtgtttataaggttaacaattcaaatgccaaagaggttcaacatgaaatgtaaggccacctcctttcccctcttctcacgttctctctgttgtgaactttctttttattcccccaaaattgaaatgatgcttctttctactctcagccactacaccatcccccccgaatcttccagagaggatcgctgtctatatagttctctagatttgtctctatgcctgttttattttcatgatcctcaaatgggatcactctttgcatgtggccctgccacctgccttgggcatctttctgtgtgagcggcaggtgacgttctctggatgaaacacctcttcgtgcctcccctctctctccctgtgcctgtgcactggctctctttgtctcgagtcctttgcctgtgttccccctggaagaggagacggcttcccatggcctctcgatagccctgtggggcggagagagtgaaggaggcagggctgtggcccttcccctgctcggacggactcctgcgcagcctccttggcagtcctgggggtcccatctggagatgcggggctgtgtgcctggggtggcagcagctggcatgggagcagttgccctgaggttgatacgtgtgtggtgggactggacggttgcctgtggggtgtgcgcaccggaagcaagccagcctctgtgctggtgactctcagaccctgcagggatggcatgagcttcacctgagaacttgaagtacctaagaaccttctttgctggtgcagaagaccagctgctgagggaggccaggagaaggcactgccactgtcttgctgtgggacctggcacatcctcttccagatcctggacctcaacgtccccacccacc

SEQ ID NO: 83474 - DNA, 1230 bp, Homo sapiens
gaccctctcccgaggcgtgggcaggtcgccctggtagtgtgggggagagagggctctccaggcaaggtgccttcaggggtctgctccctgtccctcgtgacctacaggaacagggtctagactgccagcctgtgagagctagcagagtccctctgggccatcaggtccaagccccttggtgcacagaaggggaaactgaggcccagagagggcacacagcaaactcctgttcacccctctctcccaccacatttgtgctgtcagtggcagctggactgatgccttccgaggtctctctgcttctatggttgtctggggctggctgctcccaagcagcacagccaggctggggatgacccaggggcctggggaaaagcctgggcttttgggccaggtagcccagttgtctgaaaggggcagaggatggcctctaccccataaggttgtcctaagtattacaaatgtaatatgaatgagtattgcttttccggtaaaacaaaagcattttcccttagaaaacttaaaacacatagaaaaatatcaaaaaggaaataaaaatcacaagttagtcactgaacattttatgtagtgccttctagtcgtgtgtgtctgtgtgtgtgtgtgcatgcatataggtctttgaaatattgtgttatctcagctttctaacctgaaggaaaaaattgggtattatgaagattatatgaccatacagacttttatccacttaaaaaatttaagacaaaggtcagatgaaatcctgtgtgtgaaatgcaagcgccgtgcctgccactgggcctcagccagctcagctgccccaggcccctctgagtcccccgaccaacccccatattgccaccctgagaattggctggcagagggttgattagcacatgggatttgaatcctggctccctgtgaccctgggcacattgttaacccttccaggcttccggttctttgcctgtcaggtggggagaatgccccccacctccctggggagttttgaggagctgatggctactgtagtcctattggcctgtactgtgggccctttctgtgtgcctggcactacatgggcaccacgtgtatttcatcccatttgatccttatcacagggctgtgaagttgtccccattttattgacaagcaaactgaggaccaagaaggtgtgtaaaggctgggtgctgtggctcacgcctgtaatcctagcactttgggaggccaagg

SEQ ID NO: 83475 - DNA, 1067 bp, Homo sapiens
cttcccttcctgataaccgcagaaacgctatctcctcctgtccctgcccctcagactgagctgagctgatctccctgaaagtcttctctgtccactgtggagtcagcctccaatgccctgcactgtctcaccttcccagcagccgagactgcagatggacctgccttgctccttcccttgcccattggacagctggtctgcagggttggttgtgtgcccagctctgtgccaggcagcctggagaagaggacatttggctgctccccttggtttcttccacgccacactggtccatctcagtttcctcagtggagctggcccacgtatttagatcagcctctgccctgtcctttggcccacattcccatccccttcccagtaagactgaacctaggagcctcctagttgttctaagtcaaggaaggaagagaccatggcttcctcgccaggtgcctggcattcttccagggttgggctctgcaaacatcagacaccagatcttcaggcccctaacccctggaccctttactttattatttatttatttatttatttttgcctctcaatgctttagtcactcctgtctctctgtctccccaatatgctcaactctccccctattctagacaccacatcctctccttcccatcctagccaaacacccccaaggagaaggaagtggctgcttcctcccccagctcccgccccactctttgagccctccgaagtttgccatctgcccttctccctccacaggctcaggctttctgcctgtctgggctttcagtcctccacgtctctttggcatgatgcactgggcactgaccaacctctccttcccacttacacttcagtcacttctgaaaactctatacttgcctggagctcctgtccctctctcagcttccttctgcagctttccaccccgcagtgagccctgttatcacatggctgtctcctcttgctcaagctttgatgattgcctcctcacctgtggcgttggtggccctgtttagctctgagtctgtgtccagccctgacctctcttccaggcttcagttcaagct

SEQ ID NO: 83476 - DNA, 1083 bp, Homo sapiens
cttctctctcttcccctcctgtctctcctcccctcctctcttcctctcctctctcttcctctcctctctctacccctcctgtctctcctcccctcctctctcttcctctcctctctctcttcctctcctctctcttcccttcctgtctctcttcccctcctctctctcttcctgtcctctatctcttcccctcctctatctcttcctctcctctctctcttcctctcctctctctctcttgctttcttctctctctcctgtctcggctgttgtgggttgcaggttgggtgctgctgttgtggtccttcccagaaactgccagtagagggcagcctgggcatcctaatgcttactctggttgttacacaaagaaaatattggggtcactggcgagcccacccacactcaccagaatctccactgtagtccccctaacaaacagcccttcacttcctctcccacttcagcaatttgtattttgatgccattggcctcagatcagagtgttttaaatcatcacgccctggcttatccctggtcgagccaggacacggggtgcttcagtgggtctgtcaccctctctccttgaagcatgttgcttttatttatttacttttactctcaccctgctcctgtaccagcaggggccacttcaaagccaaggtacagggtgataacttgtggtccagcatcagttttctccacttctttctcccactcacccccagcaaggtgcctggggagacttgagcagatgtttcattttggcctggccagtggctgaaagccaggcctccaatgcactgtgacctctggcttccccagcagctttcccagagaggcagaggggccttccacagcccgggttctcctgctgcctcctgcctgctgcagctgcaggcattctgaggggcaacgtggaggaagggccagggatgcatgggattttaattgtttcatcacaccttccccgtggcaaagaaacagtcagtcctcttcaggtgtcttctggatttctggtgatggacagagaaatctttttacagtttcaaattatgttcaacaaataaaaattgcattttt

SEQ ID NO: 83477 - DNA, 1039 bp, Homo sapiens
ggggctcctgttggtgaggattacccctcagcctgtgacccaagtactgggcggagagtgccatttgggcccacctgccactctgggctggagtgccaaagaatttcaagtcacagtcccaccattgagtttctaatctacttagggatggcgtcaatacataggaagcagtgatggaattcaatggccgtgcattgctaatggcatcctagctggccaggagctcaggggtgcagggacctgtagttggaggggcttcactctctctctcttctgcttttccagttccatctcacccctaccccaactccccagctcagggagtgcccacagctcgatgccgccagggaagaagccatggttgcgttatcacaaaccgtgctcctgatctggaggttgtgactgtcctggagccctactcctggggaaacacttgggttggacctgggcagtgactggaagagaccccggaaggtttaaggagccttgaatgttggcagccatgcagatagagggctagagacaggtggagtgtcccagctcctacagttggctttgggtacaggctgcttctagggtcccatcaggtctggccacatgtgggcccaaagagtcaaatggcctcagcagccagcccatctgccgggggctgtggcctcagactcctgggcctggcctacaccctgtgttgagcctcccttccttggagaaggctggctctctcatcctcaccccagcatccacacagcctcaggcctccagtagggtcacagctgggaccttctcggagcagcttggcagctgagccaaggccagcctctctccacttcctctctcccctcccagggtggaagccacaggactttcacgaggctgagacatcaaggagcctggcatgtgctaggaactgacaaacacctgcaacctgccaggccctagcccaccactgagctgccacgtcctatcccacattctcccttggatgtccaatcccagtctgtagccattccgggccagatccccacctggctgaggtgct

SEQ ID NO: 83478 - DNA, 2662 bp, Homo sapiens
catgccctgcagaccccaagaagacgctgggaattaaacttcctttccttgtcatgattatcaaaaacctgaagaagtattttaccttcgaagtgcaggtaagtatgtgtacatgaatgtgtccactcttggctataccaaagtgatagcctttgaactgatgggaaaaagtgaccctacaaagtatctttatccttttgcatgtattcttttctgcttctagtataagcccagtgcagtccttgttatgtaaatttgatattagtaataaaatttaatcaggtttttaaagaaacagcacctagaaaacctagtaatttcaaagtgtcagagttagcgtggtatccatttggggagtgattatttaatagtgggtggctgttctgttttagtatttctgatttttcaaaaggaagaacatttatatactctatggtctgagagcctgctgactgtgttatatgtcataagcagctggtgttgtcttggcaacaaacaagataaacttgctacttccgggccatctgcatgcagtgtatgacctgtgtctggtctgtttattttcctctaagtctcagccttgggaaagcaagctgtgggaattcaggtccttgtctggacaaggttgtgtgcttcttccaagacagagctagtgtgatgcttcttctctgtatttcacaggtactagatgacaagaatgtgcgtcgtcgctttcgggcaagtaactaccagagcaccacccgggtcaaacccttcatctgcaccatgcccatgcggctggatgacggctggaaccagattcagttcaacttgctagacttcacacggcgagcatacggcaccaattacatcgagaccctcagagtgcaggtactgctcctttcccagatagagccctgggttggggatagggcacactgcgtctaatattggcttgtggcccacatagcagaacagtgtgggtttctggcttcagttgccacactgtccagggagctttggcctcacaaaggtccaggaaatattcagaagtcgggtcaggtatagaggtgaatacagcaagtaagacctccctcttgccagaatccatccctaagacaagccaaggagatgccggagatgacgcgtttccagtcctggaagagggcctctagaagattcaggaaaagggggagaacagtcacatttcgcctctcaaaagaagcattgccttgacagatccatgcaaattgtcgcatccgacgggtttacttctcagacagactctactcagaagatgagctgccggcagagttcaaactgtatctcccagttcagaacaaggcaaaggtaagccagtcttccccagaggaaggtccaccagtgagtggggggagctgtgttcctggaaggtgctctggtctaagaattcagctgcagagcctctctgtgttgacactttggggtgcctttatatcgcaagatcttaggtctccttccagcactgaatcaggaatgctcctgtgaaatactctgttactgctgtttcccctctccacggtgagaggggatgaggcacttcctactactggctcacagaacttcagaaaatatcttaacttttttttttttttgagatggagtcttgccctgttgcccaggctagagtgcagtggcacgatctcagctcactgcaacctctgccttccaggttcaagggattcttgtgcctcaggctcctgagtagctgggattacaggcgcctgccaccatgcccaactaatttttaatttttatagagacggggtttcaccatgctggccaggctggtctcaaactcctgacctcaagtgatccgcctgcctcggcctcccaaactgctgggattacaggcgtgagccaccgtgcccagccccatcttaactcttaatcagcccaaaagtattatcagctgataggtccctgctaacacaagggtgggtgcttccctgcctgtgtgctgcagatgtgtgtccattctccacagtcactgtccactcaagtgtcaccagaggcagggggcctgtgacactgaccatctattttctagtaacttaaactgatgccacttctctgttttttcccttcagcaataactggaattgtgactcgagggatagacccctggatgtgactcttctttttaaaaggaaactatgtggaggacgatgcaaaaacatatttatcttagtttgctctgctgtagttctgttatttatacttggtgttgcttgtcatggacaccggtgaacatgccgtaactctgtgactgcattgtaagtgcagtgggggtaagcagtcctgtgagtggcgcatgaacgctggagcttattccgccgcctgccccagtgtggggggagatacctttaccatgaacttacagaattaaagatggcccataaggaattccagaccaatatttcttcctgcggtttattctatgttttatatattatctaaatatatgtatatgctgtgtcatactcataatctggaaatgaataaagtgatatattcctggtttgtaaatttgttcctagtttgtcttttttcatggtgatgtttgtttcctttgtgatatgaaaagagaactatttccattgaacatcttatacatttcatgctgtgaaatgtcttgtattaa

SEQ ID NO: 83479 - DNA, 1262 bp, Homo sapiens
catatctgattgatcgcccttaccacctccacgctactcttttccagtgagtttgtatttgcagccctttaaacttaataaaggagaaaaatcacaattcactaacaaatccacttaatttgatttcaaacctctggagacttttcacatggggatacttgtgtttttcttcatcgggggttaaacagtctcttggggaaaagctctgtttagtttgtcttaccaccagccaggttcaaaatctagagagactgatgggcattccttcaacaaagttgccttgacccctccaagttcccttgttttgtggaatacattcattcattttgtaaaacttaaatttgtgagtgtgtttgttatctagtaacactgggagaaaaagaaatctctttagtaatttattgaaaatccaactaaaagttagcttgcctctgggcagaagtgcaggaatactacagtctatccagcttccagcctgcattggcttctgtgtgcattgtacggctttgttttcttctgtgaagacctgaataggtcatatctgctggagttccagggaagtcgtaaactttgagatgggcagaaggcagattccctaacattttctccctgtgagatctggctggtctttctggaactgagggaggcctcttgttgacactggccagagagagcttgagtgatgtgaaatttgagggcatgctttaaataagggtggatcaatagcaacatgttgctttttagcaatagcagttttcaggcccaagttacttcttaatcctgtcaatttaactgtctatttgctctttgcagtttgtcccgttttaaagaatggttatgttattgagaataattagtggtgtgttataaaagtagtgtttgcatcttgttggaatactgccagctcttatcagtagggctgctcgcattagttggaaatgatttcttcattaattccttcttcactgaatctgcttggttttccacagaaaatacaggaggaatatcgccacttaggttgggaacatgagatggcgagtgaggtgggcacttaggttgggaacatgagatggcgagtgaggtgggcacttaggttgggaacagtagatggcgagtgaggtgggcacttaggttgggaacatgagatggcgagtgaggtgggcacttaggttgggaacagtagatggcgagtgaggtgggcacttaggttgggaacatgagatggcgagtgaggtgggcacttaggttgggaacagtagatg

SEQ ID NO: 83480 - DNA, 1175 bp, Homo sapiens
cggggaatggttgtgtcgaattggggcctgggagaggccgagaggacgctgctgtgccttgtccccagcctggcgggactggggcgcgaggtgggggcgtcgtgtaagcagcggaggaggtggggggggggcggtgcatgtgggtgggcgtggctgagatctaagtgtcctgcagctgtggtgtggttaggaccgcgaccctcgctgctgtcttgacttggtcggtcagtccattcttttgagccactgtttccccaccaatataatggggttgatggtgcccatctcgtagcatgaaatgcacgaacttatttgaaggagctttggggatgtaaagatgaaaggacctgctattcacgaattccaaatatttactgatatccgtttttgtgccaggcacggtgctgggcactagacacagagcctttgttcaggcacccttacagaggagcagacagaaagactccggccaagccagtgatgtttaaattgcattcatttgctcccttcctcccactgatcccaaataagtcagaattcagtggcccttggcacctgctccacactcactgtgacttgcctgtactatgccctcggtgcctgatttctccatcaggaaaactgcagaatgctgacagtcaaagtcttgtttggattaataaactcagagccaagtacaggcctcatctttattcaggcatccactagatgatatgtgtttggccccacgagatgatgaatctgttttttgcagatgtgaagaaagatctagctgtctatgaattggtctgcattttattactttggtatttcgttcttcatgcaaattcccaggcaatcagctgtactatttcttgaatataagttacgggaggcactccaatgtgaaatttaagtcatattcttagtactgctctctgggagaatggcgagtgtgggtatgccgaatgctgctttttagagagatgcatgtggaataatctcagtaggatttattggtaatgaagccaagaattttgaattttatcttggaacacgtctctgtattcccttatccacacatgagagctctttatgagggccacataaagttgggagagaacatgagcagctttctgcctgtcaccactagggaactctgcgttctgagggcagcttttaggatggtgtgtcca

SEQ ID NO: 83481 - DNA, 1044 bp, Homo sapiens
gagtctcccagatctctgggactgcatcaaaacaccttgttgttttgttgtaccctgtagtacctaggaacatgcttcgtgcgtgcatgtttatctccacagcatgtatctgtgctacttagcgtgacttactgccatctcaggtcttctccagacatagagggtcttattcgaatagaatcatttgattggcttgcatctttagatgtcatgtagaacttggaaccataactccctcctccaatttcccccctcaaccaaggctctctttaactgctccgtgtggaaatcatgtttcacaaataattttcagttttgtgggtgattatggttgggttgagaaagtgtgtggttgtagaaagaagagaaaggaggtgatttttgagtaggttgttttgacttttgaaagcaggggacgtcctaacacctgctaccacaaaaactgtcttcagctcctcctcagtgtgcttggagattcagaacatcagctctcatctcccagtggtcctggttgtgttctaaacaatattgattgcattttcctgattaccaaaataatatatgtttgtggtaaaaacaaaaaaaaattcaaatgcttacagagaagtaaataacgaaagccccagcccccagccacacacacacacacacacacacacacacacacacacacacacacacacacacaccccatgctcacaggaaagcctcttcctctcttagagataatcaccattaaattttgtgtatatcttcccggttttttcctatgcacttactattttaaaattataattttcatttttacataaatggtaatcagactatgcattcttattctgcaactcgtatttccacttagttgtgaaaatcttactgcattaccgtgtataaatctacctcaccccttttcgtggctgcatggtttaccattgcgtgatacaccacagttgaatcaatctgttattgatagactttggattgttcctcatttttcagtattaccagtattgctgcaataaacaaatgtgcacatacattttt

SEQ ID NO: 83482 - DNA, 1798 bp, Homo sapiens
ctttcttaacctcatgcaccatgcagcccttctcaaatcaaatactacgcagtggaacccttcctttacccaaagaaagttttcatgaaatgattttgtgtgtgtgacagcttcccaggtgcatagtccttcctcagtactgtagtgctgttctgggaggcactgcttctagaattccactgccggcatctcaccacccacttgctatgctggacctggaaggagaaatgaggttttcaggccatgccaggcagctagctgtttccaggggagagttaaaaatatttgagctcacttactgctctttgtttattagtggactcagccctttttctgagtaaatacagaccccgtcttagtcctaagacacctcagataatcaggtcaggtctgagggggacctagagctgactgctgaatttgtagcttgactggcacagaatggtcaagaggctctgaggcttctccatcagcaccctggacccgagggatggggtagagtggaagacctggtcacaacacacgtggtgcccagagcacccgtcctgtgacagaaggccgtgctagagaccatctctgtcatgataatcagaagaggaaggcagagggtactgttggaaacctgaactcagcgagttctcacagggttctccaccaagtggcatgggagggccgagcttgcattctagcacaggccctcctacacgtggaggcctcccctcgcccgctcaggttgattaatgacgtctttccctcctcccgtctctttccccaggtctgttgcggttctcccacttttccataagcagaacaagaaccaaatcaaacgtcttaacgcgtatagagagatcacgttccgtgagcagacacaaaacggtggcaggtttggcgagcacgaactagaccaagcgaagggcagcccaccaccgtatatcaaacctcacttccgaatgtaaaaggctcacttgcctttggcttcctgttgacttcttcccgacccagaaagcatggggaatgtgaagggtatgcagaatgttgttggttactgttgctccccgagcccctcgactcgtcccgtggccgcctgtttttccagcaaaccacgctaactagctgaccacagactccacagtggggggacgggcgcagtatgtggcatggcggcagttacatattattattttaaaagtatatattattgaataaaaggttttaaaagaaacgtatggagagttttcagtatggaaagggccgtgaactgaggcctgtgactcaggatgagacaaaagcgcattcgtgccaggttctaaccagacgaagcaggggaggtccctgggacaaggtgggccagttttcatttttgtttttaaacagtcttgctctgtcatggaggctggagtgcagtggcgcaaccatagctcactacagcctcggcctcctggcctcaagtgatcctcctgcttcagcctcctgagtagctgggattacaggtgcatgccaccacacctgacaagttttcttaagttttttttttgtagaaatggtcttgccacgtggcccaggctggtctcaaactcctgactcaagtgatcctctttcctagtccccctaaagtgctgggtctacatagaggtgtgagccaccacactcagccaaggagggcccgtttgtaaggactctcttccagagctgagtggtgttaagaggtacacagtgaaccagtcctaggaatggggacaatatggatggctgaagtagactcagccaggaaagtggggctttgccttgaacacattcc

SEQ ID NO: 83483 - DNA, 1725 bp, Homo sapiens
gtggtgaaggagcagtcccagccttgtgcagacaatgctgtgctttccagtggtctcacggcagcacgatgaagactggaaagcgacgggtaatgcggcattgatgcttgccaataaaaccaaccaaccaaacacaaaccttgaaggaaaactacagtgtgataaaaagaaattcttatcattccttctaaatgcacagaagagtaaagacctaaaagtctgtcaaaaagcaagaaagaaactccccagtgctagtctccagggagctgtcactgtggcagcatggggatgcacctagttcaggatctgaaggagctctgcctttggaatgcatgggagatagagactcggagttgttgtacatttacctttgtttaacagggcaccactgttgaattaacccattcagtcaacaagctctgaatgtctgacttcctatctattccattgtggtctgggtttcctttggtgaaattcaggctcaagtcttagcgaaatgtcagcagtctatactgacacaccagcctcatttacaaaaaggagatattaaaacagtgacagtattttttttttaagctctttacaaatccacgttttatgtattttttaatgacatgagctctccaggaaatgtacctcatccccgcagttttcctccaagtggattcatttgggagcaaactgcagtcactttcacaagagtcctctttgatgtcaggagggatcacgaaaccttgcaatgccatgaactggtccatggttatcatcaaaagttccatgctaagtgcataacttggagctcactataacctttgttgatttccctaaccataaaatcttgttgctatttttttgttgctttttcttttttttttttttttttttttttggcagccttgtaaggagaacttcaccatttcccagcacatccctatgtgtgcgcctattttaatgcacctctctgaaacagagacctttttgttcacaaccataactaaagctggaaagtcagtcttcaggcaaggcgagggaggaaaacatcccattagaattttttcaggaaagacttatggaaaaaaatatctctctcccacctccttttatccccatgagacacagtttcccactgtaatcagggtaatatgcatttgtaagttctgatatgtgatacatttatgtgatggcaaagataagtctgtcttgcatgcaggtactagagttgtgtgggcagggtcatctgaaactcaagcaactcagaggaatatacaaggggcttggggaagaaaatggtgctcccggagcaagtgttggatccattttgcaaaccttcatgttagcagagaaagctagagtttgtttaaacaaaaatagggctgatttcattttggggactcaggagcaacatggtttgtaggcagtcccctcaccccagctgcagggccatgccacagctgtggggacttcacacacctaggctagaactagaggtgtctaccacatcaccctttaagatttctttattaactatttaataatgccatacatttttataaggttagatgtttgtttgaaacatttgtttacattccatattccaataaaatcttattggtattggtagcagatcctactctaaatgtagattctatttttgtcgtttggtctgtgggaacttaaaatacaaatgaaactcttctcttattatagagttgagtttatagagta

SEQ ID NO: 83484 - DNA, 1633 bp, Homo sapiens
ttttttctgtcctatttgtagctgcgactgatagattggggtctggcagaattctatcatcctgctcaggagtacaatgttcgtgtagcctcaaggtacttcaagggaccagagctcctcgtggactatcaggtaaacttgttagcagagctattctgggttatttatacttgcttagggcttttctggtttgctgttgatctagtcagtttgaatacactcaaaacccagccattatttcaccctaaaatgctgattttagttttttctcagctagttttttggggggacagagaagtttttaaatctaaaatatctgcaaaggttaaatgaagactagaaattcagatcatttctaggagccaggaagttaaaaaaaattttttttaaataaattatctatggccataccaccctgaacacgcccaatctcgtctaaaaaagaaatttatatcagaaaaatggatttctaatacccttggctaatgcgttgtccttattgcctcagatgtatgattatagcttggacatgtggagtttgggctgtatgttagcaagcatgatctttcgaagggaaccattcttccatggacaggacaactatgaccaggtgagcaaatgctttctggttcttatttatttgggggtgaatgccaaaaaaatagcatccttagataagaatactatccttgagccactaagtatcactcagtgtctgcatatgagcttttcttcaagataaagatcgcacagaattttgtgtttaccaggtccgcagaagtagaggcagataatgccatctatgccaaacttccaaagtgaatctgtgaagaagtcaggcacctccttgtctaataaaactagattttagtcattagattgtgatgccctgtactggtccacctctagaagattattatcgtaagttgtattattttaaaggccgtttggaaatttgcattcatgtgaacttcttgtccttgggtctgtctgcctgccctggacctgggtttgtatctcgttcctagaggtttagtggtgtggaagtcttctgattccttggtgcagtgtcctcacgggctcatggtgtgttctgtgctcagtgatttggtcagtttgttttgtgtttcagcttgttcgcattgccaaggttctgggtacagaagaactgtatgggtatctgaagaagtatcacatagacctagatccacacttcaacgatatcctgggacagtaagtaagagagagagagagagtgctttaccttaccccgtttcagaagtggaaaggttagccaaaatcactttcttttcccattctgattatagtaaaatggaagtagccctcttttttcctatgcatattttcttttaacttattgagatatttggactttatgtcttttaatcattttacttctctgagagataacctattaatagaaaaggtaaaacaaaaatcataatgttatagaaaaaagttttctggtacagcaaaagcttatttttaatggccaaacttggagagcaatgattctttgaataagagacttagtttgttttttattatattttattttatttacttcatatctcttcaaggtggacttacaatttcttcttgttctctgtaa

SEQ ID NO: 83485 - DNA, 1035 bp, Homo sapiens
aaagcatggaaaaaccgactccactcttgatgggaaaagcattgaatatgtaggcatattatagagagacatgcctacaggggtggcaggcatttgcagccatctttccttgccatgtgtcgtcatccccttcttgcatgagtcttcctaacctacccctgtagccgtggctcgttaatgcagggaaaagtgatgggtagaatgtctaagagacttactaatcccaagcacaatgaaatttgaagaattactggttggtggaggaatgatcattttgtttgtctagataagcacttaaaggaatgctcagtttgtaaaatggaatacacccatgggtcctagatttttgtgtcctggatcactaagaacctaatgaaaactatgaactgcctccaaaaatgcatgtattaatatgcagtcttgtgaaaagttttagggtagttgtagatcttaagaacagttctatgaaatgaatgtgtttttataagaacttgtacgcaccactttttattagagaaagctgaggtggtggatttaaggttcactcttatggctaatgggtcttcctttttgtcagtaagatcagaaacacgaaaaaggtcgagcttgatttatcccacgtttctccatgtcttctctagactaaaattgaagcattggtgtggataaaatttgcagtgccatgatcctgtgaactgtcaggctagctcctttcctggaagtgcttcctgagtaatcccatgcactctcaccccatgagagctacaattcagatctcacagttggttatttttaagtaagatggtttgagattttgtgttatttaaccatcagccaaagctaaagttgtataagctagcctgcccttaggtcccataaagacatccaactaatgcaggtcttcccaggtggacatgtgggtgtcactcaatgtctgatgtcctttctgctttctggaggtagcagctaggcagtgaggacatatacttatttttgctaatgagacgtagaatcccagatgaaacttgaaaaacg

SEQ ID NO: 83486 - DNA, 1931 bp, Homo sapiens
gcctgtgcatttcgttccctgcgctgccctgaggttgatgaaatcaaatatttttcctaagctggcagggggaattactcttacctaaagggggaaacttgagaaagcaaagacctggtattcttagaaaatgttaaatttggttcttggcaaatttgatttttttattaaatttttttgaacattatatgtggatcaaaaatataaaatggtagacagtgaaaagtctcttttattcccctgtattccagctgcctattcctttacacatatatacgtgaaaccagtttttattacttctgtatcatttttgcagatacagaaaatatggatgtatagtttttattttcccccttattacagagacacattatatacactgttctgtgttccctggagagattccctacattgcttgagtctctctttcaatagaagaacaagagaagtttaataaaggtgtgtttcttaattttatagaaagcatggcttggattgatgggaaaacagatttacatggatttgattggatatcaaagataatgagagttcctgacaagggtttatgatgcctttaatgaagcttgtagcattaatgtattctgactcttagaaattttttaaaaactcccagcgagtgggtctctggattaccaataatgaaaacttccatttacctatcagtttggccagtgatcatttttgatacccctgtcttttttcactcctaagacgtcaggtgttgcctgtgaaatgttctttttttccagtctggaattggtttccggggagcagagggtatagatttttttgtaagctcttgccatctgcaaatgctatagcacctcctttttccttatttttcttttttgagaacagcctgtgtcgccactgttttaccacagtagcccatgaagttcttcagagctctgccatccactcagaactcacttctctagagtatactgtggtgttacagtggggttagttttcttgatgttcggtaagaatgtgaagacagacaacttagacttcacaatggtgtaattgtggttaataattgtaattggcaaaatcacagagcattaaataggaaagatctgagttggcttaaatgtttttctcccttggaattccttccatttttttttttcttctcttctgatgattaaaatataaaaccttcatctttagtcttcccatttatttcagatcaggtagtaaaaaagtcatgggattccttagtcacttaagtatcaaataagcttagagaatggcctgcacttaggatgacaagatgcagtgagactaaattaactttctgttttctggaatctgtttcagcaactctaccagatcctgacagactttgatatccggttttatatgtatgaactacttaaagtaagtggtgttcataaaccattaatttttttcaggcctgttcattaaaagataagtttttgagagaacaaagagaacttaagcagaatgtttcttgatacccagaggatttagtgaagtttttaaacttatattgaggcctccatcgaggaatcttcacatagaaactttccagtggaactgggaaaaaagtggccaagtcaaggggtaccagggacattataccttagaacctcccatagctcttgttggtccatatgttttctctttgctgctttattaatacctactgtgaatgtaacaaatcatcccaaacttaatgacttttaaaaaatgattattgtttcttataattgagttagccaggtgattctttaggtctcagttgatttgactggggcaggatggtccaggatgacctcattcacaatctaggaccacagctggggcagcagggatagctgaggtctcatcctccagcctgtgaagttcatgctgcttcccatggtggtcctcctggggttcct

SEQ ID NO: 83487 - DNA, 1021 bp, Homo sapiens
ctttttcttctctctacacatgacagggatttatgggcatagactgagctgtgtatatcagggaatgtgcacacactgtgtggcttgagagtttggtgtgttggtgattcccacatctggcaggtgaccagagctgcctgggaagctgtcttataaaagtgtgaatcttcctgaaggtcatggttgggaatggggtcttcagatctgtggctcatggtgatgcagctgaattgcacttggagtctgaacagctgtgtgtatgcctacggtagcagtgaggcccacctgtggccatgcctttgtgggtgtctgtggttttacaccatggaggccctcctcagactttttggagctaattaaaaggcccaggaaatttccaccttttaagtcatttattttttgaaaatgtaaccaaagctgacttcctgccagcattttgcagtggattgtttaataatgttctccctgtagctggctaagaagaagggagagaaagtgtagttcttgtgacgtttctctttctaatgtgtcatggactcttggtacttctgtttcttggaagagtgcttctgttttgttccattgactgtgaacattgtaaaaacatgtatgcaagacagagctgccatacatggtgtttggtgtatgaagcacttgcttttcggctgtgtgaggacttcatatgtggttggagttcagtgtaggaaatgggtgtggtactgagtgagttgttcagtgggcccttggcatacttgggtggtggggagagttcagagatcttttatcaccaaatttgatgactctgccaccagccactgtacccatttctccctgttgtgtatgccacgaagcacagggaatgttggcatgagactcttggggtctggacaaagcacgcagcagagtgaggagtcaccttgagaacctgaggttaccaccagtccctgtgtgaggaatgttaactctggggacattgtgttcttaatggtgtcctgtgcacagccacattggagagtcagtg

SEQ ID NO: 83488 - DNA, 1126 bp, Homo sapiens
ctggagtgcaatagcgcaatctcggctcactgcaacctccccctcccaggttcaatcaattctcctgcttcagcctcccaagtagctgggactacaggcgtgcaccaccacgcctggctagtttttttttttttttttttttttttttttttggtatatttagtagaaatggggttttaccatgttaaccaggatggtctcgatggcttacctcgtgatccacctgccttggcctcccaaagtgctgggattacaagcgtgagccaccgcacctagcccattttctgtttcttaaagtgacatctgctctgttgatttaacaactgctgaagatcagttagtgggaattctaattcttagagaaattctctctggggtcttaaccctcaaaggggatgtttcatacattctcttgtagctttctttaaagggattatgggaaattaatgtttttttgaagcttgcatatctgaagtcatttttattttgtcctgccaattaatgtatttgctagggtatagagttctaggttataattcataatttccttgattttgaagagattgttccagtattaccactgaagccattctagtttcatcttatgtgacggttttgtttttgttttttacctctggaagcttttaggattttctcatttgcactcttctgaaatttcacaatgacgtgccttcgtatgggtcccttttatcttttgttctgcatacttgctgggctttttcccctgtgttttggaaaaatatttttaatgttctttgatttttctcccctttcttctttgttctcactttccagaactcattcaaatgttagacttcacatcttacagctccattttggtcttggaactttttaaaatagtatcctgttcttttatgttttatgtaataccttctattttctcactaagaatattgtattttttcccttcatactttttctctatttttctttgtgtgtgagtttttgttattttgttattcagtctctgaaatatcatggtttttgaatgtctgctcattgctctaaagaaccatcagcccctgtctcaaggatgcaggcttggctgctggtatcttagcctcaagttgaggagaaccatggg

SEQ ID NO: 83489 - DNA, 2172 bp, Homo sapiens
gtttgtttcatgaatgacattgacgtgtttgatcttacaggccggttattttgtagtgtgtccttccctggctattttttaatcagattgtacagtgcttttttcccccaaagtttcgagctccctcgttaatgaaaaagggactaaggagtaaggtttctaagtggagtcggggaacatgcacagcagccacatctgctctcctgggaaccctggcacagcgggcggagagcgggtgtcatcatggcagctggctcacaaggacgcagcgagagcccagcctgtcagttgagccccctgttataggtgatgcaagtgctcttgtttcatagtcctctccttctctgttttgttatgtgttcaaagctgtatcttagtgaccaacaaaagatgaaggtttctctggcatgtgtgtatgttatattttccccctcccctccccttccccaccccacacacaggcaaaaaaagtcttgctttattatttattggcaaatccattggcctctctttgcctctgctattataacagtgtctcagtgataaaatactcttttttccttagttacgtttctcccgttagccacacttgggaaacaaaagcactgtggcaagagtatagcatgcagtcagactgcccagcttccagctttgattcctgcccctctctgccatgggctctgtgatcttgggcagatagctcaactctgctacataaggactttgtgaggaatcacaatgacttattaaataataaattactaaaaatatgaaaataacactatcatttattaggtgcttactgtgttctggtcaccattctgagtgccttataaagcatacttgattatgatagacttactttttcagaactgtttctattcttcttcaaactctttaactcatttaagacaaggagtaatatgtataatgagagtaattatttttaaagcctttaatctttccagcagactgaaaagttagatagaagtgttcagtcactgttgtatcagattgatttctcctttcctgattcaacatttctttcttcaggaatgggatctgttggaaaacattaactggctctgtgctgatttcagattctagatattaaggaaatgggagtggtgacaggaaatgagagccagcagctgggaagcaagtttgtaacctgatgtcagtgaactggtctttcactcctgaaagacaaaattacatgtaactcattggaagagcaggtgtctcaccattttgtttcagtttttccatttgtgagtgcatgatatacagctgttcagagctatattttccacttggcagttatctagtaagcccaagttttatttttaaagtgtgatatgggtattcaaaatttttaagtgccctcaatgtaactacttagaagatcttgacacataagctgtatgagtctgtaaattatttaacttaatgttaaaggttcttatgggcaagcccattctatttcagttttttcaaatttaggcacactcttgaacacaacagagtgtacaagatagcgtactatccatctgattggctaacattgttttaaagttttatttattaacttcaaaaggagtctcacttctgattactcttgtgtatttaagccagtgaagaaaaagaagataaaacgagaggttaagattctggagaaccttcgtggtggaacaaatatcattaagctgattgacactgtaaaggaccccgtggtaggtgccaaatggttgggggagtatactagtagaccggggtgtggatatgggagttgtttaacacacagaacctcacgtaatgatacagtggggatggtggtgtttgtctttaactactgactggtttgaaaaccagaaaaaaatcatggtgacccagtgataaaacagctaccaccactgtgatggaacctaaaagtgtacagagaaaaatcccttttctgggtttgtacttcactattttgattcagcccacaaatgtttgctgaatgtctcctttaagccccagcctctttccagttttgaaagttcattactgccaatttgtgttactctacctcacttaagtaagcatgacatttgaaaatctgggtttacacaaggaaagaatgaatatctccacgtggacacctggcataaaggcctgagcaggtcccag

SEQ ID NO: 83490 - DNA, 1799 bp, Homo sapiens
attttgcacagcataatgtcctccaagtttatcactgttgcatgcatcagaatttccttccattttaaggctacataattttccattgtatgtatataccacattttgttagccattcatccatcagtggatgggttgcttccatgttttagctattgtgaataatgctgctttgaatatgagtgtacaaatatctcctgaagaccctgcttcacttcttttgggtatagacccagaagtggaattgctggatcataaggtaattctatgattaatgttttgaggaactttccatagtggctataccattttacattctgactgcagtgtacaagtgtggctgtttctccacatccttgccaacacttcttttctggtttttttgatagcagctatcctgacttgtgtgagatagtatctgattatcattttgaatttatgccttgcctttttaaataattttttttaactcctgagagtaaacagttaccctcaaggagtagatcatgtaattggggtgatgaaacttgaaagattagaggaaaagttttctgtgatgaaataacattgctcagataatatttttatataggtcaagtgcagtgagttttagggatgccaccagggtagtgaattacgtgccatcatccaggctgaactttctttttactctgtccttctacattcttggcaaccattgttcattgcaggtgatgaaattaatatcttggtggagcacttgttagtttggtagtagagtaaaagtaaccccaaatttgagagctaggagctgtagatatgttcctgcctgtcttgaatttgtcagttcagttgttctttttttcaccactttgtctactagatttcaagttaaaaaaaaatttttttattggtttggacaatagctaaactgattgagtttgaatcttttaaacagatagtctctgaattggaataaatgaaccccagacggagacttcttctagcatgcagagtgaaactgtgagatcgttgtggaaatatatgtattttctccattttgtgtaactggtggtgaatggctacaggctctggacaggagagtcaaggcatccttatttctgtaaaactaggtttattttccttaggataccaacaatcctccctcataaatcctaactttttatctctgattcacattaaaaggatcactttcagctcctcagagctcattggtttagtttctcgagcatctctccagttcagaggaataaactgaggctgaagggatctacctgtagcttagtttttgatggtttggagggaagtgtcctggactgtgggtctgtcaccttccttttttatcatttcttggtattttgtttgcatgtgaggactctagctgcctttgtgacttgggactcctttgtgccaccttcagagttgccctgctattcccagtctctagtttgggaagtttaagttagacacctggtgggcagcaaaatatgcttcagttgctatgccagatacctttagatgtattgagagggaggttcatcttaactgggttgtccaggcctgacctgttgctgaataaccggagaccaatgcaagactttacatggggcagcgtcataaaggcaactaatgggttgtgcctgtaaggagttaggagtactgttagaattagaagagggtttttggtggatataggcctctggctgtgggtttttttcctctctgttaccactcttatagatctatagctgctttccagtattggatgacaaatctagaattttcttatatcgaaaggc

SEQ ID NO: 83491 - DNA, 2287 bp, Homo sapiens
atataaggcttcctcttagaggtcttattttataaacagattgactatccattttcccctagatattaattatttagctttaaacaaagggtggtggtattaaaattttgctctttaagcatgtttagcatacttgcagatattttttaagttctgtgttgtcagtaggtagtgttaaaaggatgggcattggttatacatctttgttagtagcttcatcgtgagctggtgatctttatattatatcagaatggtgctttcctctttatttcctctttatttctcctgtggtaggttttttaccctcctaaatttaggcatgtgtatgaagacatcttcctgaaacaacacattagtggtatttatctaagtttttggtacattctgattttcactaatgtctcatggtataaaagtagtgcaaacagtatcactaaagtattgctaacattaaaaataatgttaaaaattatatgtgaactaggccgtttccagcattgtactggggagtcacagattaagagtgtagttaacctgtgtcaaacagaatcgcagaatgcgggcacttagaaacctagaaaccattagaacccaggccctttttacaaatcaaccaagacccagagaaaggatgtatatgctcagcgtcatgtagtcagggggtggaagcactcggtgtaggaccttgtgtacctgtcatgaagtcttggtagatgcgaggagcataattaggacattagctggatgtttgactttgtgatgtcctgatctgtactggaagaattgaggaacactcaccaggagtcaaatgaagttaattcgtttctaatgatttttggagttatttttctcaaaggaagtgtttgactttggtaagttgctagttgaagtgtggaatccaagagtcctcgagggctatagggacccaggcaggcgttctctatgattagtatccacagcagcatgtttaatgcttcaatgaaatgctgctttattctcttgaagcctcagtaaatagtgtttttatggttttttttttttttaacccatagagttcctccaagtctcagcatgatcacttggcagatttcgggattaatagtttaatagttttatccctttaatatatgagtttatttgagagcaaaccacatgtgaaaagaatatcttgatatagtgtgcccattttcatgtataaagcagggctccagatagtttctagagtttaatttcaggatctaccatctcatcatcagggtggtgtagtgtaggaagtgctgtaaatgagagggcagaaggcttgagttccagaactagtttcttcattgatacccacttgactgttttctcatctatgaaataagcatacatttcctgcttaagtcacaggattgttaggaaagtcagataaactatagatagatgggtagagagattgattgtcatgttttagtaatctacaaaatgcttttctttcctgagagagtatggcctaggaagtggtctgcctggtttcaggtgttagctccaactgtagacgctctgtgacgtcaaacagttacttaagttctctgtgccttggtgtccttcctcaagtaaaactgttaatagtgctcatctaagacggttaaatgtgcttaaaacagtgcctggcctgagagatcaataaagtatagtagtaataacaatattacatttgggtcatgcgagtgatgttagaggcagaaccaatagtagaaagggttgtagtgttctcctaatgagattcaaagggtctgctctatgccttgcctttaaaaaaaaattgtgttaaaatacatgtaacataggctaggcgcggtgcctcacgcctgtaatcccagccctttggtaggccgaggtgggcagatcacctgacgtcaggagttcgagaccagcctggccaacctggtgaaactccgtctctactaaaaatacaaaaaattagttggccatggtggcgggtgcctgtaatcccagctactcaggaagctaaggcaggagaattgcttgaacccgggaggcagaggttgcagttggccgagattgcaccattgcactccagcctgggcaacaaaagtgaaactcgtctaaaaaaaaataaaataaaataacataaaatttaccatcttaaccattcttaagtgtacagttcagtgggtaatgttgtgcaaccatcactgccgtccatctccataactcttcatcttgtaaaatggaaactctatccattaaacagtaactacctatttctccctcccccatttcc

SEQ ID NO: 83492 - DNA, 1053 bp, Homo sapiens
tatgtacataagcataagttttcaataagctgcttcaaatctaagaaataagcaaaacgtaaattgaaattaggaatatccatattccactgctgtatattcagaagaatgaattgctgactctaaagcaattccagaaaaatgtctgaacttttgtgctatggcagcatttttagaataagtgtatgattttctgtggtgcttttttttttttaaaggaacagcattcaggtgtgtgtataaataccagcatgttcatttaggagagcatcgcattgctgcttcatcatccaaagagctttataggctctagctttccccctactttaaagattcttggcgtatgttaggaaacccagtatgtaagctgctgcaggttatctttacaaatgggagacctaggcacaaagaaacttacctaatgtcattatgttgaatgaccattagccagaactcctgtttcctatttcttcatatctcttactgttcattttagcactggattgtaggatctgaacgttgagcacagaaacaggtaccagtgtcctggaatcagacttgggaggcccctagttaatgaaatgtttcttgtttcttcttgatgttgtttgttttcacagtgcagcctaaaccactagtgaaaattagactcacttctttatgttttttaaagcccggtggcatttctatccagattttgttcctgtctgaaggatggggtaatatatcactaatggcattattgtggttttgttgttttgtgaattaaaagtattactttttaaaaagaacagggtaacaaggtctttagccaaagttgtgtttctttattcaaataagttgaagttatgactaatagctactattgtggtgcttggtcataggaaattaggtccttaacagactaccagctcctcataacttggaagaatctagaacagccttcctttttgtaaaagcctgctgtattttagctgcaggattgtattatgcacatagtgaccaagatagagggtggctttcttgaggacaagtggtcttacttttgtagtc

SEQ ID NO: 83493 - DNA, 1395 bp, Homo sapiens
cgccgcgccgccgccgccaccctctgcgccccgcgccgccccccggtcccgcccgccatgcccggcccggccgcgggcagcagggcccgggtctacgccgaggtgaacagtctgaggagccgcgagtactgggactacgaggctcacgtcccgagctgggggtaaagccgtcgccgccccccgccgggcccgctgatccctgcccccgcccggccaccccctgcgaaccgcactcgggcccggtggtgtctcccgccgacccctccgcgggcccgcagggaggcagaggtcccgctctcgcacatgtcctcgtcttcctcttccctcccctttacccccgtttcgtccctttctccccgctttgcgcacccctttcccccaaggaatgcttttttactcggggagaagtgtggggtccagggatcgacgccgggtggaagtgagggagctgcccttcctcacacttctgggtttccactggggtgggaagtcaacagctgtcctttggagctattaaaatgccctgccttttaggttttctgagatgaggtggtgggaggaaatttcttaaagacgtccagatttttaaaacaggcattgtctaccttgaagatgtgaaacgagaagcaggtgctggggagccgcggggcacagggggcaccctctaggccttcaggacgggtgctttgctcgcccctctggattggctcagagcgttgccttcctgccccatcttcccaagttaggagagaccaattaggttaggagctctgcagagtgaagggagccaagattatgtcgtggctttcatttagggaatgagttgtgacgtgatgtatagacacttccaagtgtttgcctggtggaagcggctgaatgacgtgtacagtgggcataggcttggttaacccccagtcctggcatttatgtgtgtgtcttccttttacagtaatcaagatgattaccaactggttcgaaaacttggtcggggaaaatatagtgaagtatttgaggccattaatatcaccaacaatgagagagtggttgtaaaaatcctgaaggtgagtgtcctatgagtggtatgtaacattttcctccccacagggcaaaagtttgtaaggtaccccagtcacattctataatgggcaatgcaagcttgaatttaatttaatttatttgtttagagtcagagtctcactctgtcacccaggctggagtgcagatcatagttcactgcagccttcaactcctgggctccagtgatccatctcagcctcccaagtagctgggactacaggtgcatgccaccacgcccagctatttttaaaatttttttgtagagtcagggtctggtcatgttgcccaggctggtcttaagctcctgagctcaagcag

SEQ ID NO: 83494 - DNA, 1054 bp, Homo sapiens
ttctgaattttgtggctcattaaacatattaataaaaatatcaaatatatagcacttactatgtgtcaggcactgtgccagaggctttgtcttccttattggaaccctaaaagttaagtgctattcttaatacccattttataggtgaggaaactaaggcaccaaggggctaacgggttttgcaggtctactagttattaaacactagttatttgaggtttaaactcttattactagaacttactcaggtaccctgtcttgcagctatgtaaactctgctctcaaaactgagactgagatgtttgagaaatattacgctaaactggagcccagggatcagcgacctccacgattatcagaaattaaaatatcagcagcagattatgcacaggtacacaatggagatctagatcattcttttattgtttgtcaccttaaatgcaagtggtatttgtttatctgcctttggtgcgccctctgtggccaattgaccatgggaccttctccctgttttacttttgatttttctttgccctctagggtttctctttcaagtgactgtgaaagaaactgggttcagttaatagtggattgactctcccagcatatcttagtttacttgaaagaattccctttggctaggtgcagtggcttaggcctgtcccagtgctttgggaggctaaggtgggaggatcacatgagaccaggagttcgagaccttcctgggcaatattgcaagaccccatctttacaaaagaaaattcttaaattagccagatgtggtgatatgcacctgtagttttagctacttgggaggctgaggtgggaggattgcttgagcccaggagtttgaggctgcagtgagctatgatcacactgctacactccagcctgggcaacagagcaagactctgtctcaaaaaaattaaaaaaaaaaaagaattcatttaaattgagggactcaactgtttacaaggcccagccagccacctaaatgaggaaagtgggcctagcacaggcccttgtctcaaaggggttatctgtataggcttat

SEQ ID NO: 83495 - DNA, 1042 bp, Homo sapiens
ataacccaagttgccccagaaagcagcagctccccaggcctccacaaggttaagcgatggaaccttcctaatgggaaggctgggcgtgggggtctggtccccaagatgttgggcttggggccctctcgggccctccatactccccaaggtgtgggtcaagggctctagctgtctgggcagtgcccatgcaccctgccctgccccgcattggtaagctgtgcatgtctgtgacgaccctgtgtgtacctgacatgggtgagtctgtacgtgtggtctcggcttttgtattcggaggatcccgtgtgagctgcagctgttggcgtgtgcctatgtgctgggggcggatgcaggggctggggaccatcaaggatgatgtgtggctggggtgggaggagcagtgacagggctggggcaaggaggacttcagaagccaattggagccaggcttgtctcccagcagccaatatgggagctggggctcctggtaagcgagtggctgctcagaaaccctgcggggaggaggggctagctaggctgggccaggatccctgtataaatggcccaggagctgtgccccatcacagagccgaccatctcccactcgagctgcccccgccctctggacccgagtgactcaggcctttgtttgtccttcctggtagaggcgggttccctccctcggcaagatgccggagtgctgggatggggtgagtgagggcgctgcgggcatcaaggtgggccgggaggatggtgcatccttatgacccaccgcagggaggaagtgcccccctcaacccacatctggtggcagcccggccttcaaatagcctcaccctggggtcactgagacacggccagagtgctccaggttccctggtgatcctgtttgcaggagtggctgggggcagctgctagtcagagcccatagcaggggctggggggagcgtgtggttggggggtgggtgacatatctgcaggaaatggaacgtggaaggcactgtctgacttggctgcattgcccgtgtggacccgggcgctagtg

SEQ ID NO: 83496 - DNA, 1052 bp, Homo sapiens
gaagtaatgaccttgagcagcaaaaccaaaggtgtgaactcaagaggatcccagagcaggctctgcagaaggcctctagaggggatggggaggggggtctgacccgggcctgcctgaagggagcccttgaggatgctgggctcacacagaagggcgttcaaggtggaaggaaccacatgcgcaagagccttagagtgggagccaggggcagtgccggggtcggggctaggcttggctggcacggggtgttttctgaggattccaggcaggaccactgaggccgttcccctgcagcagcaggaagtgcctgagagttctgagtgtgagagggacttgggctggggaggcagagctgtccaggaggggctgctgcaagatggagaaaaacagcctccctggaccctcaagggcggaggacagtgacagcacaaaccagtggctggtttgcagagaggaccagaccttccccatgcagatcagttcacattgtctctgtactgaacagccctgagaaggggtgttccatccattcagtcctctctgggggcttcttggggtgatgagaacaggatgccccaagtaggggctctaccacaggcctaacaggtaccaggctgcgtcacctcattccccagaggagccaagagcggaggctgcccagagtgtccagcacggtctctccccttcaggaacatgacatcgagacaccctacggccttctgcatgtagtgatccggggctcccccaaggggaaccgcccagccatcctcacctaccatgatgtgggcctcaaccgtaagtgcagcccagcctcagtcagccctcctctgcctcccatcagccagagcggtgaggccccccaccctccccacagggccctgtcagccccactcacactcacctctgttgccttcgccctccgggcctccatttccccgacggacccgaggcttacacttctgccttgcctgccctctgggggcccggccttccttccagtcccccggcccctctgctcagccatagtggaagtgtgtctttgcagacaaact

SEQ ID NO: 83497 - DNA, 1001 bp, Homo sapiens
agcacgatggactggtactcgctgcggatgttggccaaatccttctccacggcctcaggtacgcctgtgccctggagcaggcaccggcgctcctcctctggcctgcagggacacccacacccaggttcccttcattccttcacacactttactgggtaggactggtgcaggggcggggaaacttcttgcagcaggctacggtgcaggcgctccccaacccctcccaaggctctcaccagaacatcgggtgctccaagcggcccagctcgggccagagcgcaaagtagggcctccagcgtgaggccggggcctgcagctcgtggagcagcgccagcagcagtggcacccagcccgactggctctgcagcgcaactcgctctgaggaagacacaggtgtgagcgccccggcgcggcctcgcgggccgggcccgccccgccccgccccgccccgccccagggccctagcccgccgccgtgcccacctcgctccagcaggccgccgatggagcaggtgtgctgcgacaggagcgcggcccgcggcaccacgaacaacagctctccggcctgcacgctctcccgggccaccatgccgtagccggccaccgtgccctgccggctgaccgccacctgagcaggagggctggtcagggcagcccgcgccccgccgcgggtcctccgcccgccggctcgctcgctcaccttgggactcagctccagccccacccgccggcaccagctcaggaagcaggccacaggatccaggtcgccgccgtccacgggccccgccacctgagataagtgcgcgcagtgaccaggtccgacccccagagaggccgctgggaactgcaggagaccgcggcgcgagcgcagaacgggctttgggtggaggaggggacgagcggagaggggcgcgggacccgcgggagggagcggagggggcgcaggcggacggttctgcgaacggagaaggggtgaggcgcggaggaaaaggctggaccccg

SEQ ID NO: 83498 - DNA, 1019 bp, Homo sapiens
agaaggatttggccaacatccgcagcgagtaccagtccatcgtgctgcccttcatggaagcccaccccgatctcttcagcctcagggttcgctccctagaactctaccaccagctggtggcccttgtgatggcctataggtcagtgggtggggcctctgaggacggaacccttttctttacaactctatagagggacaaaagtggaaaaacagtgaaatccacccccagtccctcacccaagacagggccttagccaggttctgtcaatggcagctttcaggaaccactggaggaagaagaggatgaaaaggagcccaactcccccgtgatggtgcctgctgcagacatactaaaccacttagccaatcacaacgccaatctagaatactctgcggtgagtggagtttctcttggtgcactgattgagcatgattcaagccattgtgtcttaggctccattctcttactagtgctacaaaatgagtaggtgaaatcagctcctcctgtatgtccttttagtatgcatattactgtagaatcatttgaatgcgaaacattttaaagtcctcaaagtaagttgtggttaatcctctgataaactatactaccatcatttatttagtgctagacattgagtggtctgcatagccatgtttcattcctttctggctgatcacatcagtgagcccagactgtgtgtggctctgtggatagcagcctggaacagtgatagtctccgtgttttggagggatgaggacattcacaggccaaaggtctaagacgatcctagaactgatataaagctgtgtttataccagctctattctatataaaaagtagcctgaaaagatggcacatttataggatcagaaattagtaagtatggttatttcttaatccttgcctccattttcctttcccactttgatctgcgaaagttccattttttcccccccgaggcggagtctcactgtgtcgcccaggctggagtgcagtggcgtgatctcggctcactgc

SEQ ID NO: 83499 - DNA, 1334 bp, Homo sapiens
ggaactaaaggtagaactttggtagttaacagcatcagtcatggctgaactacacctgctgaaggctcttcttaagtggaaataatcttcatggggctggcccgtgaaaggcatggccccagcttctccctttcacctcagaattgtcttcggatggtagccactcagcccattcctaaaggccatgagattttcaacacttatgggcaaatggctaactggcaactgattcatatgtacggttttgttgaaccatatcctgacaacacagatgacacagctgacattcagatggtgacagttcgtgaggcagcattacagggtgagtgtatcattaactcaatatttgacactgatggtgtgtctatacccatgcctcaggttaaatagctttgctaaatagcagttgactttgtagactgggtggcagactaaagaagaaatgaacccttgggtgtactgagactttcacattgctgtttcatctacaggaacaaaaactgaagctgaaaggcacctagtgtacgagcgctgggatttcctatgcaaactggagatggtaggggaagagggagcctttgtgatagggagggaggaggtgctgactgaagaggagctgaccaccacactaaaggtaaacggctgaaaatggccatttaatgctgataatctaagtatttaaagcaaaatagctagaagatgagagaggaaatgtgggatttttaataaatgctaagatgagtttagtctcctgagtcatttcagaagtacaaaagcagtacatctaattaaagagctctgtggttgcttctaggtactgtgcatgcctgctgaggagttcagagagcttaaagaccaggatggagggggagatgataaaagggaagagggcagcctgacgatcacaaatattcccaagctcaaagcatcgtggagacagctgcttcaaaacagtgttctactgactttgcagacctatgccacagacttaaaaactgaccaaggtttactcagtaataaggaagtctatgcgaaactcagctggagggaacagcaagccttacaggttcgctatggtcagaagatgatcttacatcagttgttggagctgacaagttagcagtttccctgttccctgaaggaacagcaataagaactttattctaagctaatactcattgatgtttgaaaaagaggaaaatttggatctttcttttgcttactaaacaccaagaggaaaagtagcaaagttggtgtgctaggattaactcaggtaagggtgatgtgttttaggattgagaacagcagacttgggaatcactgctaattgttac

SEQ ID NO: 83500 - DNA, 1074 bp, Homo sapiens
ttcattgagctgattaaaaacccagcgtttaagttctggaaccatgaatttgtacactgtgccccagaaatcgaaaagtgagttcaaagtaatttttaattgtctaggaatgagactggagactgaaaaccatctgtctctaggttgggtcagctgaatgagatgcaaggtattgttaggcctactctttaatcagagatttgtaactgtcttcatccttcaggttattccagtcggtcgcacagtgctgcatgggacagaagcaggcccagcaagtaatggaagggacaggtgccagttagacgaaactgcatctctgttgtacgtgtcagtctagaggtctcactgcaccgagttcataaactgactgaagaatcctttcagctcttcctgactttcccagccctttggtttgtgggtatctgccccaactactgttgggatcagcctcctgtcttatgtgggcacgttccaaagtttaaatgcatttttttgactcttggccaaaatttagaagatgctgtgaatatcattttgaacttgtgtaaatacatgaaagagaaaacctttgtctggaacttcttggctttgtgcaagctgtgtccaaggcaagtacataaactggtaccttgtaatgaagaggcagctgatgccatgcacttgtctgagggcatagctccatgtcttctgacattcctggtgtcccaaagaatagcaaaaagccagtttgaatattatgtaacttatttttttaatgtggacaggggaccttgaaaatcactaagttattaaaaatgtggatgtgctagaattggatatgtccaggaacatgggaagggctcactattggaatcccatgagtttccattttgtctctacccaaacgtattccaaagctgactgcatttgtaccatcttatttcttttggggattatacacctcagccgcctgagatgggggtcagctctttatataaagggaaaccagaccaggcctaaagcccacccctaccctcacccccccaatcctctcctgaaacttaaaaacagtgggaatataggaaagggaaccaa

SEQ ID NO: 83501 - DNA, 2728 bp, Homo sapiens
ggatgctgatttacatttctctataggatattttggaaagttatatatttacagtctgtatatgccatgcaactacaactttctctccaaatctttaattggcacagtgcatattttgattttataaactttactttagagctgtgccttgagcttcggcttcctgagggaaatcacatttctcttattgatacaaccacctttggagcatctgtgtgtttgttaaataacctcacaaattcaagcaagtgaatcacaataaatgtttggcctttccatgaaggtgtaagaagggtttagaaatactggtgctagaattggtcctctgcaggagtaagcataaggagttctgttttgctcattttaaggtatccaatgaacctgggaatcgctacaacctccagctcatcaatgcactggtgctctatgtcgggactcaggccattgcgcacatccacaacaagggcagcacaccttcaatgagcaccatcactcactcagcacacatggatatcttccagaatttggctgtggacttggacactgagggtgagtgaagcctgccagttttcagagtagagttctctgtgctttttgctacaatctgatcacaaaaatgtaaaaatgcttcaagccacaatagtgaaggaatgttctgtcagtatatttattcacaggtctagctgattattttatctttaattggacattatctgctcagtgcaggaaatacaaaaaagcataaaggaaagaattatccagaatcgtgcagtatcagttttggtgtatgtgactgaagttttttagtgtgaaaataaacttaaagtccctttaaacatagcctcttgttacattgttttgttaggctgccttatataagcatttttattggtgcgtgtttggcaggcatcttgttaaatgttcatgtataaagattaatgaataggactctcctgttctgcaaaaagctcacagtataactcctgttgcaggttgcagcttttctgcttgagctacatttcatttggtcctctatatttatcttataaaatagagaccccagttaggtgctaactagttgtacagtcctgtccagttttgcatacatatattttagggggacactactctttaactttgctattgattcttgagagatgaattgatgttgcatatatgctgcatgcctatatgtgggatggatttaagacagcttaaattcaagatataacaaaattgaataccatcacgtccaagagctcggcaataaaaggacggcagcctttagagaaacgtgtcactgtgacagactcacaaacacgaataatgtcaagcagaggcaaacaaccaaacccaattaagataatacttattccagtgtagtttagactaatcaaaatgtgggctgggtacccttagggtgtcaagacctttttaggagggctgtgaggtcaaaacttttttttttttttttttttgcgatagagtcttgctctcacacccaggctagaaggcagtggcgcaatatcggctcaccataacttccgcctcaggggttcaagcgattctcctgcctcagcctcccgaggagctgggattacaggcacacgccaccatgcccagctaatttttatgtatttttagtagagatggggtttcaccatgttggccacgctggtcttgaacccctgacctcaagtgatccacttgcctcagcctcccaaagtgctgggattacaggcgtgagccaccgtgcccggcccaaaactgttttcatcataaaacaacatttacatttttgggtctattctgtcatgagtgtacagttgaatttctcagaggttacatgaaatatactgtaacaagttgaacacagaagcagaaatgagaatccagctgtcttttattaagcaagacttagagatctgcaaaatgtagaaagacttagtgatgagtgtcaccagaaaatagttcatgtttcttacattagcacatagtgggtctgtttttaaaaatgaatatttttaaaatctaatttctaatgtggaaaattctgaaataaaacgcacagaaatgagaactctttggggtcccaagaaccactgctttaaaccaaagattaatttgaaagcctctgtcagaaacccaaaccctagccagttagaactgtcttcccatgttggcctttcagactaagtcctaagtcaaggtttcttaatttctaggtcgctatctctttttgaatgcaattgcaaatcagctccggtacccaaatagccacactcactacttcagttgcaccatgctgtacctttttgcagaggccaatacggaagccatccaagaacagatcacaaggtaagcgagcagcttattttttaaatgcttcaaaaggatctcctccctttcatcttttttttttcctctttatgctttcagtgttcagtgaaaatccgtttggttggttttttttttgtttttttgagacggagtgttgctctgtcactcagtctgcagtacagtggcgccatcttggctcactgcaacctccgcctcccaggttcaagcgattctcgtgccttagcctctcaagtagctgggattacaggcgcctgccaccacgcccagctaatttttgtattttagtagagacggggtttcaccatgttggccaggctgatcttgaactcctgacctcaagtgatccacccgcctcagcctcccaaag

SEQ ID NO: 83502 - DNA, 1037 bp, Homo sapiens
tgtatttttattttttgtccagtctcctcttctagcatattcatttcagcctgtaaactcttgatgcctagtttttcatgatacctaaatggaaatatttgataaatcatctgtgataatgttaattaaagcctaaaactttttaagaaatgttactaaagtatacttcattcttttgaggggggtggggggcttaagttacaataggaaaatgttactccattttccttagtgtggaaatatttttcttgttttttaaaaatagggcactttaagagtgctgctggttcttttgcatgatttcccagagttcctttgtgattaccattatgggttctgtgatgtgatcccacctaattgtatccagttaagaaatttgatcctgagtgcctttccaagaaacatgaggctccccgacccattcactcctaatctaaaggtaaggttccaactagttaaaggaaaacttatgtcttaatatttcagtcctttctctgataagtagactgttcagcactttcctacccaacataacacgcacactattagttaagggtactctttaaaggaaataatgttattaagcctgatagaaggtatgatattgttgctattgctgttgctggtgaatattggttcacagcatttttctagttgctagttttcatattaattttgatattaaatttagctctatttacagaaccacagcttaggtgttggggcagtcatttgctgggtgtgccccacatggcaaagaattgcagaacaaacagacctttgtaatctttttctttttttgaggcagagtcttactctgtgacccaggctggagtgcagtggtgcagtctcggcttactgcaacctccccttcgctggttcaagctattctcccgcctcagcctcccaagtagctgggattacaggcactcgccaccacacctggctaattatgtgtttagtggagatggggtttcgccatgtcagccaggttggttttgagctcctcacctcaagtaatctgcctgcttcggcct

SEQ ID NO: 83503 - DNA, 1049 bp, Homo sapiens
ccagtcttttttcttttcttttctttttttttttttgatggagttttgctcttgttgtccaggctggagtgcagtgccacgacctcggctcactgcaacctctgcctcccaggttgaagcaattctcgtgcctcagcctccagagtagctgggattataggtgcccgccacctcgcctggctaattttttgtattcttagttgagacaggatttcaatatgttggccaggctggtctcgaactcctgacttcaagtgatccactggccttggcctcccagagtgctgggattacaggcgtcagccaccgtgcctggcctttaatgccgatcttttgtaaaagtacttaacattagtattctctacttatattagcatgaagaagataagtcagtgtagctgcttgggcgacttgtagtggctgaaaaacagctgagtataattatgactcatgtacatttctttctttcaggggtggcctatgtatgcacagctactgattgatttattcaaatatttagcgcctttccttagaaatgtggaactcaccaaacctatgcaaatcctctacaaggtaattaacttggatttattataaattaaaataactgagatcttaagaaaatacactttaggaatctgaggccttattttgtttttattaagcctttgaggcatgatatacattcagaaaagtgtaaaaatcaagtgtacttgcataactagcacccaaattgtacagtgtttgtatatgttcaactgtagaagatactacagttttacaaagcgtttgtaccagtttatacttgtaaacagcttggaggagttactggttttcccccatcttcatcttgccatacctggtattatctgtttttcattttaaccattttggcagttgtactgtgagatctcattgtggatggaattttgtttgttggtgatttatctttttttttttttttttttttttttttttgagacagagtctcactctgaaacccaggctggagtgcagtggcgcgatctcagcttactgcaacctccacc

SEQ ID NO: 83504 - DNA, 1930 bp, Homo sapiens
tctcccaaccttgtgatccgcctgcctcagcctcccaaagtgctgggattataggcgtgagccacagcgcccggccacgtcagtggttcttaaccctattgggtccctcaagtgacccgcctgcctcgacttcccaaagtgctgggattacaggcatgagccaccatgcctggccacataagtggttcttaaccctattgaggccaacccttcccccaaacattttgttaatgtctcttttctgtcctgaaattaaatttgtaaataatatgtaaacatacccgctctgtcttagaatatagtgccttaaccgaaatacaaaaagagatcataatgtatttcagtatgttaatgcttggtagtatgaatttgccccatatacagaatcactgtgagtgggtggctagacgtgcctcctgctgatagattggcaactcaagtacatgagtgatattagtcattggcttgatttacacagtggagttcctggaaatttgaatattaaaacaatgcaaaaatacttgtaaaaatggactgtgattttggatttgggaaattagagatgtgttcttcaagcccctcactgttcagtgggcaagtcaagtggaatgggatctctgcagcctaacagctttcctggcccctgcctactaaatgccaagataggagtaaatcattcccacatgtcaacttcatgtcagaccagacaaattagattgttatattgtgttaacatggtgaaatgtgaggggccttgctgatttctagagctgaagaagaaccattgggcatttgtggagaatattcaggtgtggtccaaggatgttgaaatgcaaagaaacacacaaaacactgaaggcggagtcagaccaatttatgaccctatcggctgccagcatgtaattttgtattcaaattgtatatatgctttcctttaatgttgggtttaagaatgcaaagtttaaaaagcatgacatcgaagtggtgagtggattatctgaatgatttacaagctctgatttgtgttttacgtaggtccttggtatagtagtgggagttctccttcaggatcatgatgttcgtcagagtgaatttcagcaacttccctaccatcgaatttttatcatgcttctcttggaactcaatgcacctgagcatgtgttggaaaccattaatttccagacacttacagctttctggtgagtattgtgtttgcgattttgtgttaaggtttgctggattaatgtagtaaaattttgggagtagaactcttgagcattttgagcctacattcatgtgctgttcactgtatttaagttggactgtgcttctgactaaggtttttcttctttcagcaatacattccacatcttgaggcctaccaaagctcctggctttgtatatgcctggcttgaactgatttcccatcggatatttattgcaagaatgctggcacatacgccacagcagaaggtgtggctgcagtttatctcctgtagatgaagactataactacctgggcttatttattagcattgcctatagatttctattagtcatttagtagtaattgtacttcttccaaacttagttgggaatgctatttagtgttcactcaagtcaattacttgactgcctctgcctgaaagccattcctcagtgattaggtgttgctgcttcaactcagttgtgggccacctgtgtcagtctctcaagtttttttttattgttttttcctttctttcttttaaaatgttttgcttctttatatacaggaatgatttattttacatatttgtcagttaagggtttttttgggggtaggggtgttgtttttaaagttgaaatccatgtgtgccctcataaatatctgaataaatctctgggtaacagggctctggagcttgttggttttacagactctcacttt

SEQ ID NO: 83505 - DNA, 2288 bp, Homo sapiens
gtcccagctactcgggaggctgaggcagaagaatggcgtgaacccaggagatgaagcttacagtgagccgagattgcaccactgcactccagcctgggcgacagagcgaggctccgtctcaaaaaaaattaaaaaaaaaaaagaaattaggtttacttttcaaaatgaatgttactcagtaaatcataccgagtatatttctcccctaaaagaatccagggaattacaaagcataccctactgaaaagctattactgcatgttttatagtctgatttataatttgaatggaagaaattggaatccattggtctttctgatcattgctatttcgtgggtatggatgtggcacctgtctcagcccttcctgctggcttatttgctctcatttcatctttctcttgaaaaagatagtgtattatacttttctgtgctgttttgtatccttttgaaaattctttccttcttgcgctcctccttgaccatagtactcagtcctaatattcctcactctctgttagttttacagataccagtgtagacaaaaagtccctttgccatgctggcattctgtcccagcagggtacagtattatcgtagtccaaccagttcagttgtctttactgcttatcaggaacagttaagttgtttcaaaaatttcaagataaccttgaagttttttttttcggaacttggtttctgtgtttagtaagtagtgaactgttcttcctctgtagccttaatgcatattttactgttgtctttttttgtttgtttgtttaaagggttgaggggaactagccaaataacattcccactgtgcttcacttctagttcatatgtcatatagtttctaatttttcctttcttttaaataaacttgtgtttcccacattattttaacttaatgtaacattttattacattaaaatacctagatcagatttgtatttccatttggtacttacctgttgtacaaattattgatttttctgggggtagcttgttggagttttaaaatctttgttattggttaattcagtttgaggaaattatcttcaaatccttcagaagtaaattaccttaaattctgtgagaaagtaaaatatgtgcaatttagtcttctccttggagtccacaatgtcttaacatgacttacagttaacgaacagtttgttttatttgcatggttaatttttcacattatttggtggggacctactgttcaaaattgccatgataatctgtctgtcagtttccatcttccctgttctacattaaacttaaaactggaggaattctgtcatggcaccttaatgggaaaataattctgataatacatttattacaatgtaagaattagaaatatgacagtaggaacaaatgagaatatctcttaagcctgaaaattaaaggtatatgaagtttatttgtgtgtgttacctcattgtgtctttattttttgttcctgttgtagatgcaccagcaaggaatactgaagaccgatgatctcataacaaggttctttcgtctgtgtactgaaatgtgtgttgaaatcagttaccgtgctcaggctgagcagcagcacaatcctgctgccaatcccaccatgatccgagccaagtgctatcacaacctggatgcctttgttcgactcattgcactgctcgtgaaacactcaggggaggccaccaacactgtcacaaagattaatctgctgaacaaggtctgaaatcctttcttgccttagtcttggtctacatcagtggggtgttttatttatttatttattattattattttttatattgtttctttgagagagtctcactctgtcacccaggctggagtgcctccgaagtagctgggaatacaggcatgagccacgattcctggagcttttctatttttagtagagtcttaccatgttgcccaagctggtctcaaacttctggcctcgagtgatccacctgccttggcttcccgtagtgctgggattacaggcatgaaccaccatgcctggccacatcagtggtttctttttatttgagatggagtctcgctctgtcgcccagactggagtgcagtggtgcaatctcggcttactgcaaactccgcctcctaggttcacaccgttctcctacctcagcctcgtgagtagctgggactacaggcacttgccaacatgcccggctaatttttcttgtattttttgttttgtttgttttctgttgttttgagacggagtctcactctgtcacccaggctggagtgcagtggcgggatctc

SEQ ID NO: 83506 - DNA, 1045 bp, Homo sapiens
acatagtaggcaaacagtgaatatttgtcgactctgaacatcagtttcatttaaatgaacacgttttttgggcaagaagtagcttaactgagggcagttgtttgtgtgttgtatgctcatgagcaagcggataagagactaagtatagttttgtttcagtgtggaagtggtaaagcgaagtggtaaaccactctggtggttgctgttaaataagcaaactatacatgcgtatgtctgtaaaatcacaactacgaggagactgattttcaccctttatttattgtgctagattgccccagctgatggaagtagtgcgatccaactatgaagcaatgattgatcgtgctcatggaggcccaaactttatgatgcattctgggatctctcaagcctcagagtatgatgaccctccaggcctgagggagaaggcagagtatcttctgagggaatgggtgaatctctaccattcagcagcagctggccgcgacagtaccaaagctttctctgcatttgttggacaggtagagcttttggaaagaaaggtgctttttattcaacataagtagggtgtgatgcctccaatattaaagctcagtattgcgtacatgtggtcagacagttacctccatactcatgcaaacccaaactgtcatcattatatggttaaattacagcctgttttctcatggttgatcactaagcagtaaaggcaacattccctcccaccgttggttctgtatattccatttcagttgtcacagctacaaagtacaatgggtcagataatgaataataaaactaccaaatgtatttttactagcactgatgggactgtgggctaataaatatgtaaaattctcacagtagcccacattaaaaaaaaatgacaaaacaaaaatgcttatttaaatggtagagtgttttattgtattttctaatttaaatatctacctaaacgtagtgacatgttcctttggaaaatacttcccagtattttcattagatttgatgcaagttggactttgacttaaaagggttaggaaca

SEQ ID NO: 83507 - DNA, 5449 bp, Homo sapiens
cccaagtagctgggattacaggcatgtgctaccacgccccactaatttatgtatttttttagtagagaagtggcttcaccatgttggctaggctggtctcaaactcctggcctcaagtgatctacctgccttggcctcccaaagtgctgggattagaggtgtgagccaccgcgtctggcctgctttactgattttaaggcatgttcacaataaactgataaggtgtctaggatatttttgtcttaaaagtgaggaagctgttaagactgtttcaagatcacagcttgttcataagtagagtcagaacttaaaatgcatttgccaaatgcactgcattttctactatcctgtctgtccacatcaactttcaagtctttttccttctattccccccacccccccacccacctccattaatagactgcttccccacaacaaagagaaatgatggatcaggcagctgctcaattagctcaggacaattgtgagttggcttgctgttttattcagaagactgcagtagaaaaagcaggccctgagatggacaagagattagcaactgtaagtgtttagaatttgccttttaagattttcttttttaatttagggaagtgccttataacaagaacctcagtgactttttttgtttgcaggaatttgagctgagaaaacatgctaggcaagaaggacgcagatactgtgatcctgttgttttaacatatcaagctgaacggatgccagagcaaatcaggctgaaagtgagaattggggctctgtctttccccgtcccatctttgttttatttttaatgttgttgttgattgaactccttactggaattaggacagcagggttaaatattgtttatgagaaaacatcttaacttgatagcatttcactgaatggctgcctgtggaggaggtatggaaatagctctaaattcccttgctcctccagagttgttgaagtgttattactctaaggagttcatgtgcctgctagttttcatgtttcccaacttgggcttctcacattaatggttgcttattgttcccagtgagacagtgagaaatctgataatatttaccagcttcaagggagaattgcactggcatcgtcccatgtgaggcattttccaagagaaactctcagttaatttataaatgaggtgactcttagcaggattcagggaaatgagaagccctcttctgaactgcatttgtgtgtgcgtgcatgcttaatcatgctgttatatgttgtaatgactcttgtgtccctgagcttacccacatgcagactttccactttcaaaacagtttattttgattattgagtgaattctgtcaaaataggttttcttctttcaaggttggtggtgtggacccaaagcagttggctgtttacgaagagtttgcacgcaatgttcctggcttcttacctacaaatgacttaagtcagcccacgggatttttagcccagcccatgaaggtaaatgtgttttagattaaattgagtgttttgccaattaatttaaatgtttttgacatttaatatatgtttttgacttgcttcctgggagaataatttacaggggaaaaaacacctatagtttttgagttgtaggtattctttgtgtccaattaagtatgacatacaggggattaaagaaaaattgacatgggtgtgggtgatttaactttaatgttcggcctaattaggggaattctcatggtaacataataactttcggttttttatttttaaattttattatttatttttttgagacagggtctttctctgtcacccaggctggagtgcagtggcgcgatctcagctcattgcaacctccacctcccagactcaagcgatcctcccacctcagcctcctgaggagctaggactacaggcgtgtgccaccatgctcagctaatttttgtattttttgtaaagatggggttttgccatgttgcctagactagactcaaactgctgacctcaagtgatcgcctaccttggcctcccaaagtgctgggattacaggcctgagccattgtgcccagccttcccattttttaaataaaagaattttctaaaattttcaaaggtgtttacagaaaacttggaaatatagggaaaaatattttcccccgaaccggtcgatagtaagttgctgacctgatacccccatcgctcctgaatcctttggtttgtatttcttacaaaacctttttcctttggtttgtatttcttaaaaaacccttttcctgtgtgaccatggtacaaccattaaggtcagaaatgaatactaataaccttactccatctaattcatagacctcactcgagtttcaccatgtatcccaataatgtatagtaaaagacctgttttagaatcacacatttcttcagttgtcatatttttaaagtctccctcagttctagctggtgtaggtaactcagtttttcctcatctttcatgaccataacacttctgaatattataggctaattattttctaaatgacttgatttgtttgtccagtgtattctcatgactaggttcaggtaatgtgtttttaaaaataggaatagctcagaagtaatgctgtattcttactctatcctatcaggctttgacagttggactgagtactgtatttttcatggtttgaaacacttactttcttaggatatagagggcttagtagatggtacaagtggtgctgccctcagtctgtctcattgttactaatgctctcttttatcacttgattatgctgctgtctgccaggttttcctctctcaaatgaaacacctcttcccttatgcctgccttgtactgtgccacttgatggtattaattctgaatagctcaggaagaaggaaaagaagaggccctccatgtttgaatgtaaaaataagaaaaagggagtaaacatactagtagacctctatttgatacatgtgtcaataaaaaaccttaacattcttttgtctcttgttggttgtttccttctgtaaaacagcaagcttgggcaacagatgatgtagctcagatttatgataagtgtattacagaactggagcaacatctacatgccatcccaccaactttggccatgaaccctcaagctcaggctcttcgaagtctcttggaggttgtagttttatctcgaaactctcgggatgccatagctgctcttggattgctccaaaaggttggttcttaagctattacttttagaaaatgctaggtgtgtaaacatttattgacctgcaccaccatctacatatttatgcagttatgcttaagatttcataatataaatcaagttctgtaagtaggtgattttttttttttccaacgtagaatgtagtcatggcagttttgaatggtaaacttggaaatcttcattttttttcttaaagatattctggaaatgtgatttgaagaaactttaaaaggtagccctttagaggggtgtgtgtgtctgtgtgtgtgtgtgtgtgtgtgtgtgtaagagacagggtctctctctgtcaggcttgagtgcagtgatgtgatcatgggcttaagtgaacctcccacatcaccttctcgagtagctggtattacaggtgctcactgccaagccaagctaatttttaatttttttgtagagacaggtcttgctttgttgtccaggtcgttctcaatctcctgggctcaagtggccctccctcctgagcctcccaaagcgctaggattatagacatgagccactgagcccagctgccctttagattttgagggacaagttgatccaataatttggatcagggtaggtagggagccctggattttaactacagcagagccttttatgacaatgaagagcacagaatgaacttaaatcagatagaatttagagtgtgtgtgataggcaactgaaagggatgtttggagagtggaaaggacagggaggctttggaaggtatttggtacttggcattgagatttggtttctggctgtgatagttgggccaagcactgtatttttcatggttttgaacgctttctttctcccataggctgtagagggcttactagatgccacaagtggtgctgatgctgaccttctgctgcgctacagggaatgccacctcttggtcctaaaagctctgcaggatggccgggcatatgggtctccatggtgcaacaaacagatcacaaggtcagtagccatcttcgaaaagtagtgagtattggactgcgactgccttttgacatagatagtactgtttatgtccaggggtttcccttttttctagtaggtaggtcggacacttagacttcctacttctgagaggtgagaattgttaagtagttgttttccatctggtctctaccttctccccatgttggatatagaaaaccagtaccttgttttggggaataaattgtaggtcattgttttaaaaggttacagtgatttctcagaagtggtattcgtgtataagtattttaatgtcttaaatggaatactctgtatcctaggatttgaaaggaaagcttgggctatctgttctatttcattactggctgtttttaaatttggacactgatttggagttgaatctcaaggcattcttagtttggagcaaatttccattgagtaaaatgggcccttttacagtatggttaagcctatatgagtaaagatattgaactttttctaggtgcctaattgaatgtcgagatgaatataaatataatgtggaggctgtggagctgctaattcgcaatcatttggttaatatgcagcagtatgatcttcacctagcgcaggtatggaaggaatttacttgcacggacaaaaggactcagggaagtacgtttgctcttaagtgttttccctctcacattatgttttctgtgttgccagtcaatggagaatggcttaaactacatggctgtggcatttgctatgcagttagtaaaaatcctgctggtggatgaaaggagtgttgctcatgttactgaggcagatctgttccacaccattgaaaccctcatgaggattaatgctcattccagaggcaatgctccagaagggtgaggatgaaatgctttgagatccctgtgcatttagtagtcttctaatatctttaggaatgaatatgcagacttactaacattacttgttataactgctttaccaaccacatatgggtgggtagctttggtaagggctaatattgtcacttgaagtatgaaagcctaattgactgccaagtcttcttggcacagagcagtacatacggtaccagacttagtgtcagagtcctatgtttaagccctggtcatgccacttaaaagctttctgattttaggcaaattgacttatcctccttaaacctattctttatagaaaatggaaataatttctcaaagaactattggaaa

SEQ ID NO: 83508 - DNA, 1078 bp, Homo sapiens
agccacaaattttaaataagccagcagtgtgtctttaagtagttaatgcatattgtaatgaacagtttgtccattaaacttggatttaaaaaaaagacatatctattattgtgtatcacagggtatactgaatacatttccctgtatggagctcagtttctgttacccgaattttccattggttaactttaagtagaaactggtagtttttggttaatcttgatttacaaaatcatgaatgtgattgccagtaggaattggattgtcttatttaaacaaggtgttgactttgtcctccccaaccccccagattcccttgtttcaggcccatccacagttgaagcagtgtgtgcgtcaggcaattgaacgggctgtccaggagctggtccatcctgtggtggatcgatcaattaagattgccatgactacttgtgagcaaatagtcaggaaggattttgccctggattcggaggaatctcgaatgcgaatagcagctcatcacatgatgcgtaacttgacagctggaatggctatgattacatgcagggaacctttgctcatgagcatatctaccaacttaaaaaacagttttgcctcagcccttcgtgtaagttggctatttccttggtataggtacaaaacgtattactgcttgtctgtaataatttttttctttgtctatatatggcactgggcgttaccacttattcttaataatcaccatatttgtttgatgtcttccatcattttagattgtaattctgtgaggcaaagcatcatgtctgtgtgtttttttttttttctgttatattctcaacacgatgtttgacagatagtagatacccaaatatttgttggtttaaataaattaagatttaaaaaggaaatgtgatatctgacaatctcatttctgttaaccaggaaggatgaaagctgtttgagaaggccgatacaaaatgacttaaagtgatgttgcatgtgcacacacttttcaaataattcacttactagttttgagtctcagatatcatggttaataattcaggtatcatgattaataatttgtttactgctttaa

SEQ ID NO: 83509 - DNA, 4280 bp, Homo sapiens
gtttcagtcccaatcacgtatgggttgagttgtgattgactatggaattgagcatacttttcttcatagcatctatctggtgtgaaggaaagtcattctttagcatctagttagttttgcaaggagccatgtgctgtatagtatggttcatagaaaccaagtgttattttatcatagtgtaattctgtgcttcccatgtcgtattgaccggctaggttgaagagctaaaggaaacggtgaaagaagaatttatgccttgggtttcacagtatctggttatgaagagagtcagtattgagccaaactttcatagcctgtattcaaacttccttgacacgctgaagaatcctgaatttaacaagatggttctgaatgagacctacagaaacattaaagtaagagttggttcttatatttcctttaattattgctttgaatttggaaatatttgattatataggtaggatttttgctatttttccatatatattgtcaatattaggtacctctggaaattgctgtagattttgtttcttatatggaactaaattttatgcagaacttaaatttataggcataccctgtgccttttctttgaaagtaaccactattatgaattgtttttgtcatgccatgcatgattttagaactttaccactgttatacataagcagcatagtattggttagcatattctgtatggtgtcgccctctgtacatccttttctttttttttcacttacttttttttctcccctggatattattcatgataatgataatgctctttgctgtagccccctttttttttttttttcaatttttttgagatgtggtctcactctgttgcttaggctggagtgcagtggcacgatctcggctcactgcagcctccacctcccaggttcaagcagttctcttacttcagcctcccgagtagctgggattatagttgtaccgccatgcccagctaatttttatatttttagtagagacggggtttaatcatattggccaggctggtcccgaactcctgaccttaggtgatccaccctcctcggcctcccagagttctgggattacaggcctgagccactgtgcccggccagtcctcttttttaaaaaacagaaaaatatagtcttgtagaaaaccattgtatgtatttgtattgctgctgggcatttgtgttgttaatcacttaaactattataaacaatgctgtcctgaatgttttcgtttgtatcttgtagtattcaagtgcaagatatctttagactctaaatctgtttgtggaatagctgttgtctaggagtctgtgcagtttaaggtcaaattctactgagctgaggcttattcaacaaaattcaagtattttaatttctaaaccatcatttatttcttaggaggaaaaacttctagaaccagcatacagctgtggtcattctttgctcaataacttgggtcattggcttaggaaccagcactatatttaaacctgtggatgggaatattccccattcttggttacgctgtagtgcaaaagaattcctggctctctgttgcacagctgacttgtgccattctgctgttgctgtatagagttaaggaacatggctctatttcgtttttattatctgatagcaagggtggttgggatacataaaagtttccacatactctgtagcaaagtttcaagaccatgttttttaaacagaagtttaaatatagccctaagtcaagaggtaccacagagtagatgggtatatacatgtgtgcatacctgcagccaaaacactctcctatgttagttctgcccccccttagaaaaacagtaaccggagaatcagttaaatggtttgggttttttagaaatttgaaaagaagtatataaacagtattatactatatctcagaaagttatcttggttggctgcagagatttgttaatgacctgggtatactgaagattgcaataggaggctaatttgattatattcctttgtatgcttgctgcctttaaggacttaagcatggctatcatcctcatttaaattaatttagcacttcaaaatagctttgtagttaggtctctgctttaaacctagctaaggttttcagagttgaaaatacttttctaggggaggatagctggcacataactttgtgttctttttgaattttgtgcaatgtgtttgtacctattttgaaaaaataaaatgtaaagacttcttcaaggtaaaaatagcactgttgaatcataaacacagcaaaatgatattgagaatgatatacagagtaattctactttggggcctgttcttagaaatgatgacttgtctttaggataggataatggaattctcaaatacttagttgagttttctttcataagcttattctcatatctttcttaatcttacactatttcaggtgctcctgacctctgataaagctgcagccaatttctcagatcgttctttgctgaagaacttgggacattggctaggaatgatcacattagctaaaaacaaacccatcttacacactgtgagtttcatctaaatgtgtaaaaattgagaatcttcagcacattatgattacaagtattggctgtttggagctatttaatgattattggggttttgtaagattttggcccacgttttgagttgttaacccctttttgtaaggcaaggactagacattatgttgattcctgttttggggataagcttggcaaaatacttttctttggttttgttataccattttggggggtatattccccgcttttgaaagtatttttcttattctaggacttggatgtgaaatcattgctgctagaggcttatgttaaaggacaacaagaattgctctatgtagtgccctttgttgccaaagtcttagaatctagcattcgtagtgtggtgagtagattttaatattttatttatgactaatttctaagcattgctttgttttagcatgaggtcaagagattatattcttagttcttgtgaggtaaagctagttaagtctgttttcctctatggcacttggatttccaatttgagaggctgggtgaaataagaaagattataatggttggctttggtttttggttttttgttttgttttgtttttgaaatgtgatataggtgagaaggctaggggttttgttatggctacagaggtataagtgtttaactatgtttaactgtttttggttattttttaatccttgttttttgttttttatttgtttgactcccccctacccccttatgttgtattgaattgttttaaataatccaaattaaagggcacattttgggccagcttaacataatagcttttctttaggtttttaggccaccaaacccttggacaatggcaattatgaatgtattagctgagctacatcaggagcatgacttaaaggtaatttactgcttccttgtcctctggaacattctttgccttcacattattaaaacttacagtgaaggcagggtatttcgggggaagtactataataactgaaagtagagtatattatgagtaaaactaaagttttcttttaaaaattctaatccaactctggaactgtgcagttaaacttgaagtttgaaatcgaggttctctgcaagaaccttgcattagacatcaatgagctaaaacctggaaacctcctaaaggataaagatcgcctgaagaatttagatgagcaactctctgctccaaagaaagatgtcaagcagccagaagaactccctcccatcacaaccacaagtaagtgtgctaattagtcaaggaaggcttctgttagctaggatactatcttaaatggtacttgtccatgtatatcgcaaactataatttcccacataatgtagtggtgaaactttgtatacgttttggtgagccttctaattatcaagcagaagtaatgactaggccttgtgttaccatcttagattccatcctgacagttcatgcatattattaactaaatgtgatttaatcagttgcctctcataccccagctaggccaggttatctcctttgttgtgtgaagtcccagaaataactgcatactatgatggcctgttaacccctcaaatctgggtatggccagacctgctagatctgccaagggaatgggactgttttatctacatgaagaagatgggagaagggtatgggagtgttgaatgattgggagttgtggttagaataaattgagcttttctttctttctcagtcctcagcagctgag

SEQ ID NO: 83510 - DNA, 1792 bp, Homo sapiens
tccctagcacccactgtagcaagatagccagagagagagagagatcatcactttctgtactttatcagcgtaaagggctatactttcttctgagactctttcctacttgagaaatgtccctctaaaaataaaactgttgcatacataattggtaggtttagttctgctaggtaaggactgttgaaatagcttcaggatccttatcactctaaattgtggggatgggctatgtaaagtgagttttttttttttcgtaataacagctttattgtgataataactcatactaccatggtttttgttttgttttttaaggcctttggtttctcattgctgcctaattagaaaacagatgagtttcctgtatgaattattaagacttttaaagtttgcgtttttaaagaagtttaaaggcatttatatgcaggtatctggggctgcttctttagaagttgttttgctgtagttctctcataaatactaagattttatcgctgaagttcatggaatctacttatgtattagtgccagggtatggggcaaagagtatgtgagctagatgaaccaaaagagcactcagacatgttttttaccctctcagaaaagagggacgtataatccagacttagcaattaaggttaactctttttcctctccctacccttttagtatattgagtatggacagcagtctagagatcctcctgtgaaaatgcaaggctctatcacaacccctggaagtattgcactggctcaggcccaggctcaggcccaggttccagcaaaagctcctcttgctggtcaagttagcactatggtaaccacctcaacaactaccactgttgctaaaacggttacggtcaccaggccaactggagtcagctttaagaaagatgtgccagtaagtagatctatcttttttctcttccaggatttatgattatattgtaataatcagtggtgaacatgtattagaattttatcataacacatgcctactaaaaaagatataaaagactgacatgtcttcctttgtatctcccatccttatatttcccagaggcaaacatattaatagttcactattcttgcctacatttctaatacacagtcataccatgtgtattttttaacactaaatctgtatacattattggatttttttcagggaagcatttcaacttatttgccttatgtactttattttttttttttagccttctattaatactacaaatatagatacgttgcttgtggccacagatcaaactgagagaattgtggagcccccagaaaatatccaggagaaaattgcttttattttcaataatctctcacagtcaaatatgacacaaaaggtgagcatgctgtcatagtttataaatgccttcttttttccttaatggactaaaggatgtatagttggcccttttacatactcactttaaaggtagaggtaataaactcaaagggaatatgtatatttaactagtgggtttggtagacattaaatagtaccagtttttaaggttttgttttgcagcaagttataagctttttgaaataagcttaatgttctcatggtgatagaaagtttcatttgtactagtcattagtcatacctcattttctcccagagactattcagagtatttattacaacctaataactgaggcaaactttgtgaaaagcataaagaatgcatgctacttgcccctcagattacatggtaagacagtatagttgacccttgagcaacatgggcgttagggttgccaatcctgtatgtagc

SEQ ID NO: 83511 - DNA, 1005 bp, Homo sapiens
tgtgtaactaccaccacaatcaagatacagaatattttggaactcctggcctcaagtgatcttcctgcctcccacagtgatgggattataggcataaactaccatgcctggctgatgcagaatattttcattatctcccaagaggtttccttgttcccctttgtagttagtccccttccctgacttccaatctctgataatctctaaagtttttctagaatgccatttacacagagtcatacaaatatgtagttttttgagacttacgttactacgtttcagtagtctgtttttttttttacagctgtgtagtattctactatatgagttgactacaaattatttttccattcgtatgttggtgaaaatttgaattgtttccagagaagtggctcgttttaatctatttttaagtaaaatatagcctttaaaaatcagaggtagtgtattttctgatgtaaatcctgtgaaaatcataagtattttctccttctatttttgttttcttcactttgacattttcttcaaataagttattcataggtaagatggaaaaaaatgacctagattagcatttggacaaaaacattttgttagtgatgcttctgttctgacatgaaatgatggtagaataattttgttggcagattgaaggactatccccagtattgtcagcatttggcttctatcagtcactttatgcaatttccacatcatttacaggaggtaagtgccctctgtaactaaaacccaaatagctatgtagtatttggagggtttaatattttggcttttttttgtagacttgatagtaatggcattaagatttcttaatgattggcatgatataggtacacatatcttttgttgaggttgctcattttgtggccttacaagagaacatgaaaaaataatcattcttggattatcttttctaagtagcaggcttacctcaaaaactttttactcattcttttaacctgtaatgcagttgaagaataaaca

SEQ ID NO: 83512 - DNA, 4306 bp, Homo sapiens
agtcaaaacatagtcataattatgtttcatgcaaaaaattcttttaaaaaaactgtataaaattacattctggttatgtgtatataggtatatgtgaaacaagtgaatttcatgttttgacatgggtcccatccccatgatgggattgttaggatatctggttatgtatatgcaaatattctaaaatccaaaattgaaaacttttctggttccaagtattttcaataagggatactcaacctgtactttgtcaaaggcaaactctttaaacctattctgtatgtgacacagtaagaaaagtgactgacacacttgacttgataactgggatttaagtatcatcgtgattgagtgggtgtaatagtttgctttttaagattatgaagagctgttgttaaagattgctttacatgtgtctgcctttcctcgaagtatgtttaatacatttttataatgtttttctttagattgaccctcttgctggaatgacatctcttagtataggtggttcagctgcccctcacacccagagtatgcagggttttcctccaaatttgggttctgcattcagtacccctcagtcaccagcaaaagcatttccacccctttcaacccccaatcagaccactgcattcagtggtattggaggactttcatcacagcttccaggtaagggggaggcaaatgagagcatggattattcataagtttgccttagttatgccttagtgtttggtaaggggtttggagtcactgtgataaggaaagctgcttaaatgaaattgtgaaagctacttcagtatccaaagttgggaaaagaaaaacagattatattcaattcagtctaattggaggaaagaattaggatatttgtagttgtaaagttagttgaattatttagtaaggattttttattaacaaatgatagtataagtggtaacatgtatgtgcatcacattctaaagggcttagatcaaaaactcacagctttatgaattcaggttggtataataaaggtagaaactattgtacctatcaggttcaggcatatgttctgcctgccttattgcatttcaccaaccttgaaaatgataggacatcccaaaaacattttaaggttttttttcgtttgtttgttttttgggtagtgggggacagggtttcgctcttgttgcccaggctggagtgcagtggtacgatcttggctcactgcaacctccgcctcccaggttcaagcgattctcctgcctcagcctcccgagtagctgggattacaggtgcccgccaccatgccatgctaattttttgtatttttagtagagacagggtttcaccatattggccaggctgatctcgaattcccgacctcaggtgatccacccaccttggccccccaaagtgctgggattacaggcatgagccactgcgcttggccacattttcagtttttttcccagatattgttccatgtaactttacattgaaataaaagctatattttttttgttgttgttgttgtggttgtttgtacctacatcttcttagccccttgtaccttttatgttgacactgtaagtttgggcactaaaacctaaggacttccatgttgtcattgactctaatctagttagcgttgctactgtatgcttctagctttgattaattcatttaaataaacgtcactgaacttattaaggccttcctagcaaagctctaattattgtaagattccttttgtcggagttgagaggaataaagaagttttgagactcatggtaactttagaagatagtatcatgaaattatttgatttgaatcattgagaaaagccagccagctccttattttaactaccttgggtataggagtatgtgctttgagaatgtatacattaattttttgcacattatcaagaatataaataattccagatgctaaagaaatttggggattatccgttactgcctagtttataggctctgtaaaattgaatagatgtaataagggaattaacaaagactctgacttttaaagtaagagttactatgactttattttaaaagtctgtcttattaatatatctgagatgtgaataaaatcaagaatatgaataatgataggatttgtggctgccttcgttctctctagtaggtggtcttggcacaggcagcctgactggtataggaactggtgctcttggactccctgcagtgaataacgacccttttgtacagaggaaactgggcacctctggactgaatcagcctacattccagcagagtaagatgaaaccttgtaagtggtagtgttgtctgtgattgtgaagtgtgactgataaaaatgtttagttgtatgtctcatttgtgttagtagggccatgtgttgatgtgcctcctagaccaatgggaataaattcacaaatttgaattattaaaagttagaggtatcactccttcccagaacaaagtcgtggttaataagaggctgcatcctgagggtgtttatcctaaaagtaagaagtaggtatgataaagagaaattaatatgtggtagatatacgaatgtaactcttgaacttaacctaaacatgtgttgagttttttttaaagcaagtcaggagtgagaaggacaatttcagatttctgtttccaatttttgtttcacctccttagtaattttttatgctaactaaactcatagaagtcatctttataaatccataggtataattgactgaagtccttgtcattgggactgcatagtcatgacacgaggttgaaagtattccagctgacttgataacgttagtgtgaaaggcttgtctgaatgttatgttttgtagcatgctttgtgtttacatcagtctttcatgcacatgcatgataattcttatatgttaaatgtgatttttattataaagtgataaagatttgttaacctaatgaggttgtattaagggtaagtgcgttatgagtttgaaccaagttaacttttgtgttaataagtcctgatgaagataatactaatgtagaattatggaaggcactttgttaaggatcttttacgtctaccctagcacacattaatactgaaacttgaccgcttaataccttttccagtttttttatatttcccttgaagttagagctataatagtctctggctggctgtgttttatggggaagtggaggaagggcttaaatgcccactgattccttttttgtttccaacagcggacttgtctcaggtgtggccagaggcaaaccagcactttagtaaagagatagatgatgaagcaaacagctatttccagcgaatatataatcatccaccacatccaaccatgtctgttgatgaggtgagtgtctaggatgatctacttatttattgtttaggccagtcttaaataaatgtccttttcaatgtttttagaaatccagctcaaagtgccctgatatagcggtttgtgttttgaaaccttaatatttgtctcaagctcttttggtaaatgttctacttaatagtcttttgttaagcatatttgagaaaggctcttagtaattgtttcctttatgtgtgcgttgtttttgtcttgcttttccaggtattagaaatgctgcagagatttaaagactctactataaagagggaacgagaagtatttaactgtatgctaaggaacttgtttgaagaatatcgtttttttccccagtatcctgataaagagttacatataacagcctgcctatttggtggtataattgagaaaggactggtcacttacatggcactaggtctggctctacgatatgttcttgaagccttacgcaagccttttggatccaaaatgtattatttcgggattgctgcactagatagatttaaaaacaggtaagtggataggtttcctgtgaaggatctcttccctgaccccgcagacagggtcttaactctcatccaggctggagtgcagtggcgcaatctcggctcactgcagccttgaccttgcgggctcaagtgattctcccacttcagcctcctgagtagctgggaccacaggtgcataccaccattcccagccttttgtaatttttgtacagacagggtttcaccatggtctcaaactcccaccttggcctctgaaagtgctgggattattggtgtgagccactgtgcctggcctgaagcttttttttttttttttttgagatggagtcttgctctgtcccccaggctagagtgcagtggtgcaatctgggcccactgcaccttccgcctcctgagttcaagcgattctcctgcctca

SEQ ID NO: 83513 - DNA, 1091 bp, Homo sapiens
ttagtagagacagggtttcaccatgttggccaggctggtcttgaactcctgactttaggtgatccacccaccttggcctcccaaagtgctgggattacagtcgtgagccaccacgtacagcctagactctatattattaatcactaggtgcattaatgtactggtgatatagttgtgcttaagcctgtgtttagattttgaaaaatgggtagggataattattcatgctttgagtcttgttctgctctaggtttagttattttaaagagcacggtaaagtttgtttggaaggtagtgtcatgtattcacctttaaaatgtgatcattattttagaaaataatgactaatgttacccctgaattgtgcttagctgtttaaattgtgaccaaggaagtattagcagtgtgttttatttgaacttgtttgtggaaagcgaaaaacagaatatgggacagagatagttacttaattgctccatttgcattatctaatgtgctttgtcctttaggccttgtcaatgctgctaaatggtactccatttgcctttgttattgaccttgctgcacttgcttcacgtcgtgaatacctcaaacttgataagtggctcacagataaaattcgagagcatggggtaagcaggatttgttcatttatttttgctcttaaattttggtggctaaaatggctatcaagtacaacttttaaaatttgtgcagcagtaataaactaaagaaaaatttgaaagaaacaacttttttaaatggcaatgaagatgttacttattttggattttagttatagtgcttagtagttatctttaatccaaaaacatttaagatcaattttaaatacactgagagacttttctattcttcaggagccttttatccaggcgtgtatgacttttttaaagagacggtgtccttctattttgggcggacttgccccagaaaaagaccagcccaaaagtgctcaacttcctccagaaactttggcgacaatgttggcctgtctgcaagcttgtgcagggtaagaagtacatacatgaatatgactttttttgaattggattatatgaataattgtagac

SEQ ID NO: 83514 - DNA, 1023 bp, Homo sapiens
caacatcagaaatagttaccttaaattgttttgtttttatttatataccagtaatttgcatttaaagtaattatataaacttgatgtaacctcatgttcacataatctagttcacatttgtgtttctgaaaatgatagtcagacttaaaataggacaaataagtttgttgaatgactatatgacccaagtttaggaacaggctttatttggaatatgtggaggtaacttggctttcccataaagaacgtcacggtaattgcatagtttgaggcctgaacttaatgtcagcacaggtatacctgatttttatacaagttctagcaaaattaactgggcatttgtaataatatctatcacagtgtttagcagtattgctatttaatctttcttcccctttttagggacagtctccctcaattcgccaacttatcatgcatgcaatggcagaatggtacatgagaggggagcagtatgatcaggccaaattgtctcgaatacttgatgtggcccaggacttgaaggtgagttcagagggacagactgacaccagtttatttactaatgagaaaaaaaggccgggcgcggtggctcatgcctgtaatcccagcactttgggaggctgaggtgggcggatccacaaggtcaggaattcgagaccagcctgaccaaaacatggtgaaacaccatctctactaaaaatagaaaaattagccgggcgtggagtgcgtgcctgtaatcccagctactcaggaggctgaggcaggagaatcgcttgaacctgggaggcggaggttgtggtgagccaagattgtgccactgcactccagcctgggtgacagagtgagactccatctcaaaaaaaaaagaaaaaaggaaaaaaagtaaatgcttatgtaacaaagatgctctaggaataattcacatgtgactagctcctagaatgagatgagatttagaggtttcttaaaaaggataggaaggagagtggctttaggtagataaaagtgtttttatttttgatt

SEQ ID NO: 83515 - DNA, 1187 bp, Homo sapiens
atttacatttaagttccccaattggctcaaaaatgtcttttaaaaatttctatgattgagaatccagacgcagtccatagtttcttttattctgtaaatctgtctttgttctgtcttttaaatttattttttgccattgatttgatagagaaatacagcatttgttctctagtctaccccatgttattttcttacctgttttctcatggtgtttacttcattctctatccccatggttttcatgggctgaggatagagttagatcttcaggctcagttaaagtcaaccagtttcaacctcttggggcaaaaataattcttaaagagagtgctgtggacttcaaacttctaatattaaaacatgacaccaacttggttttgtgcttacaagctggtatcacttattttgaaaattaatctgtatacttggattttcattgataaagcatgtttcttcctttctcgttaggaagagcttggatttgattgaatctctgctgaggcttgcagaggttgggcagtatgagcaagtcaaacagctcttcagcttccctatcaaacactgtccagacatgctggtattggccttactacaaattaacacctcttggcataccttgcgccatgaacttatctccactctgatgccaattttccttggaaaccatcctaactcagctattattttgcactatgcatggcatgggcaggtaagatgtgaccgtgtgcttaccattttttcatctgaataattgatcttctttggagtgttgaggaagctcaaccagagaaatttttttttacatctctgaattattatgactttaaaagtcatactgtcataaaacttgttttatcttttagaatcatgtgagcaataaaatacaagatcccaaaagcaaggaggcaaaataatatttaataattttattttctttccttttttttttttttttgagatggtgtcttgctctgtcgcccaggctggagtgcaatggtgcagtctttctcactgcaacctccatctcctgggttcaagtgattctcctgcctcagcctcctgtggagctgggattacaggcgtgcatcaccatgcacagctaatttttgtattcttaatagaagtgggatttcaccatgttggccaggatagtctcaaactcctgacctcaaatgatccacccacct

SEQ ID NO: 83516 - DNA, 1953 bp, Homo sapiens
tgtatttttagtagagacagggtttcatcatgttggtcaggctggtctcaaactcctgacctcaggcaatgcgccctccttccaaagtgctgtgattacaggcataagccactgcacctggctctagaatggaacttttagatattaaaaggtagtgtgataagccggttgtggaggctcactcctgtaatcccagcattttgggaggccgaggcaggtggatcacatgaggccaggagtttgataccatcctggccagcatggcgaaaacctgtctctactaaaattttaaaaaattacctgggcatgttggtgtacttctgtaatcccagatacttgggaggctgaggcacgagaatctcttgaaccaaagaggcagaggtttcagtgagctgagatcatgccactgcactgcagcctgagcaacggagtgagactctgtcttaaaaaaaaaaaaagaaaaaaaaagaatgggtttcttaaaattcacattaaaaattttgtaagtagaacatctaaattgaatttcagatttaatttggccttttggataatgtatcaaaatatacacacattcattacattttaaactgctttggtcttttttagaatccaagtttgaatttcaaggaagtaacttatgaactggaccatcctggatttcaaattcgtgacagtaaaggacttcataatgtggtttatggcattcagaggggtttgggtatggaagtgttcccagtagacctcatatatagaccttggaaacatgctgaaggccaggtgagtaagtggtatttagctatagatgggggaataaaacatgacttattctttatgtagtgccatctacccattgatcgaaatattcttgtaaagtagaatttgttatacatagcacagaaaagcaaggactgtccataagtattgaaggaatattatcatagttttagtattaggcagactcctttaaggtgtaactgtcaaggtgttttcccaatagtttaatgatgttcatttccaaggcaacgttaagtttccctaattggctcagaaatgtcttttaacagtcaaggtgttttcccaatagtttaatgatgttcatttccaaggcaacgttaagtttccctaattggctcagaaatgtcttttaacagttgttatgattgataatccagacagggtttcattatgcacctttaatgtgtctgaattatgtgtggttttcaaagggcaaataattaagattttaaacgggaaattgccatgctaataaccttaagattgacaatagcctagtgaaaacatttcagatttttatagcattcacaatcatttatggtggtaagcattttctttcattgcagctctccttcattcaacattcccttataaatccagagatcttctgttttgctgactatccctgtcatactgttgccactgatattctgaaagcaccaccagaggatgacaatcgagaaattgccacatggtaaacactttgattcatctttcatttaaaagattacttcttattttgtgaaatataaagttaatagtaagccaagtacatagttaacaggtttaaatgaagcagtagttttagtgaccttacttatcttaagtatttatagagggggttggtagataaattctttttcagtctctatcgttagttatatcttgtaaggtctgtctttaggtgttcttttaaaagcatcaaatctgaaagtatcaaatgttggaaagatttgtacttcctcctttctcccttagtattgagatttcttctctgtagagcttatgcctttttttttttttatttgtaagttgctcaaggtggccaacctgtcaaatctaatagttttcttttcttttcttatttatatttttgggatggagtctcgctctgttgcccaggctggagtgcagtggcacaatctcaggagtgca

SEQ ID NO: 83517 - DNA, 1209 bp, Homo sapiens
aagtggagcccaagcggaaatacttgctcacctcctgctgtgtggatgatttctaacaggccacagactgataacagtccatggcagggggtttgggagcccactgcattgtatcattcttatgcctttgcatcctcatagcttatctcccatctaacaagtgagaacatacaatatttggttttccattcccgagttacttagaataatgacttttgccattttcttactgaagtagatggtttttacattcctagctgtataaatgtaacaagaaataacacttactgctctgcctgttttatttagtaaaactaaggctttcaaacaaggttcatttaatgccagaatttctcaatctcggtgttgaggctggtagcatttttctgaagttatatttctgtttcagtattgaagaatgtcgcaatataatcgtgcagtttggtgttcgggaggtcacagctgcccaggttgcaagggttttgggaatgatggctcgaactcattcaggattaacagatggcattccattacaggtgtgttgaattcagctattttaccaagtgagttaatgtcctgtcctctttatttttttttaattaaattacagtatgattgattgttctatcgaccagaagtgaacacatggagtagttgggtttgtttaattcaagttttacttctacagagtatttctgctccgggcagtgggatctggagtgatgggaaagataaaagtgatggagcacaggcacacacatggaatgtagaagtcttgattgacgttcttaaagaactggtgagtatatgtgatgatgatttttgatttgtggtatttgaatgatatagtccaaagaaagcaaatttttaagaattttccaccttcgttaactcaaaaagtaataaagtgtccaagttaattgtgtactgcaggcagtacgtaaccaaatttaaattttttcattagggttgttaccttgtaatttggggtgctacttctaagttactcttgtttatggtggataagaacagtgaaaatcataattatcttgccacttctacttcggttgcaaactgaataaaaaataaagtacctctactaaaatattgaagggcttaaataagacataaaggaattgaactctatttatttttccttttgctgtgttgcccatattggactttaactcctgggctctagttagtgat

SEQ ID NO: 83518 - DNA, 1038 bp, Homo sapiens
ttccagctcagatcttagaggtttcggtgagttactttttccaaaaatatcacgaagtgagactttaaaatacgtgggtttttaatcatgaggctctgtgatttagacttagagagtaagataatctgaaattaatttctctttatctgtggtaaaaaacatgtaatataaatgttaccctcataaccactttaagtgtacagttccatagggataattgtattcaggttgtgtaacatctctctggaactttattttgccaaacagaactatgcccatcaacaactctctattttcccctccccactgccagtccctggccattggtttctttatacctgtcagctagagaaagcattagagagatgggtgaactggtgaatgagaagggtgattatctgcattttgatggtatatgactttttaacccattgtggtgcaaaagtaacttgcggtttttggtttacctgacttctagctgcccagtttatcaaacagaagcttccagatcttctgcgttcttacattgacgcagacgtcagtggaaatcaagaaggtggcttccaagatatagcaatagaggtcctacacctcctcctctcccatctcctctttgggcagaagggagcctttggagttggacaagaacagatagacgcttttcttaagacgctgcgcagaggtaagggagtctttgtagcctacagtgggtggttttcttggatgaccacagacacatcacaaaagcattcccccctcccctcccctcaccctcccctcctccctgccctcccctcccctcctccctgccctcccctcccctccctcccctgccctccctccccctccccctgccctcccctccccctccctccccctcccctccccttcccctctccctctcctccccttcccctcccctccccctcccccacccccacacctctcccccctccccctcccctcgcctcccctcccctccgcctctttctctttttaaaaaagagacaacatcagctgggcacagtggctcaggcc

SEQ ID NO: 83519 - DNA, 1028 bp, Homo sapiens
tcaagcggtcctcctgcctcagcctcctgggtagctgggattacaggcgtgcaccaccatgcctggctaatttttgtattttcagtagagacgggtttcaccatgttggccgggctggtctcgaactcctgcccttgtgatctgcctgcctcggcctcgcaaagtgctggggttacaggtgtgagccgtcacacccagccatgtattttctttttatacttgccctgcctaattgagaaacctggcatttcttatcaacagtggttgagctaccttactatctttttagagtcattagtaacattttaggtactaacacagagacgatggtagtttaaccctattctcttctaattattaatttgcaactagttgtgatcaattagttgtaaacaccactgcgcctggaccagcctcctttttccttttaatttaaaaatctggatttgtgtgtgtgtgtttttttaaacaggtgccatgtttcagaacagagtaagacccctggtaaagaagaactgaagatattatacagataccagatatagcctaattacaaagaaagcattaacctgcctctgaggtgactaaaggggaataatggtgattttgcgccgggctcggccgcctgcttccgccccaaccagcaatgaatcttgactcgctctcgctggccttgtctcaaatcagctacctggtggacaatttaaccaagaaaaattaccgagccagccagcaggaaatacagcatgtaagtaaactagccagaaaacaagtgccattaaaggaatgagtagacagtggaaagaaaaccacacatttatgtgggcatgttgcatgaaaggtaactaacttttgccccttaattcaagtgatttctgtcatcatcatctgtaaaagagctcttagcccaatcttttttttttttttttttttgagacagagtcttactctgtcgtccaggctggagtgcagtggcatgatctcggctcactgcatcctctgcctcctggtttcaagcagttctcctg

SEQ ID NO: 83520 - DNA, 1733 bp, Homo sapiens
gttgtccaagcttcacatttgcggaaactacaactcccagcgtgtcccgcggccgcccgagcgggcgtcatgtgatgcatgctcacgtgtctccgcagccggctcgggaaagaatcccccaaggtaggtggccggagacaggctctggagggtggaagtgttagatccccgaggtctgtggagcccctcagtccccgccaccgcggaaaagctcagaccctttccctgcaggggtccagatcctggcgtcctcgccccacgcccgtccctctgttgcgccagctctgccgcgcctttacccagccagagggtctccacccagtcctaggccgggatcgggtcccggagctcctccccaggttaccccacagtagcccacccttctcgctccaggcctgggaatcgccccgccccggcctcctggcccgggtgcgccctggctcacctcacaaagcctcacctcacaaagcagcccaccctttctatctcagggctccaaccccaggctggactgggagcacactccagttgggatctgaggggcctacatcgctggcctgagcatgtgggcatcaggcttctattctggctctgccagctacccactgtgaccttagtctaacctctccctcctgggcctgttttcctatctgtcctgaagctccatttcatgagtaagcgtgagagccgctcagtttcctccagctctgctgaagccagcacagaagtagcccaaactcttccctctgctgacagcaaattttaggcaaagtcttgagaaagaagaaattgggtccagaaagggaagtgaggagaatcagatcccagacctttggggagaaggagcaaccgcctctggcacagcccatcagggagaaagagcaggtaaggtgcaacaatgagctgagtaatttgccagtgagcagtgggggtgccgagaggtcttaaccaaggcagagaatctgcaagaggtgggacccccagcttctgagttccacgaggaccccagcctgcactctcatgtgggtggcaggagaggctggaggatggtgcaggactcgggcaggggtgcccaagggaaacattttggttggagagtcaggaagccgcaccaagccttgtgaccttggacgaatcactctgtagacctctgtctctgtgacgtgagcagcggggaggagatggtcacagctctggcagtggtcactttgcagggttctttctctagctacactggaagcctgggagtcccaagactctgccttcgctgctcactgctttgattttgctgagttgctggttgggtgacaggatgtgtaagaggatgtgtaagccctgtgacatctgacagatctttctgggtttcgagccagcagaggaatgtttcctctggtgccatgtcccttggttccatgcttgataacagatggctgagagcacatgaactttcaccctttccctctcatgagtggatggtccccagctttgtttgtccatcatcaggaggagcaatgggaagtagtccaaggggtcttgttagtcattttaaacccccagtgggctgaaggcatcagagagggtggcccaatggttagggcagtcattatggctgaatatgctcagttccctttttttccctctgggctataaagactaaaccaggctgggggctgtggctcacgcctgtaatcccagcactttgggaggccgaggcagcaggattgcttgagccc

SEQ ID NO: 83521 - DNA, 1031 bp, Homo sapiens
tcagggatcgtcagacctttggtttaaggaagtttgatggggttaccgtggactccattgttcaaatgaaaagttcagaatagagagtataatggaatttggaatctattctatctgcttttgaatatggcccagctattatattaataccaagacagataggacagagctggccctatgtgcagtttttcttactctgaagccagctacatgaagaatttttatgttttgttttggaaaagcaggtagattattttcttggttcatctttgtttcgcagaggtaaaattagaggcttcagcctcctgctggcagaacaagctctcaatttctcgctgtcgaaattcaatctgatttctatctttttcactaaaaagctgtcaacagcaaataagcattccccatcaaagagtcacattcatttctgaggtatacaaattcctctcatgggagagaattcaagtaatttaaattgtttctgacttttaatttctttcttaggaaatgggaaatgatattagcatagactctaactacaggccaaaatggaagaagaaaaggcatgcatggatactccctagtgtgacatctccaggacctttaagcctcagagtgcagcatgtttacaatgcataaaacaggatttgtatctgcattctcatttgcagctagtgatctaatcagagctatcactgcatgctcttaaaatgcatcaacatagactcattttttagtggcagacttgctataggagtgtgtactgccagcataacagaggaaatgcttttgaaattaaatgtatttttctttcttagaattcttagagtttagtttgggaaatggccttctctttggaaaaagatgaaattctaggtaacatactctgccatataaagccattttacacagtggctctttctttcctgttttcttatttttgctttatttattttttaaaaaatttatttaaggtaagggtttaataaagtacattggtttatagctgtgcctttatgatgagcaaatgtatt

SEQ ID NO: 83522 - DNA, 1242 bp, Homo sapiens
cctatgtaaataaatcaccaccctctcaagtctctgtataaaaacgattgtgtttggccacaaactggaaaccctcttgggcagtccgccttctcagcatgaggaagtcttttctctctctgttctttttctattaaactttctgctcctaaacccattcctcgtgtgtgtctgtgtcctaaattctttttcaactgtggcaaagaatcagggtatatcccagacaacagagctgtttcaatatgacatatgcacaagaacttggtaaatccaaactgtcttcatctcattccgttttgagtgatgtttcattacgctttatagattaggattctgaaatgttaaggtctctagaattctccctgggaaatggtgtttagtgaggccttaaaggggaagaagaagctgtgcacatgaagagggaccgagagaaagaaagaattcaaggaaggtggactagcatgcgcgaaggccctgaggtaggaaagggcagctgctttattcctttttattctacttatttatttatctattattatgatgttatttatgtattttaaaaattctatttatgctgtattcaaataggtcaaaggagggacagagagagaggaggaggttggcttgagatgaagctagaagaatgggcaaacttcacttctctttgttcatttgtaccccaagttgtattcatccctttctgccctgctgtggtctctgcaaacttgacccttgcagactgcaacgcccagactcctttgctggctggtggattgttggatttggctgagaagatgcaatggcaatacactgaagtttggagggaaagttgggttgaagtgtgtctcttctgactccctccttgccttggtgaccttttaaaatttttattttaattaaaaatttaaaaaataatttctgttttagattcagggggtatagggtaagtttgttacctgggaatattgtgtgatgctgaggtttggggtatgattgatcctgtcacccaggtactgagcatcgtacccaatagtttttcaacccttgtccttccccgcttttctacctctagtagtccacaacgtgtattgttgccatctttatggccataagtacccattgtttagctcccacttataagtgagaacatgtgatacttggttttctgttcctgcaataatttgcttaggataatggcctctagctgcatccatgttactgcaaaggacatgatttcatgct

SEQ ID NO: 83523 - DNA, 1035 bp, Homo sapiens
aacagaacatccacctcataggatgtagaggcctgaaaatcaaacacacagagggcttgacacatattaggagcccagaaattaggagctatcatctctgagtttagtttctattttaatatgtgcaggttccctactgcctttttttttttttttaaataccttatgcctgaattgcttagggatttcttgtttgtttgttttctgctaacttataaaaaagaggccaaatctgtgcctttaataatagatgcttcacctttacaaagctctctggagaatgagatttgagacagaattccttttttttttttttgttttcatcttgctgtgcttccaactgcttgcaacattctctctgctgcagaaccccacactcacaatatttttttacacttatgctgataaaaggattccaggttttatggagaataaaacagtaactacagctggtgggagacagtaatctagttagtcacaccaagattggaattcaagtgattggaaaactgaacatggaactcagtgtgtgagctgacaacctcaagggcacaattatgaagaccttgtctgattccctctgattgctggatttctgagaggaaattggcaatgtaggaagtagtgtatggagcatctacaatgtacagcacttctcacatacttcattttatttaattctccatctaattctacctggtagttatatgtctccccattttacatgtacaaatttaaggctgagagaaatgaaataatttgcttaacactagttgtgttagtggcagtaaatctgtacaggtctacagcaactgccattcttgcctcctcagaagaaagaattccactgaaggtataataaggcagagtgagagactgaggcaagttttagagcaggagtgaaagttaattaaaaagctttagagtaggaacgaaagtgatgcaggatttttcttcttggtcactttgcaagctggggactcctggccagcaatgccccacctgggccttgctcggccatgctgtgtgcctcag

SEQ ID NO: 83524 - DNA, 1047 bp, Homo sapiens
ataacttgaactcaggagatggaggttgcaatgagccaagatcacaccattgcactccagcttgggtgacagagtgagacactgtctcaaaaaaaatgtttattatctttattctcatcttatacagtaggtcattgagacctatacaacaaaatgatcttttttttccctactagaatttgtccatggaggaaatatagtgagaactggtaacattctgtgacatttatatgtctaaacaagaaagggataatcatttttgtccatgagagatcaaacctgggactttgacctcattatcactgagctactagctctttggaaatataaggcagtgaatggtattagagaatcaatgcgcatcccaaatgtctaatgtgttactagactgagaaggcccaggggcaaatgtgcctcattctgtatctacaatatgagttatatgtcattaggagcccttagagaggatttataaagaaacacacactatgtagttaaaagggaaccctgttttttaatacattgttgactgtttttcacattgagggaattgatgcttagtccagagaagctatagatgtgtttcgggcataacagaatgggatctgtggttcttctggaagggcgataaatcacaggcaccattagcctagctctccttgatcaaaaggtgtgtcatggtgagcttagaaaatgaaccaccattacctagtgtgattacgaatctggggtttaacaggctttttactgaatcatctacagctttaagagatgtctttttttttctgaggtttgtgctataaaaaatgtagaatcacataaaatatcaaatattagctaatttttcttcactttctattataattaacctatcaaaaggcagcatacttcttgtgaacagtccttcatttaagatacacttgaagtgtatcttaaatttacttcttaaatctaaatcttaaatttacttcaagaaatatttgttgtgtactttgtgtctgtcaagtacttaagttaaaatggtaaataagacacatgtggcttatg

SEQ ID NO: 83525 - DNA, 1007 bp, Homo sapiens
gaaataagcacaaaataaatgagacaattcttacccatggtatatactaagaagaaaagaaagagcaatgcagtagtaggttaaaggggtagggtgaaggtgctattaattgggttgtcagtgaaggcctttctgaggatgtcatgagtgagatgaatgacactgagacctgaatagggagaggaagccattggggatgacattggggaagagcatttgaagcagagggagcaacaagtagaagggctcttgatcaggcatgagcttggtgctggagaaacataaagaaaattagcatggctggagtttagtgagtaagaatggtagcaggtgaaggtagagaagtgggttgtgaggctgtttttgctttagtttctctaaagttgaaccagaagattaagtattcttttagaaaaacacattagacacattactgcacgtggatgtgtttcatttcaaccctgtgtggggactaaaaaaagaaggaaataagccgagcctcccagggtgcttagcatctgtactacatgcaatttagcacttggatatatgtttccatgtgctacttgcaaattgtgtaatctgttttagccttgtcactctgaggggaaagggccatgttatattggttcaattagtatgatatggcttctcaagggatagttatggcttgggtgaggcagggggtagaagaggtttgatgcaaaatcagcatgtttcctggcaattacattaaccagttagcacttaaaaggagcatcattggaacatctttctggagggcaatcttgaaatacgtatcaaccaatccaagtttttttttaatgcttttattttgaaaagtacatgaaagaaatgatcagggcaaagatgcttcaacagggatgttcattgaactgctttttttgtaatagcaaaaaagttgtcaacaagttaacgttggaaaacagagttactacaaaatattatttagtactaaatttgtgaggtagatttatgctttttga

SEQ ID NO: 83526 - DNA, 2074 bp, Homo sapiens
acaaggcaagctgcttgttgagcaggagttgagttaaagggtaaaacagtttatgaggtaatgccaagaacacacttggggcacatccagaagaaagtggttctggcattacacttgacacataatagaaaacaaatggtgagtagttgttatgggttgaactgtgtcccctacaaaatccgtatgttgaagtcccaacccatagtatctcagaatgtaaccatagttggaaatatcggatgccgagcgcagatcgcgtgcagctcgctagcggtgttggctgagaggtctagaagggctagacttgctagaggatgactttggctagagatttactacctccgtccttggaagaggaaaagaaaaaacataaaaagaaacggctagtgcaaagtccacattcttactatatgcatgtaaaatgtccaggttgctacaagattaccacggttttcagccatgctcagagagtggttctttgtgtaggttgtttaacagtgttgtgccagcctacaggaggaaaggccagcctcacagaagggtattcatttagaggaaagcaacactaatgatccacacagcttcctgaattcgtgttatctttcagaaagccttatcgtaagttccataatttgaattaatctaccaagataatgtaattacatttggttttgtaaggtatacaacagtgatctcccattttgatgtcaggctttcaataaagttttggttatggggaaaaaaaagaaatgtcacctttacagaggcaattaagttaaaacgaggcaggtagggtgggtcctgcttctagtatggatgtgcacaaaaggaggaaagtccatgtgaggacgcagtgagaaggcagccatctgcaagccaaggagagaggcttcaggagaatccaaacctactgacacctggatcttggactcgtagccttcagaactgtgagacagtgaatttctgttgtttaagccgcccagttcatggtattctgtatggcagccttaacagactcatacagtggtcaaaaaatgatggctgctattattaagaagagttattcaacactaggcactgcactaaggactttacatgcattatcttatttcttcatcacataatcttatgaattagattctatgattcatacatattttgcaaaaaaagtaactgaggcttaagggtcttaactaattcattgcatagctagcaatgtggcagagctaggttttgaatgttggttgtctgatgctgtaacttctgcccttaggcgctgcactaatattagtatgactttgtgacagtacacaaagttaggatccaagaaagttaacatggcaacaccaataaaatggcacatgatttcactctaggtaataaatgtatacaatatttatatctttttttgttgaattgaaaaactcttcctctttattacaaggtaaagagatttcatgatattttatttgtttggttgtgaactactaggggtataatcccatataactcagtgggaagagtagttgagtactagaactgggaccaggtctcttggaaactaaatagagacaaagaacaaataaaggaagctgccatttggaatttgaaacccttaaatattcagtgccccattacagtttgcttggctcttaacttcgggatgctctgtcataaacacttcaagtcaatcttccgaggaaggtcttaccgtcagtgaagaaacttaggttctgagagatgaagcaacttttctgaactcacaggtctggtcagtgttttttatctccaaagtcagactgggagtgtggacatacatcttcttgctccccagccatgcgtgaagaggacggccgtgtttatccagggaattaaccctttctctgttaccattaatttctacttattttatgttcactctttagaagatattctgcatttgactgtatagaggaaagtctgagttcctggcccctcaaaactttgaacttcagataactgaaacttggaaagtttactttccagaaataacttattggagactaatttggagaaaatagggaatccctcttgt

SEQ ID NO: 83527 - DNA, 1012 bp, Homo sapiens
tgagacatcatgtcatgcaaacatgtggtctcttggaggcttgaaggcccattagtaatatgaggcctgggctatgggaaaaacccagttgtgttgtgcagaaaacataattcaatagctggaaacaggtgacatgcatttgtcaatatatggtcagaagaaagaagcagtctgagcctcaatttctcagtctgtccttggtaggagaatgtgtaccctgcaaagcagctttcttctctgttctgctcttctaagattatacaatgaaatatgcaaagctcttaaaaattactaaaaagtcgagacgatttcaaaaatatactgctcttctctggggtagtgtcagactactagactcccccattgagaaataatgtgagaagtggtggcaaatttcacatttacagacccaagaaaactcaagaggagtgataattaacaattaatcaaaaacacctcctaaagtctacctattcaaatgtaggaaaatgtcttgatttaaattaaaagcatattcctttttttttttttttttttttttgagacagagtctcgctctgtcgcccaggctggagtgcagtggcgggatctcagctcactacaagctccacctcctgggttcaagccattctcctgcctcagcctccctagtagctgggactacaggcgcccgccactacgcccggctaattttttgtatttttagtagagacggggtttcaccgttttagccgggatggtctcgatctcctgacctcgtgatccgcccgcctcagcctcccaaagtgctgggattacaggcgtgagccaccgggcccggccgcatattccttttgatagtcaatttacatgagctagtaatacagaataaaatacattttaaactacaaaactgcatttcagaggttaaaaaagtgagatcagggactgagctcataggaggaatgagaaaatgtttgggaatatttgagatgttttcccaaatgaaatactaaaactcaaattttatttt

SEQ ID NO: 83528 - DNA, 1050 bp, Homo sapiens
aattactagagtgggggcatatgcaggtattgcagtaagtagacataatgcatgaattgaggtattaaagacccagtttctcagaagatgtaacgtttgaatgaagacatctgtctctaaatggattatcagttattctcatctccttatcttaaaggtaagataaggtgtgatttcctttaatcaaatacaattgatcaaataatccacatgttcaaaaacttgatcatatatatagatggatattaatatgagtcaagcttcaatcattagaaatccattcctctgtctctatgtgtatatgtgtctatttctactccccgtctctcttccttactccctctctctttctcgccctctttctttctctgagatcggagagtccttttctaggaatgtgtttgcagaattcatatcaaatacatttcatcaaaatagaatctttagagtaatctcttccaaatctatttttgcaggggatgagagaaggataatgtgcagcttttagaatgactgtgaatgaatcatggattctgatttttgcctagtttttttttgttgttatgaacattttatggctattaaaaaaacaaaaaagaaacattgtactgttgtaagccataatgaaagaatatataatttaagcaaaacccaaatgaaaacattgtaggcatatatctaagtttttcattactaagaaatgtaaactcttttaaatttttctttctaaatggaagataccagatgttcatttgttaccatgaaagtctactttaattggcagttgtggtctcagagtaattttaaattgctaccgggctgtcacttctgcttttgctgacttgcaaggaggtttaatgcttcccccactgggctagactttatctctctatttggaactgttggatcacctcaatttatgacaaacttagaaaacatttaaatagtccacagaattgcaatgaaaatgcttctagagtggaagtaggatgttttaaaagtgctctgagatctagagataaaactcattatgagaaaacttgtgcagca

SEQ ID NO: 83529 - DNA, 1035 bp, Homo sapiens
gacctccctgattacagttaacttactacattgtccctgttccaacagtgccctttcagttaaatgcaataaatctcctcctctttaagtgacagggagcctgatggttactttggctttcaggaatgaaaaacggggagaaatgaacctatctaaaacagggagagcaaatagccacctgctgagacaaagctctaaacacaaatgtgaacactgatttttttgctacgtgttgatcttagaagtgatttttatttcttgtgtagtacgatatttcacaaataccctacaatgtacaattccctttctagaatttattatttcataattagaagagaaaaaaaaaacaaccaaggtaagcttttagctcccagccctcaaaaatatcttaagtgatttttgtctttcaaatattgcctgcattcgttctgtgaaatactcctttcttctaagatttgggagagtaggaaatcagtagaacatacgtcaaacagctgacacctgccaatcaaaattgagtcggtttcacccagataaaacctgcatctgacttaggacatttctcacagtttctcatggaaactcggagactgtaatttgtacctcattccctatcatttaatagtattatttgctcaatttgaacaggtgttcggcaaagataattaacatttgtttagtggttctcaactttggtgaaaatattttttttaatcccaaaacaatgcaaagtacatctttgtgcacttcccacttaatagatgaagacattgagaattttagaagcaatcacacagctaaaatatggagcaactccagaattttattttatgtctatatgctttgaaatttgtactcttcctccatctatgtcatcctcctccctgctgagaaatgttgctagtgctgtttgtttatgcaaatcaactagatcagtctccctgattaaaagcaaaatactaatacagtcagccctccctatctgcctatttggaaggccccctaagggacttgggcatctggggattttggtat

SEQ ID NO: 83530 - DNA, 1411 bp, Homo sapiens
actataatatgacaccattttgttttaaggtgttcaataattgagtatagtatcttgtttacagaattcatctttcaaaaattttcagggagtctttaacgtaatctgggaacttttgtgcctagatgcatacaagacaagagacaatgagagggagtaaggtaatgaggtttactcagcttcacccttttgtgtgattacagtctttgtagaaattatgacattaatggcagtagtagaacagtggtgatgcctgatgctgatggtacaagtaatagtagtaggtcatatgagctactattaactccattctcagcgtgtgttaagatcttaacatctattaccttatttaatgcccatgtaatactttgtgctgggcactatttttataccaattaaaagaatctaaattgattccaaaagaaacttatttatctaatttaggcagtttgaccaagcttttcatataataaagagttctatagattgagaagctatctgcagtggagccgccaccaaaatgcagattttcgtgaaaacccttacggggaagaccatcaccctcgaggttgaaccctcggatacgatagaaaatgtaaaggccaagatccagggtaaggaaggaattcctcctgatcagcagagactgatctttgctggcaagcagctggaagatggacgtactttgtctgactacaatattcaaaaggagtctactcttcatcttgtgttgagacttctggtggtgctaagaaaaggaagaagaagtcttacaccactcccaagaagaataagcacaagagaaagaaggttaagctggctgtcctgaaatactataaggtggatgagaatggcaaaattagtcgccttcgtcgagagtgcccttctgatgaatgtggtgctggggtgtttatggcaagccactttgacagacattattgtggcaaatgttgtctgacttactgcttcaacaaaccagaagacaagtaactgtatgagttaataaaagacatgaactaaaaaaaaaaaaaaaaaagaagaagaagctatcaacctcataatttatatgaaaatcataggtttcctaattgtttttaattaatatttttgttattttgatatatagaagtgtttttttattttatttttcttatatatttatttatttattttttgagatggagtttcaatcttgttgcctaggctggaatgcaatggcgtggtctcagctcattgcaacctccacctcccaggttcaggtgattcttctgcctcagcctcccgagcagctgggattacaagtgtccaccaccatgcccggctaattgtttgtattttcagtagagacaagttttcaccatgttggccaggctgttcttgaactcctgacctcaggtaatccacctgcctc

SEQ ID NO: 83531 - DNA, 1045 bp, Homo sapiens
taactgtccagcttagaagcatttcattttcaggaaagctaaaggggatttgagactgtttttaccaggaagagatggacagataaagcactatttgatgacacaggcatatctgtgcttctgatagatgtcaggcaagtgctagttcttcagcatctatggttctacccaaagaagggacaaatgctgtttcaaagcatttacagcagcctttggcatgtcattcagaagggggagcccacacattttttattaaacctggcttggctccatgggatgagaacttaagaatcacaaaccatatttttcaacatctgttctgcagttctacagtcctctgcccccacctccaccccagttggatcatggagagcagcttccctctctctatgcacaattggttaatttcagaagaaaattaaatttcctgactagccagagcaatgcatagttccttatgagtctagcagacagatttagagccatttaacctttttagacagaaccagaggatatggatattcagggaattattgggtaacacatagctatgcattattttctctttaggactgttgtattttatacactgacaagaatgtatccatcttttaggataacgtttaatttgctatccagcaagaaataggcagttatcccagcatctgccatgctaaaacatacagttatttgttggttggttggcttctcacgcggttcaatttctttttagagcacattgtcaagctagaaatatcatgtatttttgacttcttatacctactactatatctctatctgtatgtatttgtctgtatattcctttacgggggaaaatgaaaagtgacatagagaaaaatccgtcatcttaccctctcacttgcaggaacattaattagttccttgctactttctgcaatactatgtctttcactaatgtaaaataaagttgtgtaaattatttaaaatatgacatattttgaatttagggagactaaggttgaaatcatatcactactacttcccagtcggagaactagtctct

SEQ ID NO: 83532 - DNA, 1039 bp, Homo sapiens
aaatgtggtctatgtgcgtaaggaccactagtaatgaatggctcctgcagatcacacatatttgtcttattttgtctgcaagtaacactctctctgttttataaagggaaaggctggaaccagaaagccaatacattgtggtgactgtttgctgtgtttcatacacctgtgcaacttgcaatatagtgccctgccctccacacttagaatgtagagattatgaagtcagcttccttctctgtctttatctgaaacagtgtttgatatgcagtagttgtttgataaacacttatggaatgatgaactcattccttgtcagtggctaagtatgctcatcccgcttcttttccttaatctgtataaaatagaacccaagattttatgtgccacccactttcttaggtgtatgaatgggagctgaaaagtgttgactacatgagtacaaatacattcttttggaaaatatgaaaacataaagaaaaaatgcaaaatgagaaccggtgattataagcaaaagggaaaacgaggtgcaatgttgagccaacagctgatgctatgtcttgcacagacagtgatctgatgaagcaggaatcctgcagcagcattgtctgagaagaggcataaggggaggaggaggaggagggaaattctattttcagagataaatgtgaggaaagaggcaagtcactgcactgggaagaaagagagcctgcacccccaaagaagaatgtaggaggatttcaaaaacaggacttgtggaatgcaacaaaagggtcaaggagggtattggcttgaaaggaacaaaaggagtggtgagaagattatccagggttagttgtgagatctgtgccctttgaattactgtgaaagaatcaagttgtcagaattttaagtgcctctagcatgtaactccgctcagtacttgaacacctttcacttttgtatatctcaatgttttataagtctctttggctgacaaagaaaaaccaggagaagcatgacagtggtagaaagccctggaaagtatatatatatatct

SEQ ID NO: 83533 - DNA, 1026 bp, Homo sapiens
gtcaacatgcatacaaagaaatgttttttatgaagtgctcacttccattttactttgcattgaaatcaaattgggctgaacacttcaatggaatacattttgtggacaatgtcactttagaatctttcatctcagtgaaggattacacattctcaatacttccataattgcaggttgtgttcatttttttatatagtttttgtaatccaaagaatattttgctagatttgcacagatctccaattgaatttgcaatgaagaaataactcaaaaggaatatgaatagcatttaaataagtatacagctgtaagtaaccctgtcaccatggatgatccttttctctaggaatgtatttggattagagatgacaactacattttcgcatttttatgttgaagtcttttttaaaaaggctgtttacttttcagtagttaagaatacttgtttttctttttcttttttttttttttttttaccttttattttttcgttaagcctctattgtttgtagaacactcttagaaacttggaaataaaatgtctttcccaactagtggagtcctttttcatttggagcacattgccttaaaagaagtcttaatttaaacggtccttccttattctaaagtaatcactgttttataccatctatgcagctaaaagaaggaacatgcttctgttcttttcctcaagtaatggttattgtttctagtcatcattcattcattgattcattcattaattcatcaaaatcttattttataaaccctgttccacttactggaggattcagaatgaatcttactaccttttctgacatcttttgataattcagccctgtaccaaagtatccaccttgttgtcttataatcacctatttacctatttgccctcctagaaaatgcaagaagatattttctctccttccaaattgaaggaagaacataaaagatataacaggaaggagatggtgagatatagagtgtgagcggaaattaggccagctgtggcaattctggacagat

SEQ ID NO: 83534 - DNA, 2065 bp, Homo sapiens
gtgagctggaaaagaaaggtcaagcagaattattagcaggcagcctttactgcccttggtcatagacaatcatatagtaaagttacattgctactgtactggttttactggtttcactgccgtgaacttgaatgagatttggacaaaatccacataggacatttttttttaaaccttcacattaattggtaattatctacaagggactcccacttcccactcatcctttaatatagagggcatggtgagattaaatagattatgaatccaaaagaaagttgcaaagcaaaatactattgataaatatagacaaagtattagaactgatgaaatctctgtaaggggaaattaaaacataatgagctgaagtaacttgcccaagaccactttgcttggaaatgatagaggaaagattttcaaccctggcttccctatattgtgtgttgcacagagtattaaatgtgaaaagcaaataagataatgttgaatcttagctacttagtgcaaaccttccagtgatttccccaagtttaaacaaaacctgaagtcttttccattccccacaatggtctattttacgcaatttggcctccacttccttacagcccttctctctcaccagaaggctgtagtcactctcctcctcttgctcctctgcaagtattcaggatcttctcaccttagggtttttgccatttgctaatcacctggctggtagtttttatcctgcagatatgcacgtcattgtcttcctcagtcattttagattcctttttctaaagaatgtcttctcctaccacactacgcaaaaccaatctctccctctttctgcttatcacccacacattattaacacaagcatgcgtgttcaatcacactcatacacatacacaaactcactcacaaatagctcacattcatacacacactcacactcttacacaacagattcatgcccacacaatcactcatggccactcacacatttaccccctcaccctcacacacaatcatgcacttacacacccacaaccacacacccactctcagaaccctcacccttttaccctactttattttcctttttcattgcagtgacatcagagtgtgtttacatttgtttttattttttctctttagtcggcctcattaagagaggaatcttgactgttttgtttagtagtaaacaaaacaagcaaacaaaacagtgtcctggcactaggacagtacctccatgtacagtattaggctcccaataaacattaaataaatatataggagggtcacactgcaggaaagccttctggagaaggtaacgcatgaccaacttgtgaagcaggcaagttgcgaaggaggtgaaataaggggagtgtcgaatatagagttagacagggagggatgttaaagtttgcatttttaaagtaactatggagctgttgaaggaaggcttttaaacagagaattttttttttctgggctcttcgcaataccataagtgagccttggagttaactcatggaccatcctgaagacatgaaaagaagcttcagctattttgctaaatgaagacatgcatggttctccatcattacctgatgggaaatgtaacagagcattgtttttctcccttacatgtggcaggtgaccccagcatttcacctggacccagatattgttttatcacccttcgtagaacacattcttttgacaagcaggccatgtgggatcctcctccccacatccactcacttctttcatgttttcagtcaatagaaagttcaatttcaaatcctttgagaaatttattgggattcaatgaaatctatagtcttacagctgccaaataaaagagaaaataaaaatagatgtcttcttcttctaggcgtataccagatgtctgtgtcagaagcagccgtccctggggaggaagtaggaagagtgaaagctaaagatccagacattggagaaaatggcttagtcacatacaatattgttgatggagatggtatggaatcgtttgaaatcacaacggactatgaaacacaggagggggtgataaagctga

SEQ ID NO: 83535 - DNA, 2096 bp, Homo sapiens
cactttaatgtattgcatgaaatatgcacctcctgctttaaacttaatatgcaccatcaaaacatttccatgaattgtatgtagcaatagacttacagaagattgtgctggaagtcaaaaagtatgagtttagtcatggatattcatgcaatgaccactcaagtatttcagtctttagggtgtttatatctgagaagaatagggttattacttgaatgtacaacaaaacataaatacaaatgctgtatagtaatttttatgatttgcttgaaaagacataatgatgcttcagtatggctgcctttggttgtaattaccatgttgaaatgattcttgctgagggcatgggatattttattcagcattgcttcctcagtgctcagaactttcttgttgtcataatgttataaacgaatatctgtgatgttgcctgcttacctgtccaggtatcatcagaacagccctacccaacatggacagggaggccaaggaggagtaccacgtggtgatccaggccaaggacatgggtggacatatgggcggactctcagggacaaccaaagtgacgatcacactgaccgatgtcaatgacaacccaccaaagtttccgcagagtaagtaggtggacttggctttcacttttccatggtgacacagccagctctctccctcctctaacctattcctgctttactgaggtatcaaaaagaaaatctagaaaactaagggcaattcatatcattcttacaaaaacaaaacacaaaaacaagacaacaacaacaacaacaatgtcggggagtagaggtagtaggagaatgaaaagatgtaaaaagttctacaaccctggaaacaaaatatcgtttttgctaagtattttgcttggtagtagtgatgcaatctagtaattaattaacccttttctgcctcagtgtcctcatttctaacctggatataacagtccctgaatcagttatcaattactgtgtaacaaattgctggaaaacttagtggtttaaaacaataaaaataataacaataatttgtttttatcatgtgtctggaatttgggcaaggcttggaggagacagcatgcctctgttctccatagcaacaactggggatagctccactggggttggaggatccacttccaaaccagcttacttgcatggctggcaagtttgtgttgattgctgcttcctttctgcgtgggctggttttggaaagtgtgatccccaagggcaccaggcagaaattgtcttgccttttgttaactagcttcagaagtttccactggaaactggagtcataagccaccaaatgtttccactggagtcataaggctcacaaatctaaggggagttcatgtagaccccacctttcaatggaagacctgtcaaagtcatgttgaaggaaaagcatgtgggatgggagatattgttttggccatgttttggaaaatacagtcttccacagtacctaattaataggattactgtttgaactaaaggagctagtgtaaaatcttataatgacaactgtctataagtcgtcaacaaattctagccattgttatctgggggattatggctgttctacaaaatttataaaattgcagagggaattaaatgaaaaacaatgattttgaaaggttattattaataattgtaattatagcaactaccatcatttaatgaatagtcactactattgtaaatctctgcaggagcctacattttacagataaaactggtttccgtaaaaagtgcataagttgccctagaaatgtggcaaagtcagagtttgaacacaagtctgtctatgtatgtacagatgtgtatgaatggacagtatgactgtggtgctgctggtgctgctaatgcatgggggggttcatcatgaaagtgtctttttcagttagagcctgtgagcttactatcagagaaatggaacattttgcaaatgagataacaaggaaggctactaaatgtggccccaggaaggcactgtggttactcaaaggaattcaaaagcaagaatctacacaagactcttttgcctggccgggcacaagttcagcatcctcaataagcctg

SEQ ID NO: 83536 - DNA, 14065 bp, Homo sapiens
aaatatggaagtggtattctgatccagatgcatctgatctccaagtctatgtaccttccactatgccaagattcatgctgtttccttcttgctcccttcttccctgaaccatttcacccaaagaagacaacaaaaaattaggtgatgacagtgattcctacaatgctcagtaagttttccagtttcatttagacccaggtgctgaaacagaatgttatcctcaatatcaatgtatcatcctcctgcacaagaactttctcagattccctcacattggtggtgaactcatctgattctctctctggagtctgggtggcactccagagagagaaggtgattctccagaaaacaaatgtatggttctaagagaggagaacaagcaaggggaattccttagagaagaataagttttcagcatgagaaagtccaatgaagaagtccagaacccaaggcagaagttaaggactggcaataagaaccagagtgctggagagaggacaagagtgactgtggctcagaaacctgtgaggagtgtagaaaggtgaaaggcattactggcttatcctcactggtgttgagtagctgagtcatggctgggtgctgggaacatgaccttgggctggttggttggatatactgttttgttttattttccttctcctagttagtgaaagcttgtaaaatatcctttctgagacttccaggctaagcaaggtaggatctttggcttcgtggatggatctttgccagacaaaagcaaatcttcctccttgaattgacactatacccttaactgatttaccaaagagaccttaatccattatttctcctgtaaatatttcagtaaccatcaatggtttcttgggatcttcccctacatcccttccctaacaggatccattgcctgcccgccttcttcgttactacctccaggcatgctgaacatcttggagcacactgtgcttttggatgtgatgttccttctgcatggaatcccacactctcctttcttattacagcaacctcactaaaggattgagtccagccatctgtcctctccctaaactgaaccccagtgtggattatatgttcctcatctggactcctttaattccccgttttcttattacaaaatcatatctaagcacaattttgatcaattataacagataaatatggagtgcttactatgtaccaggcattgtgctaagagacttatatgcattactcagtgaatcccagtgacagctttgtactgggtacactcttatccccacttcataaatgagcaagctgagctcaaagcagtcagtgagcttccccaaagcccgtagctcccacgtgataaactcatgcccagtcctgaaggcttactgaaaggaatggaaatgaagtggggatttggcctgcagttaatccaacctctctctgcttgcagaagctaactggggacgtgggcagccctgacgtgatgagctcaaccagcagagacattccatcccaagagaggtctgcgtgacgcgtccgggaggccaccctcagcaagaccaccgtacagttggtggaaggggtgacagctgcattctcctgtgcctaccacgtaaccaaaaatgaaggagaactactgtttacaagccgccctggtgtgcctgggcatgctgtgccacagccatgcctttgccccagagcggcgggggcacctgcggccctccttccatgggcaccatgagaagggcaaggaggggcaggtgctacagcgctccaagcgtggctgggtctggaaccagttcttcgtgatagaggagtacaccgggcctgaccccgtgcttgtgggcagggtaaggctgccttccctcaatcctgagctttccaacccaccattggaatagtcgtctgtggccagaaagaagcaaaaggcccacaggcatctaagagagaaaacaccaatggcttgaagagccagtaaaaccacccaaatattgtacataatatgttattccagacttttaaaaaaaataatagacttatccatgttgagaatacttcttaggtttttccatttagttttagggagttatatcataaaactcatttaccatattatttagatatggggtctctctctgttgcccagactggcatgcagtagtgtgatcatagctcactgtaatctcaaactcctgggctcaagggatcctcctgctttagcctcctgagtagctgggactacaggttcatgccaccatgcctggctaatctgtattttatttcatttttttagagaaaaggtcttgctgtgttgcccaggttggcttcaaacctctgacctaagtgatcctccctcatcagcctcccaaagtgctgggactgcaggcctgagccactacgccaggctcaaactccattttgaatggctgcataatagcccattaaatgcacatagccataatttatttaaccattttccagctggaggcatttccctgaccacaccctaatcccaacttgaatgctcctcctttggaccctttatcatagctttgctttttgtattcagtgtatctacttattaatctgtctacttcactagacttcaagctactttgtgtcaagggcagtgtcatccttgtgtacttatgtcctgatgctagacccagctttgaagagctgaatgaatatgtaccagaagcttgggtgtggttttatccctgtttccacaggcatggtaaaacccagtgagatgacttcccattccaggctctgtggtctctgtgtatcccttccagaaaagtgcaagtgtagaaagagggtccaaaatacaaattcaagagagtttggaaaattacctacccactagcatttgagtaaaatgtacagttatctttcagatgatagtgacattaaaactgcaaaaagatatgtgcggccagcacagtggctcacacctgtaatcctagttctctgggaggctgaggcaggtgaatcacgggatgtcaggagttcaagaccagcctgcccagtatggtgaaaccccgtctctactaacaacacaaatattagccaggcgtggtggtgagtgcctgtaatcccaactactccagaggctgaggcaggggaatcgcttgaacatgggaaggagttgttgcagtaagccaagatgtgccactgtactccagcctgggagacagagtgagactctgtctcaaaaaatgaatgaataaataaataaataaataataaaaaagatgattattaacaatgccagttaatattaacaatattaatagtattatttattactaatgccattttctcatttttgttaaagtatttttattatttaagtttaaattattattatgagacaaaggcctccatctcaaaaaaaaaaaaaacaaagatagatccttagatacataagaactgaaatcctatcatgtggagcagctgccgtgctaggcaaaatgtaaactagattaagatagctcctaacctcaaagaggtctagtggaaaagagacagttacctaagcaattaaaaaaaaaaaaagaaaaaaagaaaatgaataatagaataatgaggacattcaatgtaaatgattatgaatttacatggtaatatttgggagggatgtcaaaggaaggtttcaaggacaacatgggaataacctgtaacctaaaagatgaacaggaattatccagtggaaggtaaaggggaaagagaataggtttgaggggtttctgaaccctactgatttctacgaagttatcttaattgttcttttacatgagaacagcacttcatgttcacataattgacatacttgaaggagattaatgttagaatctcaatgacattgtgtaagtttggaaaaatttcttcttgaagagatgtaccaaaggaatttcattcatttatatcccaaatggaaatatgtggaagttgacgtgagaaatggaaatggaaataattggcatatggaattccctaagtagaggagatgggctgtgtgccagagaggaaaaagagatttcagccatgacaagggatgtggagcttaaatgttgtgaagggctgtgcatgaatcattctgagatatgaatagaaccttctgctttggggactttctcaatgggaagcagtgtgtgtgttcagattgggggttgcagaagaaacaggatctggagagtcatttcagcatctctggagtaagcaattgtcatgcctactagaagaaaatatagaaaaaaaagaggggaaaggaaaactagtattattcatggtgtgtgaccttcaaaagctaggtacatgagaatgaatctgatgtccggttggataggggaaaaataaataaagtggttggtcctgtgaatctttcttttgaaatgtgctgagacagttccctggaaataggagggatggaatagatggtttatttcctaacaacctttgatttgatgacattcaaggttgagtgcttaagatgccctgaaaaagtgaaatttggtaaaccatggactttcagatttcttgtggaaatacagcctgtgtcatgctgtgctatgcagagagggaagccattcatctttggagttaggaattggctgcgtatgcctcagcaactggatcccttgatagcactgaatggtttctgaaactgggtttttgtttttttttttaatgtgtgtgtgtgtctgtgtgtgtgtggagcctagtaagtatccatgtcagttgtataaatcatctttgttagacacaaaaaagggaagttatgtcctactttccaacctgaaaacaaagtagaaaaataataggaaatgttttgttaaatttttagttatttggctgatcatgaaatagatccatttaattttcaagaaacttgccaaattcacatgtaatatatgaaggcctctagaaagattcaatgtctgggcattcccattaaagtcagcattttatttatactttcttgttcctcattcgtatgtccttgcccttaacttctgccaggtgtgcagcagggtaaatagaagaacaaaggtaagcctcccctaagatggcggtgtggggcagaaattttgccttcattaaggaaacttggctgaatgaagattggggcaattctgttcatccgtcataggccatcaaacagctttgtattttactgtcaaatggacttattcatcagaaatgtgttagccataatttcacgacaacacattgttatgaataacaaatgctgaagaaaagtctgtttattttttccccctagaaacaaagaggactgaaaacaaaatggtctttgtaattcatacctacaggtaacccccgagctgaaataattggggtttcactgaagcgctgcaaatcaattagatatctttggggatattgaaacaatacaaaattttttaaaatctatgtattcaaccttgctttataagcaaggtctctaggccttagtctcataataataatcatgagttaaggtctctaggccttagtctcataataataatttaaatcaaaataataaataccaattttaacaaaaatatgaaaatggcattagtaataaataatactattaatattgttaatattaaatggcattgataataatcatagtttttattattttatttaattaattaatttatttatttttgagacaaagtctcactctgtctgccaggctggagtacagtggtaagatctcagctcgctgcaacctccacctcctggtttcaagcgattctcctgcctcggcctcccaagtagctgggattacaggtgcaagctatcatgcctggttaatttttgtatttcttctagagatgaggtttcagcatcttggccagcatgttggccaggctggtctcgaacccccgacctcaagtgatctgcctgcctcagcgtcccaaagtgctgagattacaggcatgagccaatgtgcctggcctctttttattattttaaatgtcatttgaataaagctctctagtttacaaagggttttcttatttagtaggtagaaccaaggtctttttctctacttgactgctcttgaagcccactagaacagtaaaaataatgcttactttttcccacaaagggcagaatgaggaccaaggaactcggattaaaagacagctgcagaaattgagattgaacaacaaggcggggtgaggagttttttgctacaggaaaaccagatgtgatttttgggagactttcatgtttgaaaacacagagcagagtgagggcagaacagaagatgattggtagttaagagacctagttgatttcttggacctgacaagtgtgaatttaggcaaatatcatcttatctctaagctctgtcaaagaagaaaaacttggggatgtttaagattctttctgacacctaagaaattgtatacatatcaacccatgccactagtcctacctacctttagcattagaatggacacttcttccaggcaggccacatccccagatcctcataccctgtgtaccgcaaagcaggtcttctggaaaggtctgataagttgaattgtttgtagtaacaaaagccaggaaacaagctaagtgttctttagaaaggactgctaaaacgaacaacaaacaaacaaaaacattggccaggcatggtggctcatgtgtgtaatcccagcactttgggaggccaaggcaggcagatcacttgaggtcaggggttcgagaccagcctgggaaacatggtaaaaccctgtctctactaaaaatacaaaaatgagctgggtatggtagcatgtgcctgtaatcccagctacttgggaggctgatttaggagaaatcgcttgaacatgggaggcagaggctgcagtgagccgagatcatgccattgcgctccagcctgggcaacagagtgagactccacctcaaaaaaaaagaaaaacccaaaacaaaaaattttttaaaaaataataacctccatacagtagatgaggaagatctatagttataaatgtggaatagtcacctgaatttattgttagaggaaaaggatgaagtgaagaatgatgtgtgtactctggaactttattgtataacaataaactagggtacatatgtatctgtgtagatttccttgcatatgcatagaatagaatatctcttataggattcacaagaaactggttacagtgattgtctctgaacagaggagaaaatgaaggaatgggagtcagagctgagaggaagacttacttattgcatgaatgtttgcttatatatttttaaaaataaacatacatttatttcaaactattgacagatacgtttaggtttttatattttgcatatgcgcatatatatggagagaggtgaaaggagagcatgaatcttagaattaaaaatatatatatttgaactctggcttcactgttctgcagtgtgaccttggccaaggctatgatattctctaagattgcctttctcctgttgtaaaatggagatgagaacatctccctttcatgacgtgtgtgtgtgcgcagcagattgttgcaatcacttgtaagtgagtttccccactgctttcctcatggaattaaaaatctcaatttctctttcttccagcttcattcagatattgactctggtgatgggaacattaaatacattctctcaggggaaggagctggaaccatttttgtgattgatgacaaatcagggaacattcatgccaccaagacgttggatcgagaagagagagcccagtacacgttgatggctcaggcggtggacagggacaccaatcggccactggagccaccgtcggaattcattgtcaaggtccaggacattaatgacaaccctccggagttcctgcacgagacctatcatgccaacgtgcctgagaggtccaatgtgggtgcgtacggtgtgggaggcctgctctgcttccaggcctggtgtctctgtggtgggtgggctgaagcccgttctcccaaatcaggaagtagagcttcttctttatcttttatggcaaaataacaaaaggaacaaaaattcttttgttcctctgtaaaatgggaataacaatttctagtcttgtaggaatagagataatatacatccagtcgctagtgcgtattgatgtctaataggtaatgacactggtaatatctgttgcctgtagacattgtgctaattaatgacttacatgcactattttatttagcttttgcaatgattaatctttacaatgaggtaattccaactcaccgtatttcacagataggaaacccatgccagaaacaagctaactaatttctgtagggacatttgagctattaaatggatctaaaatgcacatttaaccacagcactatgtcactatgttcagaagtacgtatatcttttcaacatgcttgaagacacattaagttgctaaaggataattttttaaaggatttattcaaagaattagccaccttctggcaatagccttctttataacatgcacataatgaaacatttgcataatgtttcttttgagaaacattcctcatattaagaaaggtttgtctttcaaacagtgagtagaactgttctaatcagggagtgagtctgcttaaaagagttttagagctcaaatgaattcaggaacattttacagatgagaaaatccagcaagtataggaatcaacctacttaagaaagataggtttgactctagaacgctaagatccttccactgtgcatacagagctttttatgccagaaaatggtatattccttctccaccaggaaaagtcaagtacttatcaaaagccagcctgaaccatttcccacctttgtctcttccattttccctgcccagtccttcagcctcttggtgtttagcctgtgtattataatgagaaacaacaaatatcaaataaatccatacagaggaaacagcagtgtcagcaactgagtgtcaagggtggggatggggtggaaaggcaaatcatcaaaatatataatccaggaaaattttcattattctcacctttgcgggctcattgatgtttagggataaaattcaggctttttttttttttttagtttcaacttttattttagattcagggggtacatgtgcaggtttgtttatttatttatttatttatttatttatttatttattttgagacagagtctccctctgttactcaggctggagtgccgtaatgccatcttggctcactacaacctctgtctcccggcttcaagcaattctcctgcctcagccttctgagtaactgggattacaggagcgcgccaccacgcccggctaatttctttgtatttttattacggacggggtttcacatgttgttcaggctggtcttgaactcctgacctcaagtgatccacccacctcagcctcccaaagtgctgagattacagacgtgagccaccgtgcccggcccatgtgcaggtttattgagtgaatatacatgaatatactgtgtaacactgaggtttgtggtatgaatgaccccatcactcaggtagtgaacagagtaaccaacagatttcggcacttgtcctctggctccactctagtaatcctgtgtttattattcccactgggtaaacattgggttcatttatacctccagttataaatgaaagcatgtggtatttggttttctgttcctgtgtcaatttgctcaggataatggcctccagctgcatccgtgttgatgcaaaggcatgatattattcatgccaccatgcatagtattccatggtacatatacaccacatattctttatccaatccactgttgatgggcaccttggttgactccatgtcttcgctattgtgaatagtgctgcaataaatatacaagtgcaggcgtttttcttgtagaacgatttattttcctttgggtctataaagagtaatgggattgctgggttgaattgtaatacttttttttttttttttctgagacagagtctcgctctgttgcccaggctgcagtgcagtggcacgatctcggctcactgcaatctctgcctcctgggttcaaacgattctcctgcctcagcctcctgagtagctgggattacaggcgcctgccaccacactggctaatttttttgtatttttagtacacaggggttttgccatgttggccaggctgatctggaactccagacctcaggtgatctgctcacctcgtcctcccaaagtgctaggattacaggcataagccaccgtgcccagccttgaattgtaattctgttttttttgagacttctccaaattgcttttcagagtgacctaatgtacattccaaccagcagtgtatatgtgttcccttttctccacatcctcaccagcatgttattttttgactttttaatcatagctattctaactagtgggagatggtttctcattatgggtttcatttacatttctctgatgtttaatgacgaccaatttttttatatttgtaagccatttgcatatcttcttttgctaagtgtccatccatgtcttttgcccacttttgcccacattgtttttttacttgttgaattgtttaaattccttatagattctggatactagacctttgttgggtgtgtagtttgtgaatattttctcccattctgtaggttgtctctttactctgtttatagtttccctttgttgtgcagaagctctttagtgtaattaggtcctgcttgtcaatttttatttttgttgcaatttcttttgaggacctagtcataaattctctcccaaggccaatgtccagaatggtgtttcctgggtttttttctctagggcatttatagtttgaggtcttacatttaaatctttaattcatcctgagttaatttttgtatatggggaaaggtaggggtccagtttcactcttctgcatgaggctagccagctatcccagcattatttattgattaaggagtactttcctcattgcttaattttgtcaactttgttgatgatcagatggctgtaggtgtgtggctttatttctgggttctctattctgttccactggtctatgtgtctgtttttgcaccagcaacatgctattttggttactgtagccttgtagtatagcttgaagttgggtaaggtgactcctccaacttttttctttttgcttaggattgctttgactattcgggctcttttttggttccatatgagtcttagaacagtttttttttctaattctgtgaaaaaatgatgttgctagtttgatagaaatagcattgaatcagtagattgctttgggcagtgtagccattttaatgatatcaaatgggaaaacattctatgctcatgggttgaaagaatcaatatcattgaaaggatcaatattccatttgtttgtgtcatctatgatttctttcagcagtgtttcgaaattctccttgtacagatcatttacctccttggttagatgtattcctaggattttattgttttgtggcccttgtgaatcgcactgtattcttgatttggtcctcagcttgagtgttattgatgtatagaaatgccgttgacttttgtaccttgattttgtattctgaagcttcactgaagttgttgatcagttctaagagccttttggcagagtctttagagttttctaggtatagaatcatatcattagtgaagagaaataatttgacttcttcttttcctatttcgatgtcttttatttcttgctcttgcctcattgctctgattaggacttccagtactatgttgaataggactggtgagagtgggcatccttgtcttattcctgctctgaaggagaatgcttccagcttttgctcattcagtgtgatgctggatgtggctttgtcatggattgctcttattattttgagaactcagacattgtattatggcatatgacagtacagtcgttgttgtcagacagtactatgaatcatggctgtactcctaatcagccttacgaacccaggcaacctattatacctttctaagtttttattttgccatctataaaatgaggataatataaactatgttgaaggttaaatgaaatagatgtgaaatacaaaaccattgtaaaggatgtagcagagttctagaaggaaattaagcatttaaaattaataatttccctagccacaccatgatggtattttcctttataaatctatcctgcctagaatagtgactgacaaatgggaagagctccaaagagattgtttctatgaaataatgaattatagaagagtaactagaaaaaagtgagatgtacaccacacaaaaatcactgacaatcctataaattaaaggtagtgataggctgtgtaaactggctcccttgcctcccacatagaaccttgcccctctgctgaaaatgttacagaaataacttgagttttgttgtgtgctggattggggttagactttggcaattaccaactttgtgaaatagattacaaagcttcatatatctcaagttcaatttctcactaatacagtagatgtaaaaaatgcccagcagaggaatgctggcaaaatacatggaatgtgcccccagatcatgctggcacagagaaattcgataattactggttttcttcttccagctcctctctccccactctgaagcccaacatgccatgccccagatacttgctatttgtgaccagccaggaacaaaggttgtttttaggaaaagcagaaccccatctttcttcaatttcctggtttcccttcgttctgacccatgaatgcttcccttacctctcaccagatgtttactggtgatttctgttatatggctaccagaccagctacaggtgggaagatgcaattttcatgccagtagggaacagcattctgctcagtatttatggccataaattaattaaattgtagaattagcagcaattttattacatgcaaagcaacaataaaatgatgtatttattgttctgctacagatggaagattgcactctgtcctttcctgaaagcaatttatcgttaattatcatttattatactctgggaagattttaatgtaattatttgatatactgaacatttcaagtgcatgagttgtaagatatttttgcaataatatttataatattattttaatcaccaaccaatgtaggatgtactataaatacagaaagttcatttttaaactgtggccatttttatagagcaggaaggaaggaaggaaggaaggaaggaaggaaggaaggttggttggctggttattttgcatctcaactccaggaaaatgagagaatgttgaataattgtggtgccttcttcagggttaattttagaataaaactttgtaaacaagaacataatttgaaaatctgaggagatgttgctaattaatttatttcacttttaaggaacgtcagtaatccaggtgacagcttcagatgcagatgaccccacttatggaaatagcgccaagttagtgtacagtatcctcgaaggacaaccctatttttcggtggaagcacagacaggtactgtggaatgtcactgtgatttgtgacacatggtgaataagaagtcccaggcctgaccagaacttatttaatactctgttttctcaaatatgaaaaaggaatacagagggctaccctatagggttagtgtgaggattagatacttggcctgtgcctatcacacagttagtacaccatgaaacatttattgttggttttcccatatttcacgatgacccaataacaactataatctaaaaactcaactttaatatcagaagtaagagagcaataaggactaagtcttccacagtgctctctatattcctcacataactgttgccatatctacagagagaaaaagcttccaaaggtctcctaaagatttaagtgagcatggcactcatgtgccaatatccagcaatcatgcagaattcagttattaatttatcattgttttccgtgacaggtgataatagacagtatgtgcttatatgagcattgtatatattttaacc

SEQ ID NO: 83537 - DNA, 1141 bp, Homo sapiens
ttgcagcaaaatggcagccagaagaaaaaggtgaagaaatatcaactttaattaaaccctttctttctaatacacttcatggcttatatgcaagaataatttatcactctgtgaatgagcatttaatacttggcatggtgcaagatgggcaaggatcttgcctcaccatatgctgttttctttttctttctttcttcttcttgagtttccacagagacaatgtcaagtttagagttgaaatgtgagattcaaatcatatattaaaattgtattgacggcctgctttgtgttcaggtgtcagacatataaatgtgaataagatataatcccatccattcagaagtttccagtctagtaaggagacaaggtatgaatcagaagaaatgcccctcactagctcactgaaactctaatcatgaatatgaagccacttgaagaaaattttacacaggcttcagtttacagagtgagacagaacctctgcgagtagaatcaatgaagttccatggcaaattagtgccagattctccaccaaatcttgagtttcatgacttctgctcagaaatctttctgttgtttcatacagcctcattttagcatctaacccgtcctctggggccttctttgtgctctttccaaacagtcggtttggctttctagaaacagcatctgatgtattattaaagtgcctgaatgtaaggatgaagttgttaaatgatgacgctgccttttccatctttctctctctcccacgtagccttttacatatcccaaagtgtctgtttacaaccaatattaagagtttcaagtcccctattccttgaataaagactaacataataccatcccaaagtgttattgagaaaagtgacagtcaccaggctttaactgcacatctgtggcctcccagataccactttgccagattacaaaggaaacagaaagacttgggatggcaaagtcaaagttcatcaaaatggaatggatctgtatctacaaattataatttcaccaattcttttattttctaggttgctgaggtcagatggctatggtatcccaagtaacttatttgttctcaattcgcatcttggagaaagcacctcatcaccctcttgggggcatctccatgttcaaggca

SEQ ID NO: 83538 - DNA, 2488 bp, Homo sapiens
atcatgagtgatggaaccaggatttgaacctgacacataggtagtgaatgatctttccactttcaaagcagaacttctgtcattctctatttctccagaagcagagactcagatctccactgaagcagttttaaaatttccactcacctttgcagagcgctggggtctttgataaggggccttatttgctgcctactttaacatttgaatttggtattagaaattggagcagcatataccataacctttttgcagtctctgctgtgtactttgcacctgagaagaagtgattaccccaagcttatgccttgctccaagtctagaaatcaggggagaagaattattgagaagtgtgactcaataattcttgtaatacttcttctcccctattctctgtgatttccacagacatggcataattcctgtgatttgatgtgaaatgagagaccagctcagtgctgagtgatgagatctgaacggggaataaaatatgcttgaattaatttgcataatagaattggattggttacaaagctgtgtttgttgaaagggataccagagccccttagctcaccaacaaggggactttgcagatacagaatggggttttgagctctggtgtgggccgtggtaatattcttaatgtaataataacctgtctctaactataaattagctacctggaaatgaaaaaacaggtcagcctgtctgatccttccagctctgtggggaggggacagctgaaaaaccaaatctgcttgctttctgctaagcgctttcgtctttcattctccacccaataacaatttccagcaggagtccaaatatacttaaacacccgtatatgtcattttctttaacggagacaaaagcaggcacagcaagagagttttatgctcaaggcacggtggcttctgacgggctatctgctctcaagatagaggggtgatccttccctttcgagctggtggctttgcacatctattttcctgtcatgttattactgctgtgactttcaacaacatttatttttccctccaagcaatatgctcccatcataaaataaagtcctcctatatgttttagtagaatcccaatgcttaggcatcctggcatactgctaaaaagtgttttaatggattgttcaagaactaccttgggggtctttattaaaaccaattagaacattgatatatttccctaattattaccaacatcaaggtctccttaggagggcagcctcctattaattttcatgggagattcctactaagtccctaccactgaatacatcaatcagttctctcaattctagaaatatttcataaaacaaaacaaaacaaaacaaaaaactgaaacaactctgaatacacttttgtaacctacacatttagaaattctgaaacaggtatttaaaataaaaaccaaagatcaaattttgtgtcatatgttgtttaaagacctggttatactatgttattgatggttattgatggactgatgtaattacctcttgttcatcttcactttggtcattgatataaaatgctttttctttctttttggtttggataatttttttttattatagtctacttctccatgctaccaaaatttaaattatcatcatgttaaggctattgtgtgtatttgtattagtgtgcctaaatttgacctgcagccttctcttaggtaaaattgtagagggtaggaatacaagtcctcaaaccaaacattcagagttcaatcccaggtcctttacttgctggctctgtaaccttggacaaattacttaattttgatgtgcctcagactacttgcctgtaaaatgggaatagcaataatgctacgttttagggtttttgtgaagatttgatgactcaactcatggaaaacatgtccaagaatgttaggcggataacacccggtaaattttaactatattagtattttcattctagtcctgttattagtatacactgagttccaatagtaatttacttcccacatttagctggcttctaggtaactgctttttatcacaacgtccgtataatttccttatgaacttcaaactcaaacaaatggcaagagttgtgattgtttactggttaagaacatggattctagggcctgaagccatgggttcaaatctcaggtctggtatttactagaagcgtaagtctgcataagttgtttaatgtgtctggaactcagtttcctcatcctttaagagaagaatattcatggctcctattcataaggttgttatagaaattaatagatgagttactatttgtaaagcttttagaacagtagctaaggaaaagaacttgctacataaattttcattctgaaagtgaatcttttttttaaattatgtcttaaaatcagtcttatacatacctaagattaaccattaaaataactttctgtatcacatatagtcatataagcatttaaaatggtggaccattgctcttaaaag

SEQ ID NO: 83539 - DNA, 1757 bp, Homo sapiens
taggacctagaccttcaaaatgagatgaaaacatccgtctaggcaaagtcacttattctcagcacagactcacaagcccctgcagatatgcatgggagaccatttataggctatttccaacctcctattttatagaaggagatacttagtcaacacacagggaaaagtattttttctaagtttgcactatggttcaatagcagaacctaagctagatcactagaatcttgacttttggtctagagttatttttcttgtctcagtcttcttagaaattcagagaagaaggcattgtctatatctgaacaagtgattcatacagctacattattttagctttgactagaagaatcaccaaacttttttcctcttgatactaggtttgctgttttgataacaaaagaaatcactcaagtgagtttacatacaggaagcttgctgtcattcaagagcattgcaagtgatctcacagaaattcaggaacagatcagtagggtgggctccatgaagacagctgctgagagagtccttaattgccaagatcttcagatgccttgtgttctgctatttaaatgactcagagacagaggtcacatttgtttctctttaatttgtgactggtttgctctaagccttgatttcattgaaacattagtcatgagatgtcacttggtagctactccatttctcaagtgccttgtaaccttcctattttagttccctcactcactgcagaaggttcttgttttctttcattgaagttcccaaagaaatctgattcacccacctcctcgttttgaactaggctgaaacaatcaatggttggtttatgatttagttgtcactgaactgggtgttgtttaatgagccatggcccaaagtgggaatggaagctccaggcattggaagttgtggatatggaagtttatttacaagaggtttgactaggcaagtattgaaatacaggaccgatactttacaaatttgtctgtagaagtgtagtcattgattcctttgtgctcttgtacatagtcctatctgtactgaacacatcataccatcactcatctgcttagacaacagtctcagtattgtttgagaacagtctacatattggaggtatattgatgcctgtgtatcctcagagttcaacctaggcctagagccattgaaaagttattaccaagtgaaggaacagacaaataaaaaaagcttgatgcatatttactgcttggagacaaagggaggtttacatacaggcctttgataccacaaatgacattacattatgttaagcatcagtttatcatcaccactttgctctaatcttccctcaggtatcttagctcatacaaaagaacaaatgaaaataaaatctatttctctttccacacattcatatagagtatttattcatagtcagagatgacactgcagatagcgttatttcctttatgtgttgatatatgttattcatcttaatgatcaacatttaaaaatattacaccaataaaaaggctgtcttaaggacagaatagagtacaaataataagttcttcattgcacacattgtacttaatcatgttatcatttgaagatgatttagttacttaaagagataaataatcactgaatgactatacaagttttaggtctggggccttacattggattcctgtaatattttgtggccatgagaccctaagaatgtaaagtctgattgtatttacttaaaaaataagtggaagtcacatcta

SEQ ID NO: 83540 - DNA, 1050 bp, Homo sapiens
catcaagcccttgtctgttattaaggccacctagggacaattcctcctctcattgtttataccttacaaaacagactatggggagtggttctctgcaggacattagattccagggagaatatgcagattgttattcttagttcagttctccactgcaaatctttaaagagctctctcaggtcattacttatgagtgctttatttttcccccttatagaacctggactggttgtttccatagaaatagtttaaaggggggactgtttttaaatcagggaagagagggcaaggtagatgctacaaaaattatctttttcctcttgatgcttcccctgccctctctgctttttctctataaaatgaagagtttaggttctgggttttgttttttttttcactctttattttattttgaataagttagttatcatctctgtatctcagttttcccattggtctattgaattaaaggactaatagctcaatgtctctagagtgtcattcaactctgagattctagaatttaataatacagcaaaatctccaaacttgaaaagaaatggtagaattgatattacttactcttgcaagaacattggtagctaattctactctgaacttttcccctgtacatctttccactgtttctgaaagcttaaaatgttttaggccaggcgcagtggctcacagttgtaatccaagcactctgggaggccgaggcgggtggatgacctgaggctaagagttcgagagcagcctgaccaacatggagaaacccagtctctcaataataataataataataataataataataataataaattagccaggcatggtggcctatgcctgtaatctcaggaggctgaggcaggagaatcacttgaacccaggaggtggaggttgctgtgagctgagatcgtgccattgcactccagcctggccaaaaagagcgaaactccatctcaaaaaaaaaaattgttttaaaccaaatgctctttattcctcaaacagcctcttctcctgttaaggccaggaatagcaccactg

SEQ ID NO: 83541 - DNA, 1367 bp, Homo sapiens
gccactgctgttagcatttgatcatccttctgcccacctgtgtaacccaaattatgcttttacaaagggtttccccatttgttatctcattcgaccttcaaattaacttaggaatgagggaggtcaggcatcatttgttgtttttttcataaaaggaaacagagactcagagaggggaagtgagttgttagttgtcagtgacctcacagcctcctgagcagggccctcctccctgtaccatgagattatgagcactgaagcaggaattcactaacctgctgctggactgagacagggagtctgttggttatcaagatatcagacatggtttcattttttctttttttgtaatgcagcagagctgcttttcaaagaaaaattgtgtggaattcagctatctgttctatttactatggagtgtggagccagttggttcagctcttcctggcattgtgttccctgatcccttggttttctagtatattccaaagatcttgtctggagagccactcatgttacccagcttttcatttcacagacaggaaaactagattactggacattacacaatgagttagtggcaggtctttgaatgcccagcgctatattctttgcacaccgtcattcattgaacagatgttttatgcttcagatgagggtttttagtacctgagaccaacattgactaatagaactttttgtaatgattgaaatggccctggagaatttgaaatgggattagtactttgaagaactgctttttaaatttaatttaaattttaaaagccacatgtgcctagttgctaccctattggatagtgtagctctaaaccagtggttatttactttggatgtacaatggaatcacacagagaacttcaaaaatactgattcctgggtttaaattggtttagagtaaggcctgggtaatggaatttttaaggtttcccggttaattctaatgtgcagctgagtttgagagaaaattaatctaaatcttgagactccctgagggcagaaaccatgtcaactttatattctattgactcctgtgacaaggaattcagtgaggagttagctgttgtccagaatctcagggaacttaatatatcctgaggaagcagaagacataaccaggggtaaagtactgagaaagtgcccttatcaaatttcacaaaagtacagtgtcatccaaaggaaaggcaatattcacttctacctgagagaggaaagagcagcgtggtcttcttgctgtaatgattctgtcagaggcattccaaccagagtgactccaccttgaatgggattgggtaacctgagtctgaaacctgctgggctgcatccccaggagttcaggcatccttagt

SEQ ID NO: 83542 - DNA, 1050 bp, Homo sapiens
cagagagacttctctggggaggtgacattatttattatccctgggaaaaggagggagcttgataaataattttaaagatacactagccaattgagtgaatgtttattgagcacctactctgtgcctgactttaaatagggaactgaggctagggtatttaagaaatctttcttaagaaaggcctaatctcgggtggatcacgaggttgggagatcgagaccatcctggttaacacggtgaaacgctgtctctactaaaaatacaaaaaattagccgggcgtggtggtgggcgcctgtagtctcagctactcgggaggctgaggcaggagaatggcgtgaacccaggaggcggagcttgcagtgagctaagattgcaccactgcactccagcccgggccacagagtgagactccgtctcaaaaaaaaaaaaaaaggaaaggcctaatctatagaggaaagacacacacagaaataaatctttcttctattgtaacaacagtaatcagaagacatatgtgggattcagggacattgatgtgctgaggtacgatcaacagcattcatagaaaatgagtgttcaaatggaaaagaaaccgccaacattatttttaagtaattatatttcttctgctgagattttacaataatcatctcacttttctggaattaatactaaataaataggtggaaatatttaaaaattagatgcacaaaaatatctatcatggcaaaaatcaaaacttaaatatctaacaaaaggagatttcttaaataaattatggtatatttttatggtggactaaattcagtcactagaagtattacaaaggagttgtagctacatggacatatgcttaggataaaatgttaagaggtacaaggtaggccattgaattatgtattcagtctgacttcaacttactacactcatacttacgcacttatgcgtatatcagagcatgtagagaaattatggcaaaatgccagcagcagttgcctagggctggaatttaagtttaaattttaaattttattcattttcaattttta

SEQ ID NO: 83543 - DNA, 1021 bp, Homo sapiens
tccaataggacaaaggaaaaaaagttacaaaacaaagggacagagttgtggccaatacgagaagcactctgaggctccagctactgaagttccttaaatgtaatctctgattccaagttttagagttggccagtgggctctggaattcgaacctctgtgaaaaactgaaatccagcctagtacaaaaggaatgtgagtgcttttcagtagagaccagggaaaggcatctgaaaggccaggaaactttgcttgagtaaggattatctttacatcttacttttgaaacattgtaaattaagacattaaaatgtcttgcaggcatgcactattattaataaaaattattactatcattttagttgttacttcagagtctgcataaactgggcattttatgacattgtttgaaagaataaaccaccctcctcacccctgggaaagggggaatgaaggcaggccttggaaggattgagactggataatctggcgagccccagacatgtagatttattcaaatggctgcttattgctgcctaggaaaataagcttttaaaatagttctaactgaagcagtggaccatcttgatagcacttcagaactttcattacgttcagcattcttatcagaacaccagacagtaaaattactagaaacctaaattctattttcaattaagatgcaatcttttgttaatttgaaaatttaaaaaaaatagttatggcgcaattttttttatgtcttagaactcatgttccctctgtagagtggtggctgtggatgtgcatgtttgattgtttatttgtgggaggagggggcaggggacagacttggagagccacgccatgatttgggggaatacggatcaatttcatgctcttttaatgcacttgtcttcataattcatggtttttcttctcctttgaatagaattacatggctgctttgtaaagattctggtttggggaccctcatatgggaaacgccatgacattgacctcgtggtctgatttacaatgccag

SEQ ID NO: 83544 - DNA, 1595 bp, Homo sapiens
agtctggtctcaaactcctggcctcaagtgatcctcctgccttggtttctgccaagtgctgggattacaggtgtgagccatcgcacctggctcctgtgtgtccttgagtgtgtttatcttttatatgtgtgagtgtgtgccagccagatgtgtgcccctgagcgtaaacatgtgtttacatgtttgttgcatcaagaaatttcttccaggctatgtttttttttttttgttgttgttgttttaaaaggatccctcctgctcccttctctgtccattctgggctcttggctgacaagagctagtggcccatggaaatgctcctcctgtggatggaaaagaagagtgcaggccacaccttggagccttattctgcctttgaccttggtatggttgtgggcagaatggcatctcagcacttaccatgtgacaagccatcggggcagaggcctgaagaggggtcgagctatgcttgggaggagtaggacaagggatctttcctcatgctgtggagtgatgaagaactcgaaagtgatggcgaatgcttatgggccagacatgggttcacatctgtttcagcatgtgttagctttgtggattttaggaaaatcatgctctgagccttgggctggatcatctgggtaatggctaggagtatgatgcttcatcgtaaatccgataatgggaagctgctgcagtggaactgtccccaacttttttggcaccagggactggtttcatggaaggcaattttcccatgaacagtggaggggtgttttcgggatgaaactgttccacctcagatcatcaggcattagtttctcataaggagcgcacaacctagagctgtcgaatgtgcagttcacgatagggttcgcgctcctacgagaatctaatgctgccactgatctgacgggaggcggagctcgggtggtaatactcacttgcccgctgctcacctcctgctgtgcagccgggttcctaacaggctacagacccatacctcgtccatagcccaagggttgaggacctctgccatagatgcttctgtgatgatgtacgtgttctgtatctgtaatggtcaatatggtagccactacctgcatgtggctactgaacacttggagtgtgctagtgtgactgaagaactgaaatttcaggtttatttaattttaattactttaaatttaaattcaaacggctacataatgactaatggctactatatcggatccaccactagatggcagcactggagaatgtcaagcaatgaaagtggcacaatctaatttagtgtgaaataaagtgtgggcaactcttttcccccaaatgtattcttttcttttggtccatgaacttcaagccttggagtgactgaccttttttacagggacactagaaggcagcaatggccaatctcttaatgcccaatgcacagtgtttcttaaatcccctggtgatgttttgcttggctgatgcctagcaaggctggggggaatggctgggaaactggctttgctgagctctgtcctctgccagagctggaggaaggtggggttatggatgctcttcaaggaaagccaagtcagcttgtcact

SEQ ID NO: 83545 - DNA, 2347 bp, Homo sapiens
tgggcagttgttgagggtgatagggtcttgctctgttgcccaggctggagtgcagtggtgcaatcatgggtcactgcagcctcaacctcctgggctcaagtgatcctcctgcctcagcctcctgagtagctgggactacaggcacgtaccaccaagcccggataattaaaaaaattttttttgtagagatggggcctcactgtgttgcccagactggtcttgaactcctggactcaagcaacctagtgttctatatgcatcagcttacccactgtctctctttctttgcaagacagtggttctcaaagtgtggcctcaaccagcagcatcagcaaatcctggggtaccaccccagacctgccgaatcagaagatctgggggtgggacccagcaatctgtgttactaagagattccagtgattctgatgcatgcccaagcttgagaactgctgccctggagcagagatcctcacttcaggctgtgccctggaactgcctggccagctcccctccccacatccaagtagtatctggggaaggcacatgtagagattctgatttaattggcctggtgggggctggacttcactattttattttttttgagacagagtcttgctctgtcgcccaggctggagtgcagtggcacgatctcggctcactgcaacctctgcctcccaggttcaagcgattctcctgcctcagcctcccgagtagctgggcttacaggtgtgcaccaccacaccctgctaattttttgtatttttagtagagacgggggtctcactatgctggccaggctggtctcgaactcctgacctcaagtgatcccacccaccttggcctcccaaagtgctgggattacaggcgtgagccactgtacctggctgacttcactattttgtaaagctccccaggaggttaatatgctcccaggtcttccagcattaccttaggaggtagctacctctcttagctccattttgcaggtgcataggttctgggagattaaagggcgtgcccaagttatatagccatgtaaagggatggggaattctaaatccctgcctttccacttcccctccttcctcccattcattgctttttgctttatttagaactgtgtggtttcccaagcaactttctttggaaaattaaacaattcctgatgtcgccatctagtggctagcgatgagaacagatgagcctcttctggacttggcaagacggggctcctggaggacacacgtgggaagaggaaaggccatcattcatagttgctcaggcagatgcttttgggacacttgggttcattttcccaaaaggtgtcctttcagaaggacagtggaatgaagatgggtttcgtgtttaagagctattgggagttcactcatgaaccccaggagaagcatgaggtgtggtccccaggcagggggaggcacagagggatccgggatgagggggattcacctgggcaggagagcttgaccttcctgcaggggctggctcacctttgcttgggcactgactcattccaccatcagccactgtgggccaggcccgaggctgcactcgccttcagacatcaggggagaagcacagaatattccaggtgctcagtccttcgtgatccaagctggtctgttcttggccatgggcagaagctcctgtggaggctgatggggcgaggagagggtcttgcctccaactgggggaactgaggtggctgtgggggagggggacagcttcttggagcctgtgcccagggtctaaataggagcccataggtatgactcaaatccaatggctgctccccaccctgctggctcttgtggggccagacaagaggcgccagaggatgtctcaggactgatgtgcttggggttctcaccatggcagggcacggagagaagtaaagctgtctgagaaaggagggagtgactgactacgctcagggcactcacagggtggaattcttttgtaaaaataaatctcagtggacaaaagagatttaagggcttgtactattggaaggtaaagcctctagcctggaagcttaccattagatgtcgtgtctttgcttcttcatgtaaacgctgttttagcatctgttgtgtatcaatctcatctgattgcagcctcttttattcccaaacacatactcacatctcatgggaggcaaaaatttccaaggaatacagtttgggacacattggccccaagggaggtctccagtggtatgccacaagattctattccaggcccatctagactagcattcttttaaaaaattaatgaatgaattaattattgagacagtcttgcaatgtcacccaggctggagtgc

SEQ ID NO: 83546 - DNA, 1030 bp, Homo sapiens
cgtaggctctgttctgagaggggtccccttgcacgttctcccagagcccatgttcaagccccagctttgcatttgttacatatgatcatgtctggtttccagggcttgtgtttgatcactctctgtgtcctcaaactcaacaatggggctaggcactccaaagtttcctaatgcatgtattgagtgagtagctccagtcttgagaccagatggggaaatggcagggaggccttgcgatgcctcaggagagtgaggcctctgtcttgggtggtaatcaaggagagcgtgggtggccacctgcctgagtagctgtaggagggcttttttcccaggtgagggcctggccatctaccaatcagaggcttgacactcagctgtgatcgtttctccttcccatacctttctagcactgaccccaaaagcctcaatcacactcaacctaggacaggaacaggtggtaaagcacaaactcgggaccttagctggggctagaaacatgcccttggggcaggtgtggcccatgctggtggctcttgcagcctactagccttcatcaggagggagtgagatggaggctctagtgtctgggccagtgtgtcatctcactcttgagagccaagcctttgctgaagttcactgtaagacgctcccctggagaggcacgcactggagtgagggagcgccctaaggctttggttggacatgcatgcttcctgaccctccgatgtgagaatgtggggtgtggagacaagagtgactccatcttggatgctgatatagtttggctctgtgtccccatccaaatctcacctttaattgtaatccctataatccccacgtgttaagggcaggaccaggtggaggtaattgaatcttgggggcagtttctcccatgctgttctcgtgataatgagtgagtctcatgagatctgatggttttgtaagtgtctggcatttcccctgcttgtactcattctctctcctactgccccgtgaagaggtgccttccgccatgattgtctgtttcttg

SEQ ID NO: 83547 - DNA, 1029 bp, Homo sapiens
atcacaggcgtgagccactgcacccggcctactgtagtagatttttaaataagtacagcttatttttctccctcattatggaaaaaaaggagggtagaaagtgatgagggaaaaaaacaaatcattcatgagcttacagggtctcactgtgttgcccaggctggtctcaaactcctgggctcgtgtaatcttcaggtctcagcctcccaaagtgcttggataatagacatgagccaccatacctagctcttgtagtacattcttaagtgaaaacctcattggaaatgtagattgccctagagctgaaagcgatttggctctaaccttcctttttatctgcctgcaaccttctgtgcccttccctgccccctgctgcctgcttccatctgtctgtctccagctgtgaaaggaggatgctgctgaggtcagtgcagccttgtgacccatgtgtctaatttccaggtgattgaggctgaccaccacatggagaggatgttagaactctttgaacaaaatcgggatcgaatattaactccagagaatcggaagcattgcccataggaggcaaaaggtctatggctcatgtctgaaaaatgcctgctgctgccaagttagctattgggagcaatctggaaaaacttgctcccaggagggctttgtgtctggccagcttgattttcctaatggtctcatctcctttgctagtgtctttgtcatgcgtctctggccctcgtgggtaaatgacaaacgggaccaatgggtttgccaagccctttgctgttcgcagcctcacattcccccggtgcctctcccatggctttgtgctgctgagtcgctctcatgaagcccttagggagagcacctgttgtgtgcctgacaccacgctggagctgtgtaccaatcgtctcagccttcattaggaggccgaggtaggagtcttatatcccaggtgaggaatttgaagctcagaaaggttgaggggctccccagaggtcacacagcctgtgtgcagtggagctggcaccattc

SEQ ID NO: 83548 - DNA, 1034 bp, Homo sapiens
aggcatggcggtgcgcgcctgcaatcccaggcacttggcaggctgaggcaggagaatcaggcagggaggttgcagtgagtcgagttggcggcagtacagtccagcctcggctgggcatcagagggaaaccgtgcaaaggggagagggagagggggagggggagggggtcctgccttttgccttggctttgattcaggcgccaggggaagggccagtgtttgtgcccacgaacccccagtggagcagagcagggtggctggtgacacttgtgctgttttgctcagcctggccaccgagtgtgtggctgcgtctgccgctgtccacttgagccaggtttgctcttgcagggttcctttgtctgagtcactgcccatggtcattgactactttgaccccctctgcttgacacccttggtaggtggggtctgctctgtccactcccgacagactgcttgtgtttccctggcaggaatacctggaagcaattcaccatctccatgaggagtggctcatcaaaggcagccttttccccatggcagcccctgttctggtaagtaagactcccttacagggtacgagactgttctagaaagaggagtgacccggggaatgtcagccaccttgcagacaggggagggcacagtcctttagagtttgacaacttagaagaaggaaggtgggaaggctggtgctctctctcccagtgcctgtttctgggctgagtctcagagtgagttggccagacccgagggaaggcagtctgtgccagtgccatcacacctggcagttgtcactgatccagcatcttcagcgaagactctagacccgggtctcagttttcaccatttgggatagtagttcctctgatgtgaccttcctccttccgtggatgacacagagcctcatttcacctttgtttggtgactcaggtcatcagaaggaatgtcattgtctggtctgggctgtcacacagtgatgcccttaggaatgctgaggtgtgtggaactgtctgccctgcccactaatgtctctgc

SEQ ID NO: 83549 - DNA, 1050 bp, Homo sapiens
cgttgaactccaacctgggtgacagagtgaggccctgtctcaaaaaaaaaaaaaaaaagaaaaaagaaagaaagaaaagaaatatatatagtttgataaaaataataataaacattatatagcccttgtcctgctgtgttcatgtgctgctgtgcaggaaagagttaacatagcagacctaagactgctgccctttagaaatgcctgcttgcaagggtggtctttggctggcatctgggaacttagatcttgggagggcccccaccattcctaactgataacagtggctctctgcttaaattgtttctgcaaacagtatggtttatgctgacacctgctttcttcctgggagtccggaattttggtacatgtcaggaagtggttgtctgcatggctgagcgctgatgaaaaccctgaactcccaggttcaggccagcttgcctgctagacaacatttcacatgtattgtcacatcttgttgcctggggaattcagtgtgtactgtgcagctcctctatgagaggacccttggaagcttgtgcctggtttcctccagactttgcacctgccctttttccctttgctgatccttttttctttttcttccttttttttttttttttttttttctgagatggagtcttgctctgtcacccaggctggagtgcagtggcatgatctcggctcactgcaacctccgcctcctgggttcaagcaattctcctgcttcagcctcccaagtagctgggattacaagcacccaccaccatgcccagctaatttttttgtatttttagtagagatggggtttcaccatgttggccaggctggtttcaaactcctgacctcaagtgatccacccacctcagcctcccaaagtgctgggattacaggcgtgagccaccgtgcccggtcccctttgctgatcttgttttgtgtcctttcggtgtaatccatcttagctgtgagtatgactgcgtgttgtgtcctgtgagttctcatgaatcatcaaacctggggaggagggggggcttggggactcttgacccc

SEQ ID NO: 83550 - DNA, 1141 bp, Homo sapiens
acaactgagatgtttctaggatgatgagaaaaggagctagcagaggacagattgaaagtacaagggggaacggaggtacttggtggaaaaacatcaagagaactgatgtgggaagtgatagtgtcagaagcacaagaggaataattaattggacttaaaacagagaggaatacccagtcctctaaaagacaaagagaagtcaatatcatacactttaggcatggctgttttatatgtgtgtgtatatggcagaaaccccagtatctggttatttttgtttatttggagatgaggtctccttatgttgcccaggctggtcttgaactcctagcttcaagcgatcctcctacctcagcctcccaaaatgctgggattataggcatgacccactgtgcccagcctattattttagaaattgtcatttttacagtttaaatttgtattcagttgtcactgaataaatcgtgggtttttttcttctaggcactaactgtgacatctatgaccttttttatcatcgcacaagcccctgaaccatatattgttatcactggatttgaagtcaccgttatcttatttttcatacttttatatgtactcagacttgatcgattaatgaagtggttattttggcctttgcttgtaagtgttcagtttcatccttaaattttactttttcctaccatagtgagatattctaatgaactctgttttttgcttctcttaaacctttaaggtaatctctgttaggcttaggaaggaggagctctacccattgctaatgtgccctgtattgctttgggagagggtctcaaggatgcagggcagccacagagcataagttctctgcaccatctatcagtagatgtggctgacgcttctgttagaattcacttggatagatcttctaaagaaatttaaatttaggaccatgttaacaaaattgtagtgcattcttaatctttattacctatttggatgcatgttaatatggcctcaaaattgggatagagatggagacagatacacaagtatctatccttgcacatctttggtcactaaatggaaaatcaaactaattggggaggctaaagtacaatgttatctcacttgaaaatatctgtagttattactaaataat

SEQ ID NO: 83551 - DNA, 4233 bp, Homo sapiens
tcaagtttgcagttacatctgtggttcttggaagctgtcctagtgagtcagccttgggttaagcctgaggagaccaagctccaacacctttgtgcactcatgtacgtgaattcttgcttgcagtgaatgagacctgaacaaccctagtgggtgccatgtcctgcgtgtggcccaggcgtaccttttcttgtagattcacatgagaaacccgtcacctatccatgtgctctgagaggtggactgaggtctaatccctttctgtgccagattttctgtgggttggtcttagcacctaggagatgaatagagcatggagacacctgaacaatttagtgattctgcaaggcagtgatgatttaagggttcctattgtctcatctgtgttcaaaacaaaacagtcatgaagtctttgtgccactgcctgactgtcatcttctccagatcttgtttacagagtaataatgacgttaaacaggtatcagaaaggggaaaaagtttctaggccaagagctgctggtggattctcttgagcagaataacaagttgcttcctgctccagggactgccattagcttgtgaagtctctaggtgccttgttatttcctagtgaagttgcagaatccagggttttttccaggtttgtcttattttatcagcacccacgtccaggcccaacagcttggtaggctggtgaggtccacacacggccaggtctgggagataagggaggaagcagtggcctggaacaccccacctgtctgctatcagcactagacagctcaggctgtcttggaaacgtgtactttgttaactgccttcctgtcctcttgtctttgaaagctgtctcgcgttccacagtcagcttgagggcaagagtgggatgctggggacaggtctttcccgtcctgtgggtgagctcctggcatctggctcaggaacatgtgggtccagcaggtgactctgaagctggcttggctgccatctcagacaggacgcaggcctgacaccctcagcttttagctttgtaaacttccctggcgctttgtagaatcttgtgtttcttctcttctcagcagatatcattcaagtcacaagaactgtctggttgagaaagtaatttaaaatatttgaccttttatgtttcttttatttagaaactgtgagagaaaataccgtcaatatctgttaggtctagaaaaattttcttccgaaagtgaatgttctgtttaattcttcttcatgcaagtgagtggcattttgtacactctttagcttgaagcggagtgggtcctattgtattttcccttcttttgtctggaatatattctttttccatttggatacagtttttcaacctttgggatttttttttcctttctagtttttcctactccacaaacgtaacagtaaggaaaaaatcacccacaaacctgctgagtttgaatcactggcaacttgcctagaaaagttcagatgatgggtccttgaactgtgtatctatttcatagggtaagtttgttgtctatgtttgtttttttatgctgaggctttaattcaggtgacttgctatctagacacctggggtggcgtgttttctttgggatgcataatacacaaaggccagggagcctttggcttggacccccagggagctattgaaacttttaaagtttgagtttaggagtaagaacatatctcagaccaccttagtcagctttgctgatgggatttagggccaggtcagagtttcttttcataactgcctgaaaagagagatggtgtgaaacaagattctgataatggtttgtgtgagatttgatcatagtctaaaactatcacgtctgagttgccttaggatgacagtgctgacacccagtaggaagtatcccatttttatcaggaaagtcagtcacgcgtagggatggtgaggagacgcgtagggatggtgaggaggggagaggagggagacctgctggtgcccttgcaccagggtgaggcctgactcacgctgcttccccccacaggccctgctttgcttgcctgctttttccagaatcgattttgcaagcttcaagattctgttcccctcttcgcagaagtgaggaaggcaaatactcagggtttgaagggagacctggccggcctgagggctggcagatgtgagggcaggacacctgggatggactcgtaggctgacccaggcccaaagggggctgcctgttcccaactctttcactctgtaacccattttaaaatgagtttttgaatcttgcctcaaattgacctacttggataaaatcagtgcttttcctaacttgattttgtttgacgtggttccctctaagagaatggtaggaattgaaactatttgtatatgttgaaatttgtaggggttcaggaacccatggcagaaacactaaactatttatttacaagtatgactatttttttttcaaagtaggcaattctttgtatattttaaggcaaataatcacttcacctctggtgccttccatgcgtcgcataagcactcttgtcaatcatggaattggaaaaaaagatgtacatttagttaaacaagataacactatttttgtagcatgattttagattgtgtccttttaatattgttttcaacaatggtagttttgaggttttggccattttctctttacacttcgtatgtattttaaagaagaaaaaaaacaaaaaaaattccctggctattcctctttcctctctgctgctgcttctcctgcatcttgttcctgcttatttaaatagtctgagagtaagagtatatttctgtgaaataattataagtcagtataattgcatttggcattttttaaccacttgctcagtttggagccactgctcacctcaaacagtacaaagaaagtggttccatattttacaaacagaagagtagcatcagagccctgacctcctgtctttgggtgtaaaatggtgagaggccggtgtccggctccttcccctgtggtttgggctggtgaactgagcccaagtgtattctctggcctgggccccttccagaatcagtgcgagcgtcctgcagaggcatggccttcctgccactgcagagtgggaagcttcctgggggacctcagccagctccggggctctcatcttccactcggatctcagattggttcgttgtggatgctctggctaggctcggcggccttttccaggcttcaggcctgaacaaaacaggctgtttgctgtgaggagctagatgacaccaagacacagacacgtactcttcaccggctccttttgcttctccttcctgcaggacgtgagttatgtctggtcccaaaacccttgagtaaactagctgagccattgcaaatgaaggtacagatggattgaaacataaaattgtagcttttggtgtccttctgaagggtcagaatatgtaattatttgataaccaaggaagtcaagtcagatggctaagtagtaactttccaatatgatttctccgtggtacttcacctggtggcacttttggggggcaatgttaacaactatcacattttactcatcaagtctctttcatttcggcagtttaaagacacaactgtgggctttctgaggcgatgcccgttgggcaaacttaggtttatgtgtttggtttttcagctgacgtggaagccctgggtgggcgtcccctggctggcctggcttttgggttcaagtctgtatgtatggagtgggttggggccccaaagctttgctgctattgatttgtccccgacagcaggcaaagcctcacattgccctcaattttccccctttcatttgaaggaccagtttttcatggtacttgtcttgatctttttcatagtgttcaaatctgtatttttgtatgtagagggaaataattttctcaacactaatcgttaataactattgtattaaattgtcatgaaggaacttgtttaataaatggacgtgtaaggatgtcgttgtctctcctcactctgagtggcctcctctgccccttaaacgttacggatccagttcctgaaatagggctgctgtgtggaggttgaacagagccacgatcctcagggtggaacaaggcctctgtgacaccagctttgccgctttgccagggcttacaaggtggaatgtaaattccaccaggggcctctccactcctgcacacccagctttcttacccattttcagcacatgtggtgt

SEQ ID NO: 83552 - DNA, 1067 bp, Homo sapiens
gtccctgtaactatttaatatcctttgtgccgtgaggctcctcggtggttttgtaaatgttctccttgtatttaattaactcccactagaaccggaagtggtgctatggacgctttctagttgatgtaatgtgtggttgcacatgtcatcatgtatagaccacgtggtgacgaaagttctggagggaatagggttatccaaggtgaatatgaagacgcctatatttttcttatattgcctctatatgcaaacagaagacaatcgatatctgggggccttaaaatgacctcttggcaaattgaaggaagcgtttttgcgtttaatagtttcaatagggaccaatatcagtttggtttggggcatttgaaggctgagcgaccttagtttttctcagtgttctggtgggacgatattggttttcacatttaaagcaaaacttgaagaaactgcagttgctgtgtgcatttgggttttttcctggacactgtacagctgaaaccctcaagcatttggtggaacctctggtggttttagatggatgcaaacactgatgtcctcagagaaagtttattttggcactgattgggtggatttggtattttttccctctgattctctttgatatccttctttcacactgctgaaggcatgggagggaaatatgttttccctgccttaaagagggattacagtcatgaaaggctggagatacttgttggccccacataaagctgggaagaacagatgcagtttcagattaaaatctcgtcagagaagtttgatttgaagtaaacagccatccgagggaggtgacttttgtctacagaaaaagcaagaatgtggcagcctgcacagccccaatacacatcttccttggcaatgtgagctgaagccagcatgggcaagtccggcccagctctgagcgcttggccctgggaagccagcggcacccccagcccttcgggccctgttactgtcccctggcaggaaggctcacgcctgtgggcagccagggaatgtgtctgacctccaccctatgtcgggtgcttctgggacagcttcgtgac

SEQ ID NO: 83553 - DNA, 1890 bp, Homo sapiens
ctgtggtgtgacagccacacatccagcagggctgggcacaggcttccctttgactctgagccaccccgtcatatgtatttgaaacaagactttagatcaaatggggctgctgagagggggaagagatcaaggaatgaaggcacagggttgtaatgatcagctggcagagcaggaaggggctgcatgtggcttgggtcaccacagaagccttgaggggccaggccacgtgcccgaggactaactgtgctggtgtgtttttagatatttggcttcttggcgactgcggcatatgcagtgaacacattcctggcagtgcagaaatggagagtcagcgtccgccagcagagcaccaatgactacatccgagcccgcacggagtccagggatgtggacagtcgccctgagatccagcgcctggacacgtgaggacctgcctggatcctcctccctcccgtcctcgtgcctgtctctcagtcaagttttctttcccttgtcctgtcagatttccatgtgattcagttgaattttgtcctctttggtaaaagttcattttgggaaagggtttcccgagtggcccagtgggcgggtccgcggtggagttgggaggcccacgttcctcagcgtttggggctgtggagcagccggcgtcactgcccaggtccacttgaggtcttacctgccctgaagcacaggcttcctttgactctgagccaccttgtcgtgtgtatttgtaacaagactttggattaaatggggctgctaagaggggggaaatatgaaggaatgaagggacagcattggaacggtcagtcggcagtggttctcaggcagccttaggcaccacctgctccaagtcagtgttgagtctgcgtgctgggatccagcccactcctcatcttccatgccagggcccccaggcagccagcaccagcccaaaggccacagggctggggaaagctgatgtcctgttaggatggctcccagggacctctgactcaaggaagggtgaccttttgtttcctactctgctgagaaatcacttgattcttcctcaaatgaatcaccttcctgaaccccagattcttctccaggaatatgggggccatcttgttatggggactatcttgttttccagtttcctgcctaccctaaatactttgaggctgaattgcagattttcagtcattttaccttctcaggtaaaagccatgaaagaaacaagcctactccaccagccaaagcacttgcccatttgctggcttcatgaaccgcaggtgggaggtgtttgtgttaaaaaacagcatgcacacgcgtgcgcgcacacatgcacacacacacccctctattttagggatgtgtgctaattttctaaatgcctgcaaagagttctaaaatgattctgagcagattcgtctaggatttgaaaatacttgaatttgcaccagaacacacccttccacccatgtttcagaaggcactaattgtcgctttgggcgcctcagtgtcataactgtagacatcattcttgggagttgttggggggaaaaatcctagctacttaaggtttctgattgattcttgataaagtgaagattattgtgtgtggtgaatgagttcagtgagtccccatgatgcagtagtttttttaaaaaattagagagtaattatatcttttatggaaaaaagttgttttagtttgtcaggttttccctctttgaactgtttttaatgtttacaaacctcactttagctctaacattttgtgtttagccctcaccaaaaagcacttactgtggcaggaagattttgcagtaacatggagaaatccccaagatcaagtgctgacaaatgttgacagctttagcagcgtactgtgtaataaataactcc

SEQ ID NO: 83554 - DNA, 1051 bp, Homo sapiens
aagtaacatctatatgtggacatacctgtggaaacactatttagcagaaaaagtgggctggaaaataagatatataataggtattttatggtttaaataggtgtaggttataacatgttattttcttattttgtatatagcattttgtcatttgtagagcccttttacatatatttttgtttggattttgaacacagtgaccatttgagatttggaaaggaggcaggtataattttatgggtgagaagctaatagggaaataacatagtggggcagtaagaactggagagactgagaatcaaatcttggctattacatcctggcaccgcttcttgctatctatatgtcacagaaccttaatttccttatctgtaaaatggggctaatatctacctcataaggttgtactggggaactaaatgataaaaaacaagaagtgcctataaggtgtttgatttgtatgtacctgtaatcaatgagtaatgagtagaatattaatgttttataacaacaagagttttccctccctgatatattatttattgctgcataactaattaccttaaaactttgtgacttaaaacaagacatcttaggcgggccacagtggctgagaccagtaatcccagtgctttgggaggctgaggcgggaggatctcttgaggccaggagtttgagaccagcctgtgtgagaccctgtctctacaaaataaagaattatctgggcatggtggtgtgcccctgtagttccagctactcgaaagtttgaggtaggagggtcacttgagtctaggagttcaaggttgcagtgagctatgattgcatcactgcaccccctgggtgacagaggaagaccctgtcttaaaaaagcaaacaaacaagaatcagatctttcttttcttttcatttctgtgtgtcaggaatttggggggtggctttgctctggttctctcaggaggttgcagtcaagcttttggctagggctatgtcatctgaaggcttgcctggggctggaggacctatgtctaagacggcttgttcaacatggctg

SEQ ID NO: 83555 - DNA, 1050 bp, Homo sapiens
gggactacaggcacctgccaccacacccgactacttttttgtattttttttttttttagtagaggcggggtttcaccgtattagccaggatagtcttgatctcctgacttcatgatccacccacctcggcctcccaaagtgttgggattgcaggtgtgagccactgcacctggtcaaaagggcttttaaaaagtcctgaccaggctgggcgtggtgggtcacgcctgtaatcccagcactttgggaggccgaagtgggtagatcacctgaggtcaggagttcgagaccatcctggccaacgtggtgaaaccctgtctctactaaaaatacaaaaattagccgggtgtggtggtgcacacctataatcccagctactcaggaggctgaggcaggagaatcgtttgaacccaggaggtggaggttgcagtgagccaagatcgcaccattgcacttcagcctgggtaacacagcgagactgtgtcccaaaaaaaaaaaaaaaaattcatgaatggtttcaaaacaagtaaggattggttcttagaggtcactaaaatttaactcataacctggatgtttcaaaaaagtgtccatacatagggcatttaatttttttttctaattaaaaacacatatactctttgtagaaattttggaacatgaaagcgggctcaatgaaaataaacctatccacatttctaccatatagatgggtttactatcaatattttactatagattcttcctgaatctataatatatacatgtgatatatttacatacatgcagttatatacaatgtgtacatatatgtgtatatattatatgcatgtattataaatacatatatgtatgaatatgtatatttcttacatattcaaacacgacaggagtgttaattaaaaaaggtaaaatctctgtgattcccctgttccccacctaatcctaatccatagagaggtattgattttttactgtttagcttaaatccttcaatgcacataaatgtgtttgtaaacacaaatatgcttattttttgttcttcaccaaaaa

SEQ ID NO: 83556 - DNA, 1044 bp, Homo sapiens
ttgtttcctctgtcctctacatgtgctttgtttttgctccattactaatttaaacggtctgaaaatttgactttttgagcagggtagcattcgcaataagattctgtgggcaatctcttggcaagaaagatgctgaccgtcctgtggttttctgaaatcatgtgcagttatatcatcaaaccacataataaggatttctggattttcttttaaaaataagaaaatgtttcgcactttattggataaccctgtttgtgtgctctaagtagttagataccaaaaaataaacctattttaattggagcctgtgatacagtatccagccgttgttgatgggtaacctgtggatttaatgtatgcgttagagcatgcttctaagtatgaaaatttacgttgaaggtgagaatcttgccaaaaaattgaattgaatgcaatgtccaaagttcaactcttatttatggctttagaattccaaaatatcaaaattgtttacacagagaacccgcttgaaacatctgtcagggacactgattgaataggccttagtgacacaggccacacccagacccaaccaagctttctggggcatcaacaacccaatgcttctgtcctcagtggaaaacggtgccttcaggggtctgcggtaagcaccacttagagtggagtgtggcctcggaggctggcgggctttctttgagagtgcacaccttgctgccgtctgctgcaccccagccttgcctgcgctttgttttctttcaccatcctgagtccttggaagcctctccctttgaccccatttctccttttcttgtcaacaatgaggaacttacttgcctccacctcttggctcctttgctcaactaatcactgttgactaattagtcctgctggccagcccaggtggctttagctcctgagggccatctctgcccttccagagcaggtaattttctattacttctttgctaccctcaggtcctagcttgggcactgctagagaaaagcaatgaaaccaaagatcacatgcaaacaccttggttgcag

SEQ ID NO: 83557 - DNA, 1239 bp, Homo sapiens
tcgtgaagttattgtgcgcctcccttgttttacaggtgaggaatctgacccctagagaagttgggactttcctgtagctaccccgttgtttggtggccctgggagctgagcctcagggtcgcattctttccccatgctttacttttgctgccatagggatggaggtttgatcctttctgtgaggcaagatgtgggacagttctgtgatttgtgatcatctttcttgtccgttatatggttatggggagagacagaattatgaagagccttaggcgttttttggaatagtagtttaggaaagaccgtatatgacacatcaactctttgtgatgttctgtgtaaagagcaagtatttaaccaactcaggcaattgcccaagtgaatgtactggggcaggcaattaattgactgagagccccaaagtttgtattgcaacaaaatcctggtgttggatataactttgccttactgtctatgatagtaaagtgagaacaggataatttgacagcaaatttgtctacattcccgttagagtgtgatttatttattttttttttagctgggcatggtggcatgtgcttatagttccagttccttgggtggcagaggcgggaagagtacgaggagactgggagtacgaggttacaagctatgatcgcaccactgcactccagcctgggtgacagagtgaggtcctatcttaaaaaaataaaataagtatttaaaaaataaatagtgtggttttagagctggaactggggaaacaggcccccacttgtcgtgtgtaaataatttgcacggctgttcggtcctgcagtgtgtggcgctggtggaggtggtggtaagtggttgctggtggtgtgttgctcaaagatggctgaggagtcactgtgcatgtccatgtctcaccttcactagatgctttggaaaagcttcagctgttggtttgggttgggggcctagggactgtcaggctggttaaatgagtgaagcccacaagaaatgactaactgctaggtcgcagggagcccagcagggccaggggtctgcagaacttctcctttgtgtctttgcctccatggagttctgtaggtggcctgcaggttttttttttttttttttttaatgaataataaagtctaccattgtgtctcagatcagatcaatataaaggaaaaaatttttgttaaaattctggctgttggctgggcgtggctcacaccggtaatcccagcactt

SEQ ID NO: 83558 - DNA, 1011 bp, Homo sapiens
atataaatctcacaaaacatgtatagaatctgctcactgaaaactacaaaacactgaagtaagaaatcaaagatgaccaaaataagtagacaggcattctgtgttcattaggattggaaaactcaatatagttaaaatattagttctccacaaatgatctataggtttaatacgatcccaaaatcctagcaaggtttttttgtagatagaagaatgctgattctaaactttatattagccaggcaaagggctagtgatggtttatggaggtatgttccagggagagagaacaatgacatgaagtcacccttgtttagggtagaatgtgtgtgtgtgtgtgtgtgtgtgttgaggggagtgtttctgagagtatgatggacttcgtatctcttatcggccatgagacttttggcaagctacttgttcactcaggccacaagcagatctcctgcaggtctctcacttggggattgtaagttggggataatggtagtattacagtgctggtgagcccaccatgctccctagctcagcgtctcaagacaccacgtcatcaaagcctgttggaggttgctatggtctgaatgttggcattcccccaaaattcagatgttggaacctaacacccagtgtgatagtattaagaggtggagccttttgggaagtaattaagtcatgagggctcagccctcatgaatgggattagtgcccttttaaaagagtttgaagggagtgtccttgctcattctgccatgtgaggacacatagaaagtgccgtctgtgaagaatgggccctcactcagatactgaatctgctggcacctggatcttggagtttccagcctccagaactatgagcaataaatttctatttataaattacccattttggccaggcgcggtggcttacacctgtaatcccagcactctgggaggccgaggcgggcagatcacaaggtcaggagatcaagaccatcctggctaacacggtgaaacccggtctcaatgaaa

SEQ ID NO: 83559 - DNA, 3658 bp, Homo sapiens
aagtatagattttgtgcaggactgaactatcttattcttattgaaacataatgttttcaggctatccatttgagtcagtctagaatgttataaacaaaaacacctatctggggcaaagaaaatagtttccttcgttgctgaaattcaggtactacctctaggaagatggtggtgagagtgcacaggggtcagggttgggtggtgagagggttttcagaaaggttcttgtatttggcacaaaggcaccccccgccagagagcagtcaagtcactcccttggagttggaggaagcactggcctgtgacttttgggattaggatgtgccgagttggggtctcctcaccactgcagtagaaaagggctttcctcattcttattaaggttactgtcatcaagtgattatagaaggcgtataattttaaatgctcctttaaaaaaaattgtttcctcttctcacatcattactttgcttttttgctttttttttttttcaggacaaaagactgtgttgtcaaatgttcaggaagaactggatagaatgactcgaaagccagactctatggtaacaaactcttcaacagaaaatgaagcctgaacctccttaaaaagtgcatatgtcgaatgaccaaataactatgtatattgatctgctaagaccaggatttttctgatatggcacatgctatcagttttttggggcaggggagatgaactttaaaaaaaaaaaaaaaacttcattggcttgtccgagtgtgaaatgcacatttaggaaggttacatgtcagaccctttgttaaggataacccttggactctggggcatgtggctcttttgtgggaggcaagcacatctgggcttcttgtggaggggaaggtagagtgaaagaaagagggcccactttctaacagggtggagcaaatgagaccaagaaatcattggtaagatgatggttagtctgaccagtttcatgttagtaaattcacttgttcttgggaagcagattaagtagcagaaagtccaggaaagaaagaccagaaggagtaatgagacaagtgatggtggggaagctgaatgttgagggaggtggaggaaggaggagatgagcagtgtcagtaaatactgtgcattcagtagaagttgaagaatcattgttagaagcatttccaaacaaaacactaagcaaaatgggaattaggcttattttgaatgcatctttaacttacgaaagatgtactaattgtgggggtgcctgagtcaggcggagctgacccaggggtgggaacgatggcagctgcccaggacccatgtgcttggcccaggctatgtcctcgtgagaggtactggggtccacggatatgtgttgtggggcagacagtcactgtgggatgtcttcaaagtcagcagttacagaattagtttactttgaattttgttgtctaaatagctcctgctttattttttaaattaaattttttgtttttactatcacaggctggcctaactaatacaaaataggtgatgaacctctggttttaccataatgcaatgtgccacggaaagtttgggggaggtttttaatgtaattgcactctggttaattggctcgtaccaagccctgccttatgacttgtggaaagcttcaaggagttccactgatgcaaaagggtcttttcctagcttcctggtctgatcagtgctatgagatggacagataagtgtgaatgttttatacagaaaatggaaatgatacatttctcttgttaggtgttttcataaaatgtagcattttttttcttatggaaataagagtttcaggtgtctccccacctagggcaaattcatgcacattgtcatgttataccaccattctggaaatgatttctgtggatttgaaattgcacttttaattttatatatgacagcatttaaatgcaaacactaccatgaatttaatgtataaaatgttgtcaaaccaagggaaaaaaccacagttcaccatgtggagtttactttttttatatgaatgtttgttgtactgtgtctaagcataacttccctaatgtcattacttttacataccagatttgactgaccactaatgtagtactggggataacttaatatcctatgttgtgtcaagactctttgaagactttcttgaattgctttcgtaaaggtctgaacactgttaaggagaaagctgagtatcaacttgcctttctgatagaaatgtttcttgtgccagttttattgttgagatatactatttttttccttttttaattcagttttttaaaaaaacaaatgtattgtggcttccagttaccaggttgtctaggtaatgacagtaaactgactgtagaatgataattgtggtatagtgaccaatagatgccaaacagcttgtggcctcactaaaggtggggtcgcttagtccccgggagtaaaatgagtgacctcagaaacaagaattcctggaaaggcacatgccgaagaggaatatggtataattttaaattttaatgcaaaattttaatttgtctttattttttatcatttgaactgataagcactttttgtgtcaatataaaatatactaaaactgatgaaatgctaagacatgtcttgtgaaggaaggtttcttggagaccacttttatttactcatgagaagtggaagctcctagtatcagaagaagctgatacatagtgtcatgtgctcagtggttgccaaagtctaccaactttggggagctgcagggttctttttgggaggtgggaggaagggagatgagttttgttattttggggttttcaagcattggaaccaaaggccaaataataaacagcctttagtttttaaagtaaaattcattttatttgcagagtacacttgtatggtagactgttaaagacaattttatgactatttatgcacattataatggttacatctgctttttgtctttaaaataaaaaaaaaaatcagagaaaagcccacctttgaatacgtggctgaagataacagccaagaattggtctttcctaaaaatgcaacagataatgctgctagattgttattttgtttgcacttttttttgattggcattttaaaatcggtatttaaactgaagacattgtcatgttttattaatttaacaaagttgaaagtgactgctctgtacatcatgaccttaacaatgttaatgctgtaagtgaaagttcactgtcgtctgtatactaaatttattggtgtttctaacttaaaagtaagactgcagattatcccccaccagccttagtccaggggtgtggctctgtccgggtgcagtatgcagtcatgtggaaccttgctttctagtcctgggaaaaaaagatgtctctaattactggcttcaataaacacgaatccagactgcttacaagttttggtggctttctttatggtgaatcatcccactggagatacattgaattttctgctaatcatatggggtatctgatcacataactaaaaatgtttacctgtctcacttgaaattgtcagaaattctggaaagaataacattgtaaagccatatttattttatcttattttttagagctgggggttgtcaagtctggtcttgaactcctggcctccagtggttctcccgcc

SEQ ID NO: 83560 - DNA, 1086 bp, Homo sapiens
tagtggagtacttggagtaagtttttctctagaccttcagtgctctctgcaggccttggttaatagccagtttgtccctctctttgcagtcactccttgccaagcaaccagccactcccacgagagcttctgtgagtaccttacactaaacagagggtcaaggcccagtgttgtgggtgtcatcaaactttataccattatttgtgagagcgtatatttgtgtgggttttgtattttcagtgggaatttggtttccctaaagacccatgaccagaaacataaaagaaactcaagaagtttctgatgaaagaatacaactctgggaattagagtgagctggctttgttatctggatgtctttctctcaggagaaagagagccagaaagggcttgaattgagagcatactcccagtcctgtaccatagcctgtgaaaaatatccctcagaagcatgtctccatttgtggcatatgtattttttgttattgttatgcctgtgtgtgaccttagctgcttttggacttaggaatctcctgcaagaggaccctctggctctccaaggacccagggtcggggagggccagccagtgtgcctagctcctccccaggcacgtcagtaaaaaagccggacccaaacatcaaaagtatgtattcctcaaaagtatgtctctttggagagtagtttagttttagacctgagccctgcaggggctgggtggctgagtctataaggtggagactcatggaagccaggctattctcttccccgataagggctactttccatttcccccattccagaggaagaaggtccatggtaggcagagaccagggcctgttcctttgttagaattggtagcccatgcacctggctctgtgtgagacctcacttaggccctgctcattccttcagagaggaatgcaaaatagtaactttatttttttagagacagggtctcactctgtcacccagcctgtggcacagtgatacgatcatagcacactgcagcctcaaactcctgggctcaagtgatcctcccatgtcaactctggagtagctgggactataggcgtgtgccaccatgc

SEQ ID NO: 83561 - DNA, 1111 bp, Homo sapiens
gtaatcccagcagttgggaggctgaggcaggagaattgcttgaacctgggaggcggaggttgtaatgagccgagatcgggccactgtactccagcctgggtgacaagagcgagactccatctcaaaaaaaaaaaaaaaaaaaaaactataaagaaacaggtcttacacattgtatagtttgtggggggtagtggggagtagtaagtcccagggcctttttgttgatctttaaatgaggtctggcgttatgtaaatggctcagggctggtgggaaggagtgatggaatgctcacctggagttggtggtgtttcccattaagtcctgccagtgctgccgttgcctctggattactgttactggatcccctcatgtgatgtcctgcagaccctgaggtgtttagaacctgccagacttaaaaatgccagttggctacatgctgcggctggttttgggagaggtctgtgccaggctagaaaaatattactctgcagtctcagtagggatctcccagacctgtgttgaagcctgagcctcggactctcctttcggcatgaagtttgacagtggttaggagtattcttggcctgtggccacaaacatgtatgttgtttcacagctggtccacgacaaagagttggcagcagaagatgagcaggtgttcctaatgaagcaacaggtaagaagaccagtgaggttagaacagaggccttctcatgcatgaaatgccagtccctagggtggggttgggggtgtctgcatgtgggaagtcacaaagagcttgcagtggtagaggggttgagaccaggtctcctcattccctccttatttctaggattagttggggatggaccacctccttaggagatcacctacctgccttgcagactctcctacaggaatagtaggattcgcatcttttaagtgctctttctttggaaatgtggttttctggcataatacttcctatgttgacagttaaccaagtaacctgaccacacttccattatttcatgtagcctcacacagccctgtacataaaggcaggtgatgcctgttttgcagatgaggagagtaacttccccaagctgacagtttagaatgcagacttcc

SEQ ID NO: 83562 - DNA, 1008 bp, Homo sapiens
taatcccagcactttggaaagccgaggtagcaggatctctgcagcccaagagtttgagaccagcctggcaacacaggaagatcccacctctacaaaaatttaaaaagtagctgggcatggtggcacatgcctttagtcccagctacttgggaagctgaagtgggaagatcacttgagctcagaagatggtgatatcagactgctgcacttcagcctgggcaagagagcaagactttgtctcaaaaaagaagaaaaaaaaacctgttcaggggtttggtgcaattaaagatgcccaggggaatgtctttgctgccccgatgttacaaagctcacactgaatatttcagaattggcattttgtatcaccatccccaaatccttgattttgcagttggatgtgactaagaagtttgtcacacacaactgcctgtgttttgtgcttattattgccttcttttcagtgttctaaagctaacatgtatttttatttatgtgcatgtgattttttttcctctttttcccccagttgtgaaagattttcaagactatatggaacctgaagaaggttgtcaaggttccccacagagaagaggccctctgacctcaggctccgatgaagaaaatgttgccctgcctctgggtgacaatgtgctgactcataacctggggatcccggtgttggtggtgtgcacaaaggtgtgtgccagggggttgttggcttggctgggttcgggtggtgaacagtcaccatctgaaagtttgagaaactgttgacgtttttttcccaagggagacttgggcttatttgagattcattaaggtacattgaatatgtcaagacagaaaaaattatcatgtaaattggaagtttaaatgcaggaaacatgactagtcagtttgctcatggcctagggttaatgtctctgaagcactgttgactttcaaacttagaactcacagcagttggccagttgcggtggctcacgcctgtaatctcagcactttggg

SEQ ID NO: 83563 - DNA, 1023 bp, Homo sapiens
ttgttttgagatggactctcattctgttgcccaggctggagtgcattggcacaatctcagctcatcgcaacctctacttcctgggttcaagcaattctcctgcctcagcctcctaagtagccgggattacaggcgagtgtcacgatgcccggctaatttgttttgtacttttagtagagatggggttttgccatgttggccaggctggtcttgaacccctgacctcaagtgatccacctgcctcagcctctcaaagtgttgagattacaggtgtgagccaccatgcctggaccctatattactgtagttttaaaggcaccaggaccaaggattgctgtctcctgagcacttgggcactttttggtttggatttccaaattttgcattctatttagaattcatagctgtcaccttcaagatcttcctgatgtgtctgtttctgcagctatgctgatggtcactgtcaggtggtaactagcttcattcacttgttttctcagatcacacgcgctgcaacgtgtggattctggatggagacttgtaccacaaaggcctgctgaaatttgcagtttctgctgaatccttgccagagaccctcgtcatttttgttgcagacatgtctagaccttggactgtgatggaatctctgcagaaatgggctagtgttttacgtgagcacattgataaaatgaaaattccaccagaaaaaatgagggagctggaacggaagtgtgagtaaaatataattttcttaattgggaagttcacgagtctctttagatggtttgaatcactttccttttcccaatcctagaggcttcccttgcttcgtggttttgttttgtttgcaccatttatttcagagttcctcttgtaaactcagtagtcaaaagtattcaaagcagtctttaactcaagtgtcacaagttgaagaaaacaaatcaatatttattatcttcattggtttccgtttcaaataagagttcttccctcactccctaaaatgtgttaagttctgtggat

SEQ ID NO: 83564 - DNA, 1023 bp, Homo sapiens
gacttttaggttaattgtatcatattttgaagatttcttgtttttcttgtggtgaaactttttcttgtgagaaactaaccctaccttttactttcacttctccgaatgcatgtcttataaattatagatagggcctgtggacctgcctcattatttcccttttgaagtaaggataactgcagtagaatgtcattttagatcttggaatttgctgcctttaccaccctctcctccccaccctcccaaccactcttccagcaaagtcctttgtttatgaaagcaggtgagacttcaacagcagactttgcatgaaattcttagtttctccgtgtcatgtgagtgtcatgcctccccatccttgcccggaataaacagtacacctttgtcttgcaaacatcctttgtaggtgaagatggttctggtaaaacaaccctcatgactaaactacaaggagctgagcatggcaaaaaaggaagaggcctagaatatctctacctcagtgtccatgatgaggaccgagatggtgagtgaagcattggtcccatggtaagggggtgtatgcaggactctgactgcttccttgggtgcagttcctgcagcatggccaggcattctcagttttctgtttggttctcagagagttaatcacagaatagatgaagtacgtatcttttgcaggacttaaccccctttatagagtatgttagcaaaattggggaatgggacacttagctgttgctctggctagcctgcctttaaaaagagatactgaagataaatttttacttaacccataaaggtggtaagaaagattttttaaagctttggagttttatatgagagaaatgcttggctgtcctggggaccattgttactctgcctggttctagtagagaatccgaagttggtgtggtttagagtgtaacaatttaacatatgttaataggagagtttcctgaatctctttgtgacagtttagaaatggtagtttctgccggatttggtgactcctgtcataatcgc

SEQ ID NO: 83565 - DNA, 1018 bp, Homo sapiens
taaattacaaatgcattcagaacaaatatacctttctccttttttattataaaacagatacaaggtaaaattcaaatgcagcagtagggtgtcctttgagaatcttttatgcctgtgtgtatcctttaaagtttggtcaaccacactactgtttagatttcctttaataacaaaaagaattataggcttttatgttgatatgactcagtaagctaactgcatctgttttgggtcactttaaaacacctttgcttttgaaaaggaaaagtttctttacagaattgagtatgtaactcttgaagtttactctttcaaagatttgcttttctcctttttcctttcaggagctgctgctcaagaggtcatcaaaataatcaccaaacaatttgtaatttttaataatacttacatttacagtggcatgtcacaaacttcagcaactttccagttgtagagtaagcaagcaccttaagtagtgtgttaatgattgaaactgtaattgccttcgggttgtgctttagtctgtaaaattctaaaggagagctgctaaattgttttcttaataaacatttttctcatttgtaataatgtagtcttgttctttgtggggaggggaaaggagacagtcattttcctagaaaatgaatcctatccatttctcactgagcatcaatattggcttgctatttcaaagttacttgtcatagattatccttgtgttttattagagataattaaaaattttttttcttaccatcttcaataatgaatttaagccatgtgcagatgttagctatggacattttaggaccatcatcatttgttaaaatgaatagaatttaaaaagatatttctggatatgtagttttcccagaaaacaagaccatccccttgtatgtagtattatcttaattaacttgagttttggctgcctaacctacttcttgaaattttatggggtcattctactcatattatatatactcttaaatttaatcacatgggactaatagcattc

SEQ ID NO: 83566 - DNA, 1162 bp, Homo sapiens
aaaaaagttacctattattaatagctttatgtcctcagtgtcatttatcatttagtcttttagaattggagaataacttttataaagggtataagtaggacattactttctcattcattaagttcttctatcaaataattattaagcactatgtgccagatgcttttctagacagtgaatatgatgcaattaataaagatttaattaaattcaaatttttactaggttttagttggtctctgattataggtttgtgatatgtgcaaatattggtctcatactttgttatttttgttcttcagtttcatacatattttgactagaacatctgaaactagattaaataaaggagttggccattaattttgaatcacatttattttaatgaaaactaacttttatttttaggagtatctaactatcaagttgaagaagatataggaaagttgaagtcttgtctcactggcttccttcaggaatatggtttatctgtaatggtgaaagatgattatgtccacgaattgtgagtattttttagggtatctaggagatgattccacacctgtcataaggctaatcaaaattcatgtctctgtggtctcctttagttgccgatatggagctgctgagccacataccattgctgcattcttggggggtgagttccatatatgagaagactcacctgttgttacatagtacagttactattttaatacaaagttttgtcgtctagctattttaattagggaggtcagtgaagcaggatgttatatttctttcttttttttttttttgagacgcagtctcactgttttgcccaggttggagtgtattgatgccatcatagctcgctgcaacctcaaactcctgggctcaagtgatctctcgcctccgcctcctgaatagctgggactacaggcatgtgccagtaagcctggctaatttttcaattttttgtagagacagggtcccactatgttgctcaggttaggatatttattcagttgcccctatactggtctccctgccttccatctctcccactgccatccaacttaaactccttaagagtcattaatccttctaaagcatagctctgattgtgtccttttactaaccctctgccccaccaatatacataacactctacaacagtcct

SEQ ID NO: 83567 - DNA, 1007 bp, Homo sapiens
gaaaagattctaatagttggggggcagtaagctaaataaacagataaaaatgcaccaggtgctgtgaacaaaattacagcagaacaaagggtcagagagcatgctggggacaagggaatccggggttgagagacaattgtacatagggagccagggagactttccaaaagacatttaagcagaagcctgagtgaagtgacacgcagaggtctggtggaagagcttttcagttggagggagcacatgtgcaaaggcccagaagtgggatgaagcttgacttttgttcaagcatcagtaagcaagtcagtgtgattggagtgaagtgtaaaagggggaaaagtggtaggaaggatttgagtttggagaggcagaaagggccagatcataaaggccttgcaggctatttaagcatttcagtcagggaagtggattgagctgctttgtattctaaaagaccattctggctttcatgaggagaacacaattgaggggactgggagtggaagcagagagagcagttaggaggtcccactgagacatttcttttttccacccatcagtagaatccaagcctatgatttgtgtgtgtgtgtgtgtgtatttttttttttttttttgagacagggtctcacattggtgcccagggtagaatgcagtgacacaatcactgctcactgcagccttgacctcctgggctcaagtgatccccccacctcagcctcccaagtagctgggaccacaggcacgtgccaccacgcgcagctaatttacttttatgttttctatagacggggtcttcctgttttgttcaggttggtctcaaactcctgggctcaaatgaccctctcaccttggcctcctgaatgctgggattatagatatgagccattgtgctcagctttatactcttgattaacgtatgaagatcttgctagcaataaaattactttatggttttagtttttttcagagtggttgtctcaacggtcactaattagggtgcaagg

SEQ ID NO: 83568 - DNA, 1021 bp, Homo sapiens
tgctgagggattcacatgaacaagatgttttctagagtccttggctattaaatggttgactataatgatttaagttaatattttctaaatgtatagttagaaataaatacagggccgggcatgctggctcatcccagcactttgggaggctgaggcgggtggatcacctgaggtcaggagttcgagaccagcctggccaacatagtgaaaccgcgtctctactaaaaatacaaaaattagctgggcatggtgaacatacctgtaatcccagctattcgggaggctgaggcaggagaatcacttgaacccaggaggcagaggttatagtgagccaagattacaccactgcactccagcctgggcaacagagtaagactccgcctcagatgcctttggttttgttatggcttagttgttgaggtctgaccattgaagtttttggggagctttggaataacacctggtagtttaagttagaattttcttgtaacttaaaacagcaaatatgctgcctttcaagttaggaaggcacgtaagatattattaccaactttttagagacaacaaggcagtgttgctgagtgattaaaagtgtgctggctggggccaggcgcggtggctcacacctgtaatcccaacacttttgggaggccgaggagggcagatcacatgaagtcaggagtccaagacgagcctggccaacatggtgaaaccccatctctattaaaaatacaaaaaattagctgggcatggtggtgggcacctgtaatcccagctgcttgggaggctgaggcaggagaaccgcttgaacctgggaggtggagattgcagtgagctgagatctcatcagtgtactccagcctgggcaacaagagcgagactctgtctcaaaaaaaaaaaaaaaagtgtttgctggccaggtgtggtggctcacacctgtaatcccaacactttgggaggccagggcagaaagattgcttgagcccagttcaagaccagcctggacaacgtagggagatct

SEQ ID NO: 83569 - DNA, 1008 bp, Homo sapiens
aacagtgaaaaaacctgtgggccctgtgtccatttaaaaattaaagatttcctaagtttctataattcaatgtattgtcatcagtattgccaaagaattaagtttatcttttgagctgggcacggtggctcacacctgtaatgcaaggactttgggaggccgaggcaggaggagcccttgaatccaggagtttgagactagcctgggtgacatagtgagaccctatccctacaaaaaaattagctgggcacagtgacacgagactgtagtcccaccttctcaggaggctgaggtgggaggatcccttcagcccaggagtttcagcagtgagctgtgattgtgccactgtacttcagcctgggtaatacagcaagaccccatctctctcttttttttttttaagtgttaaatttatccttttgaattctttgtttcacagtaatagaatctcatccagataatgcattagaggatctacgactagataagccatttcctgaactgagagaacattttcagtcctatgatttggatcatatggaaaaaaaggttggtagtgtgtgtgaccttacatttacagatagacttaaaacatttttttaacctaaggtttttgaattacactaaagtgagaaaatcctataaacttccatattcctgtcatcccgattacccaataacagtattttaccttgttttcaacatattaatttttctccaaaattaaaaaacttttttactgaagaaaagtacatatactgaacatctgtgtaatcactacccaggtcaagaaattggacattaacctattccaggtggggagatggggatggttaatgggtaccaaaaaaaaattagaaagaataaataagatttactccttgaaagcacaacaaggtgactatagttagtaataacaactcagttatacattttaaaataattaaaagagtttaattggattatttgtaacataaaggataaacgcttgaggggataaatgctata

SEQ ID NO: 83570 - DNA, 1049 bp, Homo sapiens
aacatgtcaagaccctgtctctacaaaatatttttttaaaaaattagctgggcatggtagcacatgcctgtagtcccacctacttgggaggctgaggcaggaagattgcttaagcctaggagttcaaggctgcagtgagctatgatcaggccactatgctacaaactgggcaacagagcaaaagcctgtctctaaaaagaaaaaagaagggaaacagagttgtcatacttatgcatgaaatttggatagttttacagtatgtttgcctgttccataaattgggggattatattgtgaccaagttttttctaattcaagttaaatgctttgtttttaaaaagaaccgagctgaagctgccatggaattcttacaagaattaaatagcgatgtctctggaagttttgtggaagaggtatatatgtacacacattattatgtctgtgctgaaatacaattttttaaataattcaaagccccagaaatttagaattttgaatctttgtgtcatttatgattagttgaattggaattgttgcctcatttgttgtaaaatagcttaactgtctctgccatgtttaatatgattgtgaaattggttttttttgtttgtttttttctttgctgtcctgtttagagtccagaaaaccttctagacaatgatccctcatttttctgtaggtttactgttgtagttgcaactcagcttcctgaaaggtaaatttttatgttaatatgtttttattttaatcttattagatttgcattgttttattttctttgcacagtctatgatgatatggttttaaaaattgttaaattctatagaaactttaaatatgaaactttttttttttttttttttttgagcttgagctcaaattcctgagctcaagcaatgcaccctcctcggcctcccaaagtgttgggattacaggtgtgagccaacgtgcctggtcaagagtttcagatttatggctgggcacggtggctcatgcctgtaatcccagcactttgggaggccgaggcaggtggatcacgaggtcaggag

SEQ ID NO: 83571 - DNA, 1030 bp, Homo sapiens
aaatgaaatagggctgggcacggtggctcacacctgtaatcccagcattttgggaggccaagtgagctgagatcatgccactacactccagcctgggtgacagagcaagactctgtctcaaaacaaaacaaagaataaatgaaatagaaaacagatgagggtttaaatccaaagacgctttttaaatgtttgtttgtttgttttgagacagagtgtcgctcttgtgcccaggctgataaggggctggaagaccaagtttctgtttctaatttgaccctctccctcttttcccctaaccattcaaggcatcaacctgagttctagattactgtataatcactatactaatatctgttcccgtcttacctgtattctgtggttatcatatcagtctatgcaaggaaagtttaaagatcaccattcaaataagaaagctgtattttcatgaaagttttaaaaacatcaaatttgtgtctgttttgtaggttgtggggtgatcatgggcaagaggctttagaatctgctcatgtttgcctaataaatgcaacagccacaggaactgaaattcttaaaaacttggtactaccaggtaacgtaggtttgtggttgtgttctaaatatacttctttaagtttatgacctagaactatgtattcctgactgactctgttttggctctcaggtattggttcgtttacaattattgatggaaatcaggtcagcggagaagatgctggaaacaagtatgttctattctcttcaaatatattcacgttaaggaaggcaaggcctgagtcttagcttcacctcctcagtcagggtgactcgactctcagtggaaatcatccttatgtttgggattatggtgaggaagtgagataatataggtaaagtgctagtacagcatctggcaaatagggcattaataaatgttacccatcattactgtctttattgttattaatacaaaggagtagtcgttattcctttattcatggaatatgggcacttcctaagctcttgtattgat

SEQ ID NO: 83572 - DNA, 1101 bp, Homo sapiens
ctaccttaatggacagtgcaggcctaagccatcaggagggtccttgggtacttccccacccttgccttttctccttgcactacccattccttatttattgagcgtcttctgtgtcttgaggctgtggagataacaaagctgctcagctttcctccttcctggagcctctgagacaacagaagttatatgtccccaaggactggagcttctgtttgcgccaccagcctagtgctgtagtagaggctttaggcacttagttctgagagtacccttgaaagcaaccatttcctgtgctttacagttggagaaacagagtcttggagaagttaggtaatttgcccagagttccccatatctttgagccaggatgtaaactaaggctcttctggctttttcggaggtactcagttacatcctgcttccaagcttttcggagaagaaacagggtaacagtccttataaccaacttaggttttcttgtaaattcttggagttcttgtgtttctaatgcaggtataactgtacatgacagagctgagaagatagttgaggttactaagcaactctaacaaaagagggtttttgctgagggcattccatttaagtcccaaactttactttcatagtgagaactggttttgaagtgtcaaagggaagcagttagaagcaaaatgcagcagtcaataagcccctccttacttcacgttagttgggccagcaagatagtagagaggactgattcatttggcctattcttgaaacatgttacttagagacacaccaggattcttttttttttttttttcagggacaaggtctcactttgtgacccaggctagagtgcagtggctagagtgcagtggcaagaacactgctcactgcagcctcaacttcctgggctctaacgatcctcctgcctcagcctcttgagtagctgggactacaggcatgtgccaccatgcttagctaactgttttagagatgggggtttgcccaggctggtctcgtacctctgcactcaagtgatcctcctgcctcagcctcccaaagtgctaggattacaggcatgagccacagtgcctggcctcagtattctttttg

SEQ ID NO: 83573 - DNA, 1325 bp, Homo sapiens
cgagacactaggatccctgccaggccagaggcgaccaaccgtcctggatacgggagctcccggccagcctgacttccaggaggaagcggtgtggggattacctccgaccgcctttagtgccccctgagacctggttctggcctctacgtttcagcccgctactggctcgcacgacccagcgccgccgtggtcccttctcagcgccttctgctccagcgaccatcatgttcccgggtccgagcagccagggccgcggtcaccgcttctctcgcacctcaggccgagaacccacaacgcggcgtgtccctcgcgcgactccgtcgccacgccacgcccccttcccgttctccggaagtgcgcgggttggagcggaagcgcacgcctgctaggatcagcggtggtggttccgcgatggtaggcggcggcggggtcggcggcggcctcctggagaatgccaaccccctcatctaccagcgctctggggagcggcctgtgacggcaggcgaggaggacgagcaggttcccgacagcatcgacgcacgcgagatcttcgatatccgccgctgctgggcgcgggcgggttccgggggcttgcggtggggggagcagtgatatcgagcagctggtggagccgcatcccagcagggcgttcctggcagagggttctaagtgggcaagggcgcagagtcccttttccttcacttcccacatctgattcgctccatcaatgacccggagcatccactgacgctagaggagttgaacgtagtagagcaggtgcgggttcaggtgagtcacttccgaggggagcgagttgttccagagagtcagaaaggtttctgtgcagcaggagctggcgtgctctatgctcacgaacaccgaagggtatctttggggagggagattgttgtgcctattttatgggtgttgaaactgaggcccatagaagttggatgatttgcccaaaacaacaaactaagaagagggaccttgggctgagggtggttgactcttgacatctctcctccacaaccaggttagcgaccccgagagtacagtggctgtggctttcacaccaaccattccgcactgcagcatggccacccttattggtctgtccatcaaggtcaagcttctgcgctcccttcctcagcgtttcaaggtcagttggagctgagccccgggagtgagaccaggcattgagggtctactgctgaggatggggactgggagagcatgaacatggataggacatcagagtggggcctggaaggatccccattagcagagaggaaactgggaggaagctttccaagtcgatgtga

SEQ ID NO: 83574 - DNA, 1031 bp, Homo sapiens
cgagtggagctcgaacccgagccagactaaacaagcgaagggcattgtttaggcggcgacaccgaagaagggttcagggtatttgtagcaagcaaacccccattcggaaaaagaagtggagcttcattcaaggtcggcgatagtttgtttcttagaaggtagatctgtcggtaattctctgtgtcaagcggtctcactaccagatcgccgagtagaaatctttcctccagttatttattctaatagagaggggaggggggggaaaaggccctaaaaatgtcattttcttagaatgttaagcttcaggagaatcagaaagaaaccattatccccatgtcctgagtagggctgctgttcctaaaaactgcacagatgggcaaaacccacggttgatctcgaggtccttgttttaggaggcagatttagtgcgtcttcaccagaccttgggttgaaaaaaaaaatccaagggtcctagttcctctcatctttttggtttgccttgttggaggtgctgatgaggagggagtggtaggaagaaaccaagaaaagaggttgattattactatttttttgaggtagagtcttgctctgttgcccaggctggagtacagtggctcgatctcgggtcactgcaaccttcgcctcctgggttcaagcgattttcctgcctcagcctcctgagtagctaggattacaggtgcctgccaccacgcccggctaatttttgcatttttagtagagacggggtttcaccttgttggccaagctggcctcctgacctcaagtgatccgccctcctcgacctcccagagtgctgggattacaggcgtgagccactgcgtctggcctgattattttttaaaaagttgaagcactgtctaatggaatgctgttactctctgctcggtgacttggactcactgcattgttagaggcttgaagctaggtgcgatttgaatttgggttaacagtaggaagacattggaaatttacttctcccaccccctttataaaaccagtttatttttatt

SEQ ID NO: 83575 - DNA, 1050 bp, Homo sapiens
tttgtatttttagtagagacggggtttcaccatcttggccaggcttgttttgaactcctgaccttaagtaatcctcccacctcggccttccaaagtgctgggattacaggtgtgagccaccgcgtctggtcttgtttcgttttttttttttaagagagaggtcttgctgtgtggcctaggctggggtgcagtggctgttcacaggcacaatcatgaggcactacagcctcaaacttctgggctcaagcgatcctcttgcctcagcctcccaatagctgggactacaggctcggcgtcaccatacgcagccccatgtgttgtattatcatcactatctttgaaagctgaatttttttggaaatttggtgaatcatagctagtagggtgttttctgtcatctcagactttgctgaatggaattatgaattcaacccataggatatctgaaatgctgtaatattatagtagtagtacaggtggttagtgtttgtcatgaatttatttccaggatgaattagacattctagaccttccccgcttccaaataatctgatcctcacctgagcccgggaggtcgaggctgcagttagccatgatcgtaccactgcactccagcctgggtgacagagtgagacccggtctccaaaaataaaacaagtatctgattcgacacattttacaagttttaaatttctgagaagtattaaaggttaaagaaggtagattgaatgctgtgtgaggtttgcacttaagacggctcatgtcttattttgttaaataatgtaactattggtatttggagaggaatttcacgtttcctagttttctctctttctagtttccctcctttaattcagtgttaacccacatttaattacaggatccttagctcctagagggtagagacctcattaattttgtataaacccctctggatacagctatttttcacaataccttttatatcagaggtacttgattatttgaatttagaggctgcttaatttaatgcctgaaatttatctcatgacttatgaacaggctgggttt

SEQ ID NO: 83576 - DNA, 1050 bp, Homo sapiens
tatttttagtggagatggggtttcaccatgttggccaggctggtctcgaactcctgaccttgtgatccgcccacctctgcctcccaaagtgttgggattacaggcgtgagccactgtgcccggccaatataattttttaaaaccactgttaaacttttgtatcactccattcctaatttcatgtacataatatttgtcatagaacattctaacccttaaggaaagtaacataacaatttctttaaaagtttgaggagatatattttgtttacaaaaatatatgtaagtatagtgctataaaaataaaacaagaggaaaacggaaaaaagctctctaggtttaaaaattaatagtatttagaaatagctcataggtaactttctaattccattaacagcaaatttacatttgagaaaaacaatgtgaaaactttaacttggaaatactttttttttgttttgagaaaaagtttctgggaacatgtcttacagtttcgatgttagaagtttaggttaaagatacaaaaatataggtaaaatgtttaagctgagagccttatttcaggtctacgttaaatgtattatgattttggtaatttttttttttttttttttgagatggagtctccctctgttgcccaggctggagtgcagtggtgtgatcttggctcacagcaacctccacctcctgggttttaagctattctcctgcctcagcctcctgagtagctgggattacaggtgtgcgccaccacgcctggctaatttttttgtatttttagtagagacagggtttccccatattggtcaggctggtcttgaactcctgaccatgtgatccacctgcctctgcctcccaaagtggtgggattataggagtgagctactgcacctggcctggtaaattttaatgaatagcatcttggattggttgattcttgattgagaagtcaaggagttgacttctagaataaaatttttaaagaagaaaccctcttttaaatatagttttatactcaaaacacccttttggatccagtttcatactttt

SEQ ID NO: 83577 - DNA, 1021 bp, Homo sapiens
cctcctgccttggcctcccaaagtgctgggattacaggcatgagccaccacgcccaggctttttaaaaaatcatttgtttctaagtgtttcattattttttctgcctctgtctcttgactgactaggacgacagatatttgccaccacatctggctaattttaaatttttttgaagagaaaaaaattttgctcaggctggcctctaactcctggccttaagcaatcctcccaccttggcctcccaaagtactggaattacaggcatgggacactgcatccagcctgagttttaacaaatgtatgcacccatgtagatgctaccacagtcaagatatatttcagtcacccccccaaaggtttccttgtgcccctttgcaggaacctgggactgactgcactgggtggttctgcctcagtgtctctcatgaggttgcagtcaagcttttgcctgggactgtgcagtctctgaagacttgactagaactgaaggatctgcctgttggtaggtggcttcacttcctagtcatgcttctccatagagagaaaaagagtgaagccaccatgccttttatttatttatttatttatttgagacggggtcttgctctgtcatccaggctggagtgcagtggcgtaatctcagctctacaacctctgcctgccgggttcaagcaattctccttcctcagcctctcaagtagctgggattacaggcacatgccaccacatgtggctaatttttgtacttttagtagagacagggtttcaccatgttggccaggctggtctcaaactcctaacatcaggtgatctgcctgcctcagcctcccaaagtgctgggattacaggtgtgagccactgcgcctggtccaccatgccttttatgatccattcttcaagtcactttcataccttttatgatctattatttgagtcacttgttgcttagcctgttcattagaagctggtcactaagtctagcccacattcaacagggagggagggattacacaggggtgt

SEQ ID NO: 83578 - DNA, 1035 bp, Homo sapiens
gaaccaccacgcccgaccaacagttctttttttatatattcagctcttcctcattaaaaactttaagttaatgagcagtgctattgtagtgctggaatctctttttgggtgggtgaaataaatctttttgaactcatcatatatccccactgcccttataagcatttcctgcacatagttaacaggtaataaacatttgtggaataggtggatcttttcaaatggaaattattataggaaacttacaagaaaaaaattctagattctagctgttttctgttcttctattaatcagtatttaaatatttactgagaacctaaggagtaatgaatgatcacaccctcttacgttttcttaatacgtcagtttatagactagagccaccagtgtttaagctctaacaacttattacagagaatcgagatatcctttccaatcgaaagggattttttgatagtgaagtttcagcttcttgcttttgtcaatagctttgacacttggtttctgtgtgtattgattttatgactcagtactgatgtgcatgggggtcttgtttgcaaatctgtagttactctgttttaattgccttgaaattctctttagaatcactcaaaagagggaactctgccatccctttgtacctttaatttgtctcctcatctcggctacctagaaactatgatcttttctgtaagttatatagtattgtaaaggaaaagacaggtaaggatgccactgcttattccaaatttagatattcatagaataagtaccttccagaccctcaaagaactatttgtacaggttaatacatgagaagtagacttaggttcttcctttgatacttaaatttcaaaacacaggattagtaatatttagctacttaagtttggttcatttgctaaaagaagaacatttaccatctcaggccctgtattagaaggatctttgtgtctgtgagagaaaaggcagaatggagtttttctatcataattgaatccgttttgccttgcacacccctttggagcatttga

SEQ ID NO: 83579 - DNA, 1026 bp, Homo sapiens
gaaatttaaagccacagaatgtgaaaattaggtgatatcatgtataatttaaattgaatataacatcacaaatacttatatttagagcttgagatgattaaaaattgtgttaaactagcttttcccttacttttccagaagaacacaagatgtgacactgtagtcactttttaacctgctgtgaagtctcaaacatatttgtgatattttacttttggaaagataaactgttttcttgtttttctcatgtatggttagctgcatctgtttacccattttaaatcaattttgtataaaatatttcattgttctaggacaatgggtttaatccctagttcatattctaataacttttctttttaaagtttgaaataaggaatcattttcagtgaaaaactgtctttgtgcttaaatgacattttttttgacagaagcatttcactgtgtattaaatgacattattgaattgcattataaaatgccaaactgttgagacagaattttattttctttatactttgaagtttggtattcatgaatacatgaaagcaccaaacatttactttgaagatgtacacataaaactgtatttatttgaatgagaacatctaaataaatcagtaggatcatctaaatattatttttaattataattgcagtcattagtcttgattaaaaattgtcatcattttctggctgggtgcggtgactcacacttgtaatcccagcactttgggaggctgaggcaggcggatcacctgaggtcaggagttcaagactagcctggcaaacatggtgaaaccccgtctctactgaaaatacaaaaattagcggtgtgtggtggtaggtgcctgtactctcagatacttgggaggctgaggcaggagaatcctttgaacctgggaggtggaggttgcagtgagccgagatcgcaccactgcactccagcctgggcattaagagcaaaactccatctcaaaaaacaaagaattttactcattttctgaaaccatttagaaatttccc

SEQ ID NO: 83580 - DNA, 1041 bp, Homo sapiens
tttatgactaatataaaatccagttcaagtggtgtaaagttgactttgctattagaaaagatgtctccatgattagaatttataatgaggtgtgctaataggtgaaatgacaatccccagtgcatgctactccgtccacctgttagccttctaacagggtttaagattaatgaagatttctggatggaaatcttcatgagagatggtaaatcaagattcactgagatgaaataaggggtattgtttttaggttttgtgatgggttgagcagaggtcggcatagtcacttgtttgatttgatgcacattggtggagttttaaatgcacagtgtggaagggaatgagcacttatcagaacagaaggaaatgtgtggttaaacggtttcagttgtaactaaagactatttcccttggtccaaataggaggagaaatggaaccttttgtattttggttattttccaatataagtagaaattggttcattgtggtttattgcagcccttagcagaaatgattgggttcagtagtgaaggggaatgacacaaatatgtaccaggaaagcataaatttttatttattttttatttttttgagacagagtcttgctcagtctaccaggctagagtgcagtggtgcgacctcagctcactgcaacctctgcctcccaggttcaagcgattatcctgcatcagcctcccaaggagctgagactacaggcacacacacccacgcccagttaatttttgttatttcttgtagagacagggtttcatcatgttgtcccagctgatcttgaactcatgacctcctgccttggcctcctaaggggctaggattacaggcatgagctgctgcggccagccagagggtataaattctataagtactattttaaaggtatctcagaggtaatttttttatcatgtttataattattggcagtcagttattgttattaaacatctctaaaaacaaaaagaatccaagagtctgaagagactactgaaatgagtttcaaaaaaaagatgcttccagctttt

SEQ ID NO: 83581 - DNA, 1049 bp, Homo sapiens
atgcctagctagtttttaaattttttgtagagacaaagtcttgctgtgttgcccaggctggtcttgaactcctgggctcaagcaatcctccctcagcctcccaaggtgctgagattaaaggtgtgagccaccacaatttagaatagaaaattcttagtcaattaatctagagttttatgtaaagcaaaatacatacaaaagctttcaacagttgttccattaattgtcaaatagttaatctccaaatataatgtagctgaagagcactttttagaaaatgattcctatattcatttaaagccatgttagcttgctccagaaatactgaccaatcacactctcttgacttggcaggctctcttactcctccttactcctccatgcctttgcatacactgtttgtcctgcccagaatgctttctccaacttgaacagctggcaaaacacactcttccttcaaatccctctaagtatactaccctgtgaatttcccaagcagaggcagacttaagcttcctctacactgctgctgtcccttttgaacctccattatgtatggtggttgctaaagtacactgcaatgatctgtttatccatcattttcccacaagactgacagctgatcaaagacagaaacaatgcattttcatctatatatttctcagtccctaatgcagaatacagaccaacacacttggggtttattactttacttaactagttaatataaaccaacacattataaatatttagaatctttccagagaccattaatatgtattatctacatgaactatcatagcaggctctcctataattctagttttcagacaggcaggataggggctgttttttgaagatatccaatgaacaactaagcagtgtacaaaggattgtggtaggtaatgtggaagacacaaaaatcaggggctccatctcatgggattgccataaagtggagggcacaaatgtttataattgtttcaacatgttgttcaataagaacactagtagaaataaaaagtgctacagaatggaagggctttatg

SEQ ID NO: 83582 - DNA, 1099 bp, Homo sapiens
taggagagcctgctatgatagttcatgtagataatacatattaatggtctctggaaagattctaaatatttataatgtgttggtttatattaactagttaagtaaagtaataaaccccaagtgtgttggtctgtattctgcattagggactgagaaatatatagatgaaaatgcattgtttctgtctttgatcagctgtcagtcttgtgggaaaatgatggataaacagatcattgcagtgtactttagcaaccaccatacataatggaggttcaaaagggacagcagcagtgtagaggaagcttaagtctgcctctgcttgggaaattcacagggtagtatacttagagggatttgaaggaagagtgtgttttgccagctgttcaagttggagaaagcattctgggcaggacaaacagtgtatgcaaaggcatggaggagtaaggaggagtaagagagcctgccaagtcaagagagtgtgattggtcagtatttctggagcaagctaacatggctttaaatgaatataggaatcattttctaaaaagtgctcttcagctacattatatttggagattaactatttgacaattaatggaacaactgttgaaagcttttgtatgtattttgctttacataaaactctagattaattgactaagaattttctattctaaattgtggtggctcacacctttaatctcagcaccttgggaggctgagggaggattgcttgagcccaggagttcaagaccagcctgggcaacacagcaagactttgtctctacaaaaaatttaaaaactagctaggcatggtagcatgtgcctgtgttcccagctacttgggaggctaggtgggaggatcgcttgagcccaggaggtcaaggctgtagtgaactatgattgtgacactgcactccagcctgggcaacagagcaagaccctgtctccctgaccccacaaaaagaaataaatacattgttaatttgatttttctaatttaaaatgttggaagaatattttggtatgtgagtttatatgtatatatgaacagaaatatagtctgttgatagaagtgtcacataatttgttgctcaga

SEQ ID NO: 83583 - DNA, 1056 bp, Homo sapiens
atgctgggtgatgaaagattagttttagagagaaaatgttcatctgtgcagaggatgcattttcttccattaattctggaaaaaacgttcacagttatatatatggtattttgcaaaaggactattaatagaaccttttgagatgaattaatgtaagaatattttttaaataggcttactgtcaaattgcaactttttttttagatacagagtggaaaacagtgctaagtcatttggcacctccttacaaatatttttcatggtcacatttattaaatgttactacatttctgaatttttgaaaaatgtattttatcattaaatggcattattttaaagggtgaaaaactgacacagtcaattcagaaaatggactgaagtctgaataaggtcattgcatttaaaaagcatataactgtacttgactgatgagggaggtgttactttcattgtatataggtcttatttcataaacagatatcctgtatcaaataaaagtatttgttatatatttgaagttatgcatggaaaggagtgtgtttaaattgttacaaacaataatgcgtcattaaaggccatgctgatcttgcataactataagtactatgaatgaatttggttggttttggtgttgtacagctcacatgtttacacactcagtgccctaatttcccctgagggaatcgctttttaagtgatccttacagtggtgttttatgttactttattacagagctccttggttttttacttctgcacttaaatttttttaaataacatgatgatggtacattttcctctattgtctagctaagggctttcggtccaccagtaaataagatcaaatgctcttaaatgttcctgttaccatcctaatgtaaatactggatttttctgtcatttagcaccatgctgcttctgtctgtcttaatgctggcattaagatcatgagccctttttctccagtagtacaggctttgaaaactacttctattaagttattgatgcaatttgatattttttcataatctatatttaaacaaaattacatcattg

SEQ ID NO: 83584 - DNA, 2753 bp, Homo sapiens
attacaggtgtgagccaccgggcctggccccttgtcgctatttttaaattaaataaaaaataaaaagaactagatatttgtgggattttaagtaaaaatccagtgaaatccttggtaaaataagttgattcattgattctggtggatgagtgatcttaaacttttttttttttttttttttttttttgagatagggtcttgtctgtcacccaggcgggagcacagtagcacttatcatggctcactgcaggatcaacctcctgggccgaagcaatcctctcaccttagccaccccaggacctagagtagtcccggcatatcccaccatgcccagctaatttttttactttttgtagagacaggatcttactatattcccaggctggtcttaaattcctggcctcaggcgatcctcctgccctgccctcccaaagtgttgggattacaggcatgagccaccacacccagtcctgattttaaacttttaaaattgttccttataagtcatgtactctaataggccttcatttcagagatgcagagacaggtgccagaaaggaagagaaaggacctatctcaggtcatatctaagccatggcagagtgaggaccaaaacctgggtctgcagaattatgcagtcagtgcttttcttgcttggttctttgattcatacttactttgctttctctgagcgcttgtctgtgtcagatcagtgtggaggtccctgtttccaggaagactttttgtatattcactgcctcccatccccttccatgcatgtccaaccttttggcttccctgggccacattggaagaagaattgtcttgagccacacataaaatagactaacactaatgatagttaatgagcttaaaaaaaataaaaatgtaaaaagggtccatgcatcatacgcatcttttttttttttttttatagacagagttttgctctgttgcccaggccgagtgcagtggcgtgatcttggctcactgcaacctccgcctcctgggttcaagcatttctcctgcctcagcctcccgggtagctgggactacaagggcagccacctcgcctggctaatttttttttttttttttttttagtagagtcagagttttaccatgttagctaggctggtttcaaatgcctgacctcaagtgatcctcccaccttggcctccgaaagtgctgggattgcaggcataagccaccacgcccggcccatgcatgatttttgtgatatccaccaccacagataagcaaaagagtccttgcattcaaagagttggacacctgtgcaccgtccaagtattctcttagtgcttgctgcttaacattattgtagctcttactgcttattgaactcttatttactcatgtatctgtagaccttagtagcccccaaacatccccaggctttactgcagggaccagtgcctagtgaagtggtagatgtcaatagatggatagccaaaataaccacataggtgtcttgctttatttcaggaatgcctctggctcaggcagtagccattcttcagaagcactgtcgcatcatcaaaaacgtccaggttctctacagtgaacaggtgagtggtggctgatttgtttattgaaatagcatccctcggtagtgagtcacttccagagctgatgctttgggataggctgactggcaaggatagctgtgttcgaatgggagaatctctagcaccagccagttatcaagtaccttttctttgattctgaaacttctgctcttgattatctagtacagctaggtttggaagagcggtagtaattgaacctttgttttgtctgtgctcaacttgcctacaggcccttaaacagggacttttcagtggtaggtcgcttcagaggctgtctctggtcttttagagtgcttaccttccacttccgtgtttaaaattgtcttttctgcttttgttggttagtttgtgttcaggatttttgcagtgcagatctctagctagcacggcataccagatttgaaaggaaacagatataattcacccctttatctctctcaaagagcaatcttcccaccactgaattctctgaaacctgcagttctgtgacacagaccatgtgctgccatgttgaacagcctttgtggtgtcctgtgtgtcacaagcctcagggaatagttttgagcctacagaggctaaaggatgtccccagtgacttttctgagaccctttgagtactagtttgattatttcagttccaattagtttcagatcctaaagcaaatgacagcttatttctgacatgaagaatgttgtaaattgtaggtaggcaaaatttctgagaggcttctcagtttgacttggagcacagtcagaattgggcctgttacctatacccagagattacattctgccatgttgtacccctctaccagcctagtgagaccctcatttgagggatctgatagaagacatgcttaatctccaagcaagtgcttgagtattcatgtggtgcctatgacagaacaggagacttgtaggagtgggcatgtggtgcctatgacagaacaggggacttgtaggagtgggcaggggtttctttttttttttttgagatggagtctcgctctgtcgcctaggctagagtgcagtggcacaatctcggctcactgcaggctccgcctcctgggttcacccgccattctcctgcctcagcctcccgagtagctgggactacaggcgcccaccaccacacccagctaa

SEQ ID NO: 83585 - DNA, 1533 bp, Homo sapiens
cataacaaccctggagggaagggatgaaagtattcccatgaagaaaccagagctcagagaagttttgagagttacctaaggtcaccagggttctgtccactgctttgttctgctactcccctcccccaggattcagaaggggcaaatgcagaaatatgactctttagatcttagacttcggcttttcaggaagaagcacaaatgaaatgggatgggaggctggggggagagagaaaaaggataagagggtcatctcataatcagatcacaatatatttctttgtcctagaatttgatctaaaccatcaaagaataaaaatgtgttccctgtggatggtacaaacagcctgagtgtgaatggatgtaggttcagctgataggcataagcaatatctgctgagtttagatcctggactaggccttttcacatgacctgtattcctcaccaactgctctgtaggttcgatggcagtgaacttcattttgcagatgtggaccctggagcctgaaaggagaatgacctgtatactcatataactttgtcccttttccccaggtatttttactcaagcccagaagggagaggctcttttcagccgatattaagaaacagcagctgcaggctagaagtaaaaaacaccatatgttcatgcagcagtttttttctggtttccaagcaccattagctggaggagagagggactgtctgcacttagatattccttgtgtgttgcatttgtattgtaaggctttcagtaggtgcttagtgaataaatcagttactcagaatgtattttatttttgttttgtagtctcctctaagccatgacctcattcttaacctgactcaggacgggatcaaactaatgtttgatgctttcaatcagagacttaaggtaactataaatgacaactaatgtttcatgtccagctgggccagtctttctggagctaattagtatgtgctattgtgagatgtttcaaaacttataagtaggtgtggacttctttggttcagagatcactacaatgtagggaactgaagctgtgcctgttcccctaaaaagagggaagatggaagtgggttgggatggtcagaaagaggctgggaagggctgctttcccaggctccagaggggaaggtgaaagagtgttgaagatttgggaaacatgctgtggggagggggctttcatgtccagtaggaaaacaagatagttttacttcattcttttgtcaaacactgtaacttggttagaaaatggaaactgttcttcctagaatgctggggcttgggttaacaataccagcaatgagttgattctttaaccctggggaggaaatgtaaaaaaacaacttactaatatgtagggctatcttaattggcatttgagtgcaatttgctaacacctgtttgagtccagtctggttttctttgtttttgtttttggtttttttttttttttttgagatgaggtctagctctgtcacccaggctggagtgcagtggcttgatcttggctcactgccacctc

SEQ ID NO: 83586 - DNA, 1048 bp, Homo sapiens
agacctcagctcagaggtgatgtgacagtctcctgggtcatagctgccctcccgctgacagcctctcttggcacctcttttcatgttttcatgagtaacagaggtgggacaaaccagataggtctgactccaaagcctatgctgaagagaatgccaaagagaccaccattttagagctataatgtattttttagaattacagcggggatgacatgcacagtccaaagttgttgcgcccccattatggcaaggcagcatgcctgcatctaaaaatctagaatactccttcctttctttctttctttcttttttttttttgagacggagtctctctctgtcacccaggctggtgtgcagtggcgccatctcagctcactgtaacctccacctcctgggttcaagcgatagaatactcctttcagtaagtctccttaactggcttccctttccctttttgagggtgtgaagaggacctgattcctggggcaggctcaggcagttttgctgatagaggagtagacaagcaaatgtgtggtaccactggcccctgcaggttctagttgtcttttagttttactggggccttcatacctcagggtctggtggcttctcttctctacccttttcttaagagtcactggtgtcataaagccccagaggatcaactctgtatatcagcctcatgagaactgaccttctcctgacctcattaatgctcttatttaaaagttctctaattaagctttgtattttgatataattagagactcacctgcctgtgtcttaaaaataactctcccagctactatctcacatgatctgtgggcccatcttgtgaagcctagtattaaaaaatatttttgtttttcagtggcgtgcattttaattctcaggccatagctcctaccattgaacagattgaccagtcttttggcgcaacccatcctggaggtaagccaagtccatctgattcctctggtcatcagtggcagttcatagcaataaacctgcccggtagtgccatcccaccccacttcctggagtcagg

SEQ ID NO: 83587 - DNA, 1399 bp, Homo sapiens
ctatgttgcccaggctggtctcaaactcctagccttaagcggtcgtcccacctcagcctcccaaatggttcttaattattaagaatctggtatataggctggacacagtggctcacgcctataatcccagcactttgggaggccgaggtgggcggatcacgaggtcaggagattgagaccatcctgactaacggtgaaaccccatctctactaaaaaatagaaaaaattagccaggcatggtggcaggcgcctgtagttccagctactcgggaggctgaggcaggagaatggcgtgaacccaggaggtggagcttgcagtgagccgagatagcgccaccgcgctccagcctgagcgacagagcaagactccttctcaaaaaaaaaaaaaaagaatctggtatatgaactctgagcccacttctgtgaacagttagacagttcacaaccttcacgttacgaatttcttaaaatgtgattttctagccaagacagaacaaccacttaaaggagtgtcatgcttaagctatggttttggggttttttgttgttgttgttttttgacagagtcttgctgtgttgtccaggctagagtgcagtggtgtgatctcagctcactgcaacctctgcctcctgggttaaagcgattctcatgcctcagcctcccaagtatctgggattacagacgtgtgccaccacgccaggctaatttctgtatttttagtagagatggggtttcaccatattgaccaggctggtctcaaactcctgacatcaagtgatccgcccgcctcaacctcccaaagtgctgggattacaggtgtgagccaccgcacccagcctgagctatagtttttgagagaattgagatgtggcagcaaagtcaagtgatttagtgtggttttttcccaagaggatcactgcttgaaacagcagggtggtcaaggatcagggtcattaatcatcccaggagacagcaggaggagcctgtcgagggtgggctctcagccaattatgtctgccaccttgtacagcacattcccagcagtcacactgctcactgcttacactgtcagcagggcaaatgatttgttaagtcagggcctcaaagggttatcgtcttcactgagagtttcctgtggcaagcacaagtttctcaacccactcatttctcatatccttccttatggaatatggctgcagtgatgcttttaatgcagggagtcagttcagccatctggtctccacaataatttgtagaaagatacactttggggaatcacaatctaaaaagtagctgaaactcttagtaattatacctggatatacttcaagcagagggagacagaagacttacctttgaagggtgccttccttacagcccccatctgacatccacac

SEQ ID NO: 83588 - DNA, 1413 bp, Homo sapiens
gctgtggccagggtggcccacctgcccttccctgttcctttcttgcacgcgctccctgcctgggcacaccaaactggttgaaacacagctttctaccatccaggtacatgcccaggcctggttctcacccctgttggagtcagctttcaagattgcctgtgcccctgctctgccccatcctggctggcagggctgcatgtttccatcctgtttgcctcttttatttaatgccaaagttttagccaaagacatcttcctacttttgttgtgtttcagcattctgttctgcactgtgggctggctctctgccccaaccctgggcactggcccctggctgggccatttcatggctcaaagcctctgggggctcaaggaaggctgggctgctcagtcccttcatgggtcttgctaatggaaagtagcatatatgtgctttaaaaatattaatccttttgaaaagaactgagaagaaaaatgtataattttatcccatttttaatattttggtctagcaacttgtgatacatagatgacaattttgtgagtttttcaaatgtgtgtacagatttttgtaaatatgactcttttgtaattaactcatgtacagcctcatcctgtatagtttaatgatgaatgtgcaggggacctgtctcaggctcctatatggttcctgggccttatagccaggtttgtgtggcgctcccgacttttgtgactgactggtgtcttcccatttggactgtggcctggccagagccccttgcatatccccactgtcaggggcagccaggactgttcccatcctcctggaatgggggaaccttccttatcccctgcccacatcccctctccaataaagcacctgtgccctcagcaatggcctgccatgtgctgttgctgggatgtttgtattaaggtaagtgtgggtattggttttttgagcaagggggtggttgaagcatatggggaaattaatagtggtggcatctcaggggaagacattccttggctcctctgaggggatacagcctccagtgggagactggcattgttgtgtgagttcaggaggtgaggaaagactaggtaggaccgtgcactcatttgtcccttatgtgtggctccatccctggtgctcagccacacctgggcccaggagaggttgtgggaagcataatatctgttttcagatgagctatggcaaagtgcctgccaggttcatgaattcaggctgtggcggccggagcccctccacctccctgtggggcctggccttgagagcctctgcatacgtccgcgtcagcctagggggttccaaatccagcagagtggtaggattccctaagtccctgccaccacaccagaacacacctctgtgctactaggaggaccagacatatccactgctctgggacc

SEQ ID NO: 83589 - DNA, 1015 bp, Homo sapiens
aggagcccctgagcaggccggttccaaatgcgcatgaacctggccaccatcccgggcgggcctctcctcagcagccctgattccatcaggcagggtgcatacgctgcccccgagacacatggctgtcttcttactcctggttctgccatgctccccacccccagtaaacacacgcacgggacaaacaaggcagcccacccaatcctcagggcaactctgccagcagctctcattcatgcccagatggggacactggggggctcttcggggagttaagtgacttgcccaggatccaaaggccagaaagctctgcccccaggtcttctgaaattcaggccaggattattttatctgtccttgccccgctcattcatccactgggatacagaacagggggccaacccagtctgctttaatttcacaggcaagcacttcagcctgtctccccgggggctaatggacctgagcccaagccaggtgcagttctgagtcccctggtccccagcatagcctactgcaggtagaaatgatcaggcctgtgcagctgcaggtcagacagggctggcaaggatggggacagcttgggaagactcctggcggaggccttggctaaaggattgctctgggatgcaggtggacagaggtgctctgcaatggagagctaagtccttgcgcagctcagctgccagctctctctttcttggtcccagcccatgtggtggagcctggaatagacagcctctactggtctcttaagaacccagccccatcctctgtccaagggctatatctgctcctgacggcttcttcccaccaatgttcaatcttaaaaagccacctctctggctgggtgtggtggcttatgcctgtaacctcaacactttgggaggctgaggtgagtggatcacttgaggtcaggaagtcaagaccagcctggccaacgtggtgaaacccccatctctactaaaaatacaaaaattagctagacatggtggtgggcacctgtaatcccagc

SEQ ID NO: 83590 - DNA, 2352 bp, Homo sapiens
gtcttattcggaggctggacatttgctactggtccctgaagttttgcggctgcacccacagacagcaatagcgccacgttccctggaaggcgcacgggacggaagcggaagcagtaacgctggctccggctgcccggcggccaggaacggaagcggaagtggcggcggcgccggcctggcctggcctggctgaggggaggcggcgggcgggcgcgatggcggaggccgggccacaggcgccgccgcccccgggcactccaagccggcacgaaaagagcctgggactgctcaccaccaagttcgtgtcccttctgcaggaggccaaggacggcgtgcttgacctcaagctggtgcggcctgggctaaggggagacaagggaggctggtggaccaggcctgggccggtagcgggaaccccgggggcggcccagctgggtcctccgagagccggccgccatcgtgtgctttctcacaggagagaagccgggggatgtttcattcattcggccgaggccatcgagctacagctatgggccaggctcgggctgcaggtgttcgtcctcgtggcccttcctggctggcgaggagaagagctgcctatgggacagagctgcggtcctgagctgcagtagcgcctgggaggcactacagggttggaatccagattactcccttcccagaccacgtctcagggtggctgggggtacaccccagagtggggctgagcattctccattctctctgccaggcagctgacaccctagctgtacgccagaagcggcggatttacgacattaccaatgttttggaaggtatcgggctaatcgagaaaaagtccaagaacagcatccagtggaagtgagtgggcatagtgggagggtagtagagtctcccacccagaagtgtcgggcgtggggtggagggtgccgaagaaggcaggggccatgggacccagagttctcagcagtccctctcagccccactccctgggctcaggggtgtggggcctggctgcaatacccgggagattgctgacaaactgattgagctcaaggcagagatcgaggagctgcagcagcgggagcaagaactagaccagcacaaggtgtgggtgcagcagagcatccggaacgtcacagaggacgtgcagaacagctgatatcctcctggcggtccctgctggggggagtgggcaaggggccctctggttcaacttgccctgagtcctgttcctcttgggagtttgtcttatagccactggccatggcccagcctcaggctccctcctcagagcccctccccttccactcttagcctgtgatccctcccccggtggacctgagtccccagaacggtctctgagggcctgtgtgtcagaccttagctaaagaattgggtcttttctgtagtctgccatctgtcaccatagggcatcagccattctccttaaccctcacactttggcctacgtcactcatgaggacatctgcagatgctttgctggtgagcagagcctgggtaggggtaagggggtgggctgggctcagccaaagtcctgagcactgggctcagtgtcttaggagagttctgtctcttaagagggtttctggggcctgctcagagaggaaccaggcagggtaagtcttctgtctgagtgtcactgggaccctgtggaggtcagctataccaaaagggtacagaaattctggagtgggtccctgggtctgttcccatctctactgtttcctggatttggcttcttgggtatgatagaggcacaagggggagagagggagagaggatatgtgtgtatttgcttgtgtgcaggctcttacatgcagggcatgggggtgcccacttccaacttgttagtttagttgcattgtgaatacaggatctgttcctttttttttctttttaagagatgggctcttgctgtgttgcccaggctggtcttgaactcctgagctcaagctgtcttccctcctcaaccccctaaagtgctgggattatgggtgtgagccactgtgccccgctgatgtgtttcttctccatcttgtatgctcctgactggtcatgggaaagggatgttggccttggctagaacaccctcacctagggatcagccatcggtagaggaatgaggtgcctgtggccagtgatctttcactccacataattgaacccagatttcctggttactgaccctgggctctcaggaagagaagagctttagctctgcctggccactatgggggatgggtgaggcccactgtctagttcctcagggaccgtgatctcctgccttgctccaaaaggcaggcacctctgttcccagctcagattgagccc

SEQ ID NO: 83591 - DNA, 4044 bp, Homo sapiens
ctaattctcgtacttctaatagagatggggtttcaccatgttggccaggctggtttcgaactcctgacctcaaatgatctgcctgcctcggcctcctgtagtgctgggattacaggcttgaaccaccatgcctgcctgaatgggccctttttaacagggaacctctgactgtgggaagagccattgctggtggcagttttctcccccagatccacatccactggtgtctcaattgccctggtagcccgtcttgaagtatggccacagcagacatgttgaccacgagtcttcttctgtaggtcttgtgtccctgtctcctgtggtgactaatttcaggttacttcctctgggggtgactggcaatgcctaattctccttgggtctgggaaccaggcttgtggtcctcctgtgtctgggttccagcacagccagtttcaacgacctcttcctgaccttgtatgactgggtttgggggctatcattgtagtgagtggcggccctgggactgatagcaaggacagtggtgagctcagttcactcccactgggcccaacaacactggacacccggccactgcagtcttctgccctgctggacagcagcagcagcagcagcagcagcagcagcagcagcagcaacagtaacagcagcagttcgtccggacccaacccttctacctcctttgagcccatcaaggcagaccccacaggtggtgagtacctgccccctgggggcagagagagagagtctagcctcagtccagtcctaggtcagaaaacagaattggggatggaacccagatctcctgtcaaccctgctggacacgagagctctctgccagcacctctgggtcagtgctggtgccccctctagcaccccatcctaggctaacacagaactccctgccgtctctcaagccctttcctgccaccccttggagcaccgcctcactaattgacacttctctgtatcactctctctcatcttctctgtctcctttctgtctggactccttgaaaaagtaatctccattcattagtctcctagtcacctttcaggttgcagcagtcacccccccagccccagtgttacagcggtgttactcttgagaagctgccgaaggcctgccgagcccagcagcctccagcgtgttttgctggtgctctcttggtctgtgtcaatattctttcctcctttggcatcatgatgccagcttttggctctcctatctcactggcttcttgaactcttccctggcgtgtccttaaacattgctgtttttgagggctctgtcccattccactcctggagagggctgcagctctgggtgaacgaatccccagcctccgcctggcctagatcttttcccaatctgcacacttcggtgtccacctgccgtcctgtgtacatccaatggacactttattcctgcatgtcctcaactgaacttagtttcctcccgaagcttgctttccacctctgcgcacccagccgtcagccctagttatccaggcctgacccttggctctcactctagttctagttccttatccctcctccttctgctgcccaccccatgccagctaactgaggtctgtcccagatgtcccctcctatcctctggtatcctcagcactcaggatgacccctggccacctctgtcctggattcttcagcatctttctctttaccctgactgacagactaatctttctgaaatgcaggcctgacagaaaaatgtggcatttctctgtttgcaaaagtacctttaatggctccttgagggccaccagataagatctgaactcctgagcctggcatgtgaaatccctcatagtcctctctggttgcattttcttctgcttcccctgtgtcctcctggccagaggtttgtagtggagtcatcaccctgtagcgccaccacctctgcctggtgacctgacccagggtctggtctcagtcttgcacagagcaggtgctcagcaagggtgggacagatggggtaccttctgtcagacagggggtgcatgctgagcccagaaagaggcttctgtggcctttccgagttagaaaagctgtaccaatcgcttgcagggggcctttggtaccctgggctcagcactgaggaattcaggtttagcaagtgaggccaacagacagtgccagcttggcctaggcaggacctacatctccttagctgtgtggagcctcagggtgggtggtataggatccgaggaagccagggggctgtagtggggccaggctggacctctgtgccctgagcatggctttcttgtttttcagttttggaactccccaaagagctgtcagaaatctttgatcccacacgaggtaggctgctgcattcctccctgaggctaggggtaagggacacagctcattgggtcctatggctgttttcttgcccttttgaggaccttgttgtggcgcttatggtaactggggcaaagggtgaagttcctgatgggcaggtggggttccctttcctgggctttggtgggtggagaggtgggagctggaatgttagtaactgagctccctccattcccagagtgcatgagctcggagctgctggaggagttgatgtcctcagaaggtgggtggccctggaaggtgggagtgggtgtgggcaggggttgggctgctgctaggggagccctggcccagggcctgagactagtgctctctgcagtgtttgcccctctgcttcgtctttctccacccccgggagaccacgattatatctacaacctggacgagagtgaaggtgtctgtgacctctttgatgtgcctgttctcaacctctgactgacagggacatgccctgtgtggctgggacccagactgtctgacctgggggttgcctggggacctctcccacccgacccctacagagcttgagagccacagacgcctggcttctccggcctcccctcaccgcacagttctggccacagctcccgctcctgtgctggcacttctgtgctcgcagagcaggggaacaggactcagcccccatcaccgtggagccaaagtgtttgcttctccctttctgcggccttcgccagcccaggctcggctgccacccagtggcacagaaccgaggagctgccattaccccccatagggggcagtgtcttgttcctgccagcctcagtgtcttgcttctgccagctccttcccctaggagggaagggtggggtggaactgggcacatgccagcaccacttctagcttccttcgctatcccccaccccctgaccctccagctcctcctggccctctcacgtgcccacttctgctgggcctttagccctagaacctgcaggtggtgggggcggctaccaagaaggaacagaggtctctggggaggagtctgggtggtccagccctgatgattggccccacctcctgctgccccataaccctctcttcatttcggctttttcatttaccctcatttagagccatttgcagagatttagaaagatttacagtaacgaatggattcctatataaagattatttttatactttttgcagcaaaaggaaattgtaatatttgtacagtgttcaagtgaataaaaaccatgcctaaggctagctctgatgtggttctttggggaccctccttgggactgtgctggactggcagtgtgattgggtgggtcaccttgctggaactaggggtggggcggcctccggcagcctgccctccccgcccccacctgccgcaccttggtgtggggcggggccgcctcggcggggcggggcaggcggagccgtcctaccttcctacccccagactccaacccggaactaacctcggctcccttgggaaggccgcgttgcatggccaggagcagcagtctgggccgcgagtgcgggacaccgaggtcaggtctcggaaagggaggacctcctcgtccccaggggccccaggccaggtgcacccttggccgcaggtgcacggtctccggaaagtgcaggcgcccacgtcccagctggaccatggcgcctccg

SEQ ID NO: 83592 - DNA, 1043 bp, Homo sapiens
gcagcggtcgccacacacttgacatgtcagctgttggctgcctcgtgggctgggccaccttggccacttggacctcctaggcccagaatggggggtttgtggggggtgtgctggcagcaacagcagctatctaggctcttgccctcctccagactgggtcccaagttcatttctaactgccaatcataggcatgaacactggggagtccctccctggtgccaaaggccccccaccaccccgcttcccctctcccgctgtcctcagccctggagaggaaggaaggggatgatggtgtgctcaccttcaatgaagagcagtgggccaggctgagggaggccagctgggatggagccccgtgcatacagcccagggcctgggccagttcccgccctcggccatgtcgaggctctgcagctcctgcaggccacccagagctgtacatcctgcatctgtcagccgctgcagcttccccaggctcaggcgccgcaggtgccgcaggccccggctcacggccaagagcgccccatcagtcagttctgagcagccactgaggtccagggaggtaaggcctggttgctggaagcacagggtagccacagcctctgtggagaggtcccggcagctgtgcaggctcagctcctgaagctgcagcccagctacctggcccagagcctgcagggcctcggggggcaagccagtgccactcaggtccagggcacgcagcctgccagcccgctcttgcactaatcgcagcaggttgcagaaggagaactgggcgggagaggagtcttgggggccgatggagcctcaggctgggcctagctcgaaggtgaggtggcagtatgccaaggagaggcgctccaggctgggggcacagctgctgagctggttgaagctgaggtcagccaggtctcgcaggccagccaggttgagctcacggaggccgctcaaagcctgctggacgctctgtgccatctctggctgagccagcagtgtgcccgaggtgaagaggctattgcagccactgaggtcaaggacacac

SEQ ID NO: 83593 - DNA, 1049 bp, Homo sapiens
cagggcatggcagagtgagtgtcccccaccgccagcccaggtgagcggccccagggctggggcccagatagcccaagaagcacagctacttgtaacttgaaaagggtggaagggagttgcaacttgaaaagggtggaagggcccatatgctgtctttccagctttatttctatccacaggcaccttaaggatgtgatcctactgacagccatcgtgcaggtgctcagctgcttctctctctatgtctggtccttctggcttctggtatgtgggctgggggcgctcccaagaaggggcatctaaccctccccatcttttattccctgcatcttgcttcaagttaccgtttctcttgtaggctccaggccgggccctttacctcctgtgggtgaatgtgctgggcccctggttcactgcagacagtggcaccccagcaccagagcacaatgagaaacggcagcgccgacaggagcggcggcagatgaagcggttatagccattgacattgtggccacaggccactggccctgggtggctctgtcagggtgcacagcccctcatgcctggagcaatgagggtctagtccaggggccaaaagcagtctgaggtattgggtatacttatactctatagggtcgttgaataaatggcttagaatgtggctgatggctgtgtgggtgatgagggatgaggcaggaaaagctggtcctatgggatttccctcctgctacaaacccagcctggtggggaccctgaaagaagagaaacctgttggattagctaagaaaattttattttgctccgtgcgttcaaggagctcacacacatgcacatgcatatgcatgcacacacacacatacacacacactcacatgcatacacacacggctaatactgctcaaggcatggctcctgggcacagagttctggggccagaattctgctctgggccctcctcactctgtcatctcctgcactgcagtccagggtccagatagatttccgggatacagcaccttcacacctccaggccaggacccttgcttagt

SEQ ID NO: 83594 - DNA, 1111 bp, Homo sapiens
ctcccagaagctaccagacatgccaagggagggacagcctgatatgcccattgggacagctatccccttcccctgctctaagagtccttgtctagactcaagacaccagcctgggcaacacagtaagacctcatctctacaaagaaattttttaaaatttggctgggtgcatcattcacacctgtaatctcagcacttcaggaggctgaggtgggaggactgcttgaggccaggaattcaaggccagcctgaacaacacagtgagaccctgtctcctcaaaaaaattaaaaaatcagctggacgtggtggcacatgtctgtagtcccagctacttgggaggctgagggtcaagcccaggagagtgaggctgcagtgagctatgatcacaccactgtactccagcctgggtgactgacagagtgagaccctgtctctaaaaaaaaaaccaaccaaaaaaaaaccaggacagtgaacatgaacgaggttgcaagttagatgttaagtagatcctctccctgtgttttcacctgggaatgctgggttggtagtaatcctccccagatgtggaggactgaagaggggctggccttggggggggtgtggttctggtctgctcagcgcatggactgttccctgtgtgtctgtgcgtgcctgcaattgggggtggtgtccaggggctcagcaaggcatgtacacctgggctggggtgtgtcagacgctgtcagtgacaagcaccttccctcagagcccggttcctggagaatgtggcggcagcagaaacagagaagcaggttgcgctggcccagggccgggcagagacacttgccggggccatgcccaatgaggcgggtggacacccaggtgagtaggtgggtgagcaggcagagcctgcctgttgctttgttgccccacagggggcatggcactgacagctccttccctttctttagatgcccggcaactctgggactccccagagacagcccctgcagccagaacaccccagagccctgccccctgtgtcctgctccgggcccagcgaagccttgcaccagagcccaaggagccactgataccagcaagccccaaggctgagcccatctgggagct

SEQ ID NO: 83595 - DNA, 1014 bp, Homo sapiens
tgatccgtgtgggtgctgctgccgaccacaactaccagagctacatccttagaggtcagccccgcccctctcccatgacctctgctccagcgaccctcgctgactctgcccatccctgtttccccagcgctcggccagctgatgctctttgtggatggaatgctgggggtggtggcccacagtgacactattcagtggctgtacacattgtgtgccagcctggtaagtggctctccactcagccttataccctttgcctgttgcttctctctgggcctcagtttcctgttctgcaaagtgagctggaagggagtgagtctgaggcctctgtaagcctataaggcacttcagtgcctgggcctggggccagggtcattctgcctagattctctctgggtccagccccagcagcccttccccttccccagcaacagctggcacaggtctggcctaagccccactcatatgtactgacctctctcctcagtcccgcttggtggtgaagacagccctgaagctgctgttggtgtttgtagaatactccgaaaacaacgcaccgctgttcatccgtgcagtgaactctgtggccagcaccaccggtcagagactgtccctttctccccccaccgctcagagccctctctcctacctgttcccccatgactgctccactttctgtgtggcaggtgctcctccctgggccaatctggtgtccatcctggaggagaagaatggcgctgaccctgagttgttggtgtacacggtcaccctcatcaacaaggtgtggccaaggactgggtgccagctctgggatgctcaggctcctgacctccccaccaacctcagccttgccttcttatccccgccctccagacgctggcggcgctcccggaccaggactccttctacgatgtgacggatgcactggagcagcagggcatggaagcgctggtccagcgccacctgggcactgcgggcactgacgtcgacctgcgcacgcagcttgtgctctac

SEQ ID NO: 83596 - DNA, 1077 bp, Homo sapiens
acctcagcaatatttcaggagctgcccccagagctgtcctcagcaccctgaaaccctctgggtgtaggctgggctggaagtagactttaaggcctggggccaccagctctggaggccgcagcactccagaaggtgcattagagagcccgctagtcagagcacgttccttccaccttcccttccaggagacactgaatgggaagcctggagatctggactcttagcccagcactaccattcaagtcttcaggcctccctgggcttcagctctgagagtctgacatcctgtaatgggcaatgccccctcctgcagtatgctcaaaccctggaggctgagccccctggaacccttccccacttgccatgtctctccatcctctcccagggtgaccatgtgtggcctgggctgtaagaagtacgtggaggccaacatctcccataagtcacgcacaactgtcaaatatacaatgaagactctagccagctgtgctgagaccgtgatcttcatgctgcttggcatctcagccgtggactcttctaagtgggcctgggattctgggctggtgctgggcaccctcatcttcatcctgttcttccgagccctcggtattgctggcaccctctgctttcccactctccttcctgtcccgcccctccctgcagctcatctccctatctgagtccacatctttgtcaattcctaagcctcctcttgttgctcacctgtcccagcccctgttagacctcagcccagatacttggtcccatccggtcccacgtcctccactcccaacgctttgctcccactggcctccctcccgctgtaggcgtagtcctgcagacctgggtgctgaatcagttccggctagtccctctggacaagattgaccaagtggtgatgtcctatgggggcctgcggggggctgtggcctttgctctcgtcatcctactggataggaccaaggtccctgccaaggactactttgtagccaccactattgtagtggtcttcttcacagtcatcgtgcaggtgggagtgcccacaaggctgggtagggagagggttgggcaggccct

SEQ ID NO: 83597 - DNA, 1034 bp, Homo sapiens
aaatggctgaaggtgaagaggagtgagcatcacaaacccaccctgaaccaggagctgcatgaacacgtgggtatcagaaccccagccctcgcctgtccctctcgaccttctcctattttgggcagagtcctgatccagtccccctacccaccccccttctagacttttgaccacattctggctgcagtggaggacgttgtggggcaccatggctaccactactggagggacaggtgagggagctgccccgaggctccttcagcagcagcagccccaccagccagggaagcatgggggatgtgccacacttctgagaagggacagagccaggttcaggctgggtgacctctgcctgaagcccttcagtggcatcccagtgctctcaggttaagacaaggctccccagtgtggcctgcttggccctgcatggtttggcaactgccagactccagcctcatcatgctctgctctgtctttgactgtctgcctgctaattccatggaccctgtcttagatcctcaggacccaccatgctcccccagcctggccactgggaccttctctgtactagaacactccttcacctccctctcacttactcagcttcgattcatccttcacaactcaccataggcttcaattccttagggaggacttccctggcctccctggctaggacgtatctgtgtcatattctctaattatcctttgtagttcttgtcatggttgcaattttacagtgatttgtaataatttcagttactgtcagcctttcccatgacattgtaaattccatgagggcagggactagccttgagattctctctggctgaggcccatatctaaaaagccaggccagtgctgacggtgtccttgccccgtctgaggaagggccacctggccaggccttgggaatgggactcagggccgggcctggcatcctctgtaggtgggagcagtttgacaagaaatacctgagtcagctgctgatgcgacgatcagcctaccgcatccgggaccagatctgggatgtg

SEQ ID NO: 83598 - DNA, 1011 bp, Homo sapiens
aggagttcgaaaccggcctggccaacatagtgaaaccccgtctctactaaaaatacaaaaactagccaggcgtggtggtgggcacctgtagacccagctacttgggaggctgcggcaggagaatcgcttgaaccctggtggagtttgcagtgaggttgcagtgagctgagattgtaccattgcactccagcctatgtgacagagcaagactgtgtctcaaaaaaaaaaaaaaaaaaatccgggaaccagaggttgcaatgagccgagatcgtgtcactgcactccagcttgggtgatagagtgactctgtctcaaaaaaaaaaaaaaaaaaaaaaaatagaaagcaggcatacaagtacctatgttatagattttgtgaattcgatatgtaaagtgcctagcagagtacctggcatgtcaaaagagtaaactaagtgttcgttattattattttctttattacccctgactcctgggcaaccctccatctgattgctggctgaccttggtcttgacacctgcagggaggccacgtcttgtcttccacaggtctcactctgccttctatgcccagccgcaattctgtggcagaaacttctgtcaccaacctgctgtgagtccttgagccccttccccttcctcatactcctctccattgtgccctctctctgagtcccttctgggggagatttgtcagcaccttttcatctgcccttctcctggactgcctcctgccccctctccagcacatgtgtcccctgcctcctgcaggagggagagtggcagtggagcgtgtctggatctgcaggtgattgacacagtacgcagcggccgggatcgtgaggatgctgtgatgcatcatctgctctgcggaggcctctacaagccgcgccgtagggtgagagcaggcaggcatcaggattttgagggggtggaggtggtctgaggagagcttaagaggcagttggcgccagcttgttggagagctgcagatgcccagctaaagagtgt

SEQ ID NO: 83599 - DNA, 1093 bp, Homo sapiens
ctatctcccttgctatttatttattgaagaagctggatactttctcttggagaattgcacattttctagattttgctgactgtattccagtggtgttgtttaacatgttcctccgttccctatatttcctggttgttaaatctagaggcctgatcaaattcagggacattcaataggtatgctatatattttctgtggtgtcacatcaggaagtacataatgatttggtgaggtgtgtgtgtgtgtgtgtgtgtgtgtgtgtgtatgtggtgtttatgtataagattggtcaatgggttcagtccaatcggttcatgtgtagtctgttttttaaaaatctggaataagtttgtgtgtatcctgttaaatgtcatcttatttgctttagcccatcatcccattgtttggttcccatgtctgccaccaaatgtctccttcttagattcatatcatctgaaaatttgttaagcctgttaactttgtattcatccaaatccacataaacatgttgaacaggatagagctgaggacagagccctgtggcatgctactaaagactttcctccagactgacatggatcaagcatttttggggtatggtaactcaaccagttctgaatccacttagtatgataacacaatccacaatttctcatgttcttcatcgaaatatcattagagagagacagagatatctagttttcagttagaaagataagattatagtttaatagagagataagggctggagagaaatttggaagcaatctgtatcaggttttgtcacctggctaccacagaatcccctggggaacttcctggcttcacctggagattctgattctgtagtctggagtgggactaagaatctgtgttcttactaagttccccaggtgattcaaatgcagctggtctgatgactgatgttgggggaccacagatctgtatcactgggatagctggggcagagagaatggataagttctctgaggagagtgtttcatggggcgggaggagggctaaggataacactgaggagtgcgcatgggagaaaaggaaagagagccaaagacaaggaacccttggagaagca

SEQ ID NO: 83600 - DNA, 1059 bp, Homo sapiens
accacctccctgctcctaacccctgccactttctgtttcattaaggcctctactctggctcaggacccagtccaggccttctacgggctaggcccagagacttgggttgctggtcccccttccctagtgggttttcccggggactctataggcagctgctcctgcccgcaaagcaagagcatcattcctattcttcagtggatgccagccttccctgccccaactccctccccagcactgggtcagtggtgtcctggcagtgaggctccgtgaggggctggcccttagaggaactggggtgggaggtggggcaggcctcacccttgggctttgctgccctgttgggtcagctacccatagtccatttttttagggcagtgggaacctctgcctccacttcctgctttagccccttccctttgctgccaggtattggggtaatatttcctccttttccaagaccaaggccaagaggctgggccaggcttcagttcaggcctgttgcttaactggggtcaccctgggatctgctgctctgggtctaagtctagacctttctgatccttgggtctgggttttttgaggaggggacatagtggcctctgggctgccatgtcaccacctgaacattccccaaacagagaaggaacccagcatctcagggccactgctccattgctctgggggctgggatgcctggctaagcaggggctgacagggtggcaggtgactttctagggatcagcacctgccctgtgttttgtaccttgaacctaagatatattaaacatctctcagatggatgggtgtcttgtgtccatgtgtcagggggttcttagggtggggggcaacaggggcatctggtgaaggaggtgagaacccaactgcctgccccagggattgagaatggaggggaatcctaggcaggactattcatccttctggtcccctgtcatgcattccccaatacttttccaatattgtccccttagcaggggtcctgcagtggtggtcaaggggatcactgttttggcatcgagtcacagaactaaaagtctg

SEQ ID NO: 83601 - DNA, 1029 bp, Homo sapiens
tgagtgcaagcccggcccccagatcttgccccagcccaccatattctatgccaggactcatctggctagctcagaacctggtaggactgtggtgccaggacagggtggagtggtgcaaggcagggggtctaagatggtataccctacaccaggacggcaatggacaaggctgacgagctatatgaccgggtggatggattgctgcaccaactgaccctgcagagcaaccagcgaatacaggccctagagttggtccaaacactggaggcccgggaaagcggactgcaccaggtcggaactacttgcccagagtgggccctgccccgatctcagacgtgagcccccagtccatagcagctctcttcacttttccctgcttgtgctcctccagattgaagtgtggctgcagcaggtgggctggccagcactggaggaggctggggagccctcgctggacatgctgctccaggcccaaggctcttttcaggagctgtaccaggttgcccaggtatatgtggtcacttgttcatgccacgggtattgggatgcaatgccaggaactaggaatgcagaactgtgtgaaagcaattcaatcctttgctttcttagaccttatagtcccatagaagatatcagttgtaattaatcacagtcatatatgtgcctgtaaacccaggcaagatctctggagagaatcagtgcaggtgattctgcctgagggtataaccaagactttacccagcaggagtgtcaggcaagctttttttgggtgatttttgagctgagagttgaaagataagttgaggtcaaccaggcagaagagggttgaggatgggggcacattccaggcttggaagatagcatgtgcaaaggtcctgtggcaggatggaggacggtgtgcctgaggaatcataaggccagtgaggttgaaatgcagagcagagaggaagaaagagttgggggagttgcggtgggacaagcctggtcagtggccacatcactgggccctgtagcagtcagtgtggagtt

SEQ ID NO: 83602 - DNA, 1053 bp, Homo sapiens
gcctagaaagaactccaagtggcttcgaatacctagctcctgctgcatttcctctgctcctggagcaaactttctgatgggcacacctgaccccgtgctcttgtctaaaatccttcagacgctgctcactcccatcctggtcagaatggagtaccacgtcctgaagctggcccacgaggcctgtccttatgacttctgtcttcagcctcatcttttatcacgtctgcatgtgaagcctggcctccagctagacccatgccctgcgcttccaaacatcctggacttctccttccttcccctgctgactccccagccctcagcctcttttgtgctcctgcttcataggcacctccttcccacagcactcatcccttcgccgtgtgtgttctcctggcccctccagccatgccaatgtgccagtcatttctgtgtctgctgcctggcacagagatggcattggtgagcgggggggtctagtcctcctttgtcactaacttgctctgccatcttggccaaagagtttgccttctctgttgtgaataagacttagatcaaagggggacaggactcacctctctccttggtcctctgcttgctccagtccttcagggtgccagctctttttgggggtaagtatggcttgaaggttggctctggccccttgtctttcgctccagctccagcccctgcctgtggtcctggatccttctctgaggctgtggaatgggctttccaggcagctgaggtgctgggctgggaagcagcctcgcttcccaaggggagctgcagggtggcctcctccaaggggctgctccgtgtggctgtcagtggctggaattcccactgtttgcaattgaccatgtcccattctctcaccagggagatgagtttttgcatgggagtggcgggagggtctttggtttcagatttctgtgtgaggttgattgtggtgcatttcttctttggggggctctcagggtggctcccccagtgtccaggattggtacacaagccacggcagtgtgagtatgtgctagggttgccagccctctt

SEQ ID NO: 83603 - DNA, 1024 bp, Homo sapiens
tttctagacagtgggaataaatgcaaaagtcctgaggctggaacatacttttcatgtacaaggaacctcagggaggccagtgcggcctcagcaaagaaagtagagtgtatagatgaagtaagaaagatgccagacttttttctgggtgagatcagaaggagttggagagtttgtagcaagggagtgatgtgatctcacttaagaattactgtgaatgttgggctgagaatagactatggggaggagggtagaaatttttttaaaatgctttggagagattggaatcagcgtaacagatgatgatggcttgggctagacagatagcggtggaggtggtgagaagtagtcagattctgaatatgttctgaagatgacactccatggtttgctgatggatccaggataaagtgtgggagaaagagggtcaatggtaattctgtggttttgagtctgaataactagaagaacagagctttcatttactaagatggaaaagaatgggaggtagagattttaagataaatatcaagagttgggttttggacatcttaagtttcaggtgccttattaaaactttccagagatgccaatttggtaattggacatactagtccagagtttagggaagaaggtatggctggaaatataaatttggagattataagtgtatgggtgacagtaaaactctgagactggatgaaatctcaccaaaagagtgaatatagatagaaaagagatctgaggactggtcctgagccctccaacaattagaagtagataaagagaaaccatcatggagagtgagaaagcagcagccagtaagatagaggggaaaaagccaagaggaagtaatatcctggaagccaagtgaagaatgtgtttcaagaaggagggagtgatcaatgctaggtcaaatgcttctcctgatagggagggagggagcctgggactgagaagtgattatggtatttggcaatgaagaagacattaatgaacagcttcaggggatgcatgagaatgaaag

SEQ ID NO: 83604 - DNA, 1001 bp, Homo sapiens
gctgtttcatccctcctactgctgtgaaagtggagagggggccaactctccaaacccaaggcactggtcacaggaaggcaagctttgatgtcaggactcccgtcaggcccagctaaaaggctttggacttccccaggagtctcctcagacagaatggctctgtgctaacagaaggggactcatgagtgcctttttctgggcaaggctgccaggggaaggggagtgattagcagtgtgtggcatgcagcggggtgatgacactgagggggtcactggagtgtgaatgtcattcccccatcatcgtcaaccaggccatattggtacaaaaggtgtctttattgaggtctgggttaaaattaggcacttggccagagcagcagcttaaatatgaggcaagcagtcaggggttagccatgcctggggctgggttggggtcatgaggctacaggcacagactgtccccaggtggacagaagttggagcaggaagaggaggaggaaggggccgcagagcagcctgggtcagaggcctggtgggccagcccagtgggactaggcaggaagctctgggtggcaggtccagcagggaggggaccaggatctcttgctccacgtgccccttagacccaggcctgagcctctggcaggggcagccgcacttggcagggcggtcttcccaagcctcacttcttcaccttggcatcgtaggtgcctgcattcttgtaggcgctcacgtagccactgtcgtccaggatgtcctgccgtcccgcaatgcccttgcccttgccgctctcatcgaagcgctccttgtgggagcccgtgtatctgctggtgtccgtcagccggtctacagcaccccctgtttttgctttctgtttggacagagtttccccaggggcacctgatgagggagcccagcccttcccacccacagccacgattccccacaccccattccgtggccacccgagaccagcagggcacttacagtgacgcccacat

SEQ ID NO: 83605 - DNA, 1098 bp, Homo sapiens
agccagcttggcatggagcttccagggagggggcctgctctgccaccctcacttccacccaagcaaggccttgtgccagggccagacaaagccagggccccagctgctgccctaacagtctttctggacagtgccactctgttccctgtgggcatcattatttcatctgctgaaccctgctgagagccagggctggcattagtgacaagaccgtgcctcccggggctcttccttggggctctgtggcccagggcgacagtgacgggcccctctccccaggcagctccagcaccaactctgtagcagaacctgcccaggtcttgcaggtttgaggtagaggctgggatgttctgggcttgggggaggggaagggcagattggctgggagatgacccaggtgggtctctatagggtggcatggcagcgagcacagacatggctgggctggaggagagcttccgcaagtttgccatccatggtgaccccaaggccagtgggcaagagatgaatggcaagaactgggccaagctgtgcaaggactgcaaggtggctgacggaaagtccgtgacagggaccgatgtggacatcgtcttctccaaagtcaagtgagccctaagcagcccctgcttctcatgttcccaggaggtggggaactggggggctggaaccagggaggacatcaagaaggggtcagggaaacaccatgatcacgaaggtcgttcttccagggcaaaccttatatctattgccctccagagttgctgacccctgcgacttccccaaacgtgggaaagaaacgcaattgcataatttgtggtggcagcaaatgtgtttgagctttcccctgggggagaaaaaagaaaggggaaccctcatggtgcccacatgcctgtcagggggaagtctgctcgggtcatcaactatgaggagttcaagaaggccctggaagagctggcgaccaagagattcaaggggaagagcaaggaggaggccttcgatgccatctgccagctggtggcaggcaaagagccagccaatgtgggcgtcactgtaagtgccctgctggtctcgggtggccacggaatggggtgtggggaa

SEQ ID NO: 83606 - DNA, 1014 bp, Homo sapiens
agacagtgactgatgaagaaggcctgcaggaagcggcgccgcaggccttcaggcaggtagtagtggatgaagtacatgagccccaggccctggccggggtaatagcggcggcggggccgagctgccagcagcgcatctgtgatggcatctacaactggggtgaggtcggacatggccaggcgtagcgagtgcaggaactgcccatgcaagtgctcgatgtagtccttgccgtaggcctgcagcagctcttgaggcaggttggccagcagcaattgcttgcgcttttcccactgacccacgtttctcactgactctggggaaggagtggcaaggtcagagtgggatcagctaggggagccaaagccaattaggactgtttaacccgcgccaggtctgcagccaaaactacacccccaaccaaaaccatgaccattcatcaaacctgacctgcccccataagaccattcccagccccattccccacccccaccccacccccagccctgattcccacctgtcttgaagcagccaggctggatgatgctgaccttgaccccccagggaaggagttcacagctgaatgtgtccatgagtagcgccacggccgctttggaggttccataggcccccaagcacggatatggcatgtcccctgcggatggattgggagtggggcagctcagctttggcaaggggctccctaagccctcccccaccccagggggctcctttttgctccagtgggggggggcactcacccgctgggctccccacagtcacgatgcggccccttgagctgcgcagcaggggcaggaggcccttggtcagctcgagcgcgccaaagaaattcacctccatgcagctacggaaagtggccactggagacagctccgcatcagcaactacttcattgtggcctgcgttgttgacgaggccccacaggcctggggtcacagagcagaggagggaagccttaggtcagcccagcagcaaacttccagtccccgtgtcctt

SEQ ID NO: 83607 - DNA, 1999 bp, Homo sapiens
ggcagctgccacttggctgattcacagaagtgtttcattggctttgctgtaagggctgccccggcccatccatgggtgtgcttgtacccaccttgaaaggggctagggaggggaggagggagctgtgagggcttgtgcctagcaagccctccagagcttccttgcctgtgctgagcaagctccatactctctacaggcctacctggagtccttctacaagttctgcaccctactgggcgggactacggctgatgccatgtgccccatcctggaggtgagtgcctgcccgccctcctgcctgctggtgcccgctagccctggcctggggaggctctgccaactgactggctactgcctccttcttcctccctctcttcttacctgtgcactggctccacagtttgaagcagaccgccgcgccttcatcatcaccatcaattctttcggcacagagctgtccaaagaggaccgtgccaagctctttccacactgtgggcggctctaccctgagggcctggcgcagctggctcgggctgacgactatgaacaggtcaagaacgtggccgattactacccggtgagtgccccggctggcaggacagcggttggatgtgttgtcaccaagcacccccacccagaaccctcatgcttgtgcttccccccacccccctggccaggagtacaagctgctcttcgagggtgcaggtagcaaccctggagacaagacgctggaggaccgattctttgagcacgaggtgagtctgcagggtctgcttgtcagagggaggccaacctggtggtttagacctgactctgtggccatggccacctggacaccacatctgcccgtgtccacaggtaaagctgaacaagttggccttcctgaaccagttccactttggtgtcttctatgccttcgtgaagctcaaggagcaggagtgtcgcaacatcgtgtggatcgctgaatgtatcgcccagcgccaccgcgccaaaatcgacaactacatccctatcttctagcgtcctggcccaaggctctcaattgcactctttgtgtgtgtgtgtgtgtgtgtgcgcgtgtgtgtgcgtgtgtgtgtatgtggtctgtgacaagcctgtggctcacctgcctgtccggggtgtagtacgctgtcctagcggctgcccagttctcctgaccctcttagagactgttcttaggcctgaaaaggggctgggcacccccccccaccaaggatggacgaagaccccctccagagcaaggaggccccctcagccctgtggttacagccgctgatgtatctaagaagcatgtcactttcatgttcctccctaactccctgacctgagaaccctggggcctgggggcagtttgagcctcctctcccttctgtgggtcgctcccagagccatggcccatgggaaggacagagtgtgtgtgtccttggggcctggggggatgttgctcctcagctccctccctcagccctgcccctctgagacaataaaactgccctctctaaggccaactgtctgctgtctcgtttaggccctggtacctctccatgacccctaacttccctcgtgaccccaccttgctaagcaaccctgcctaagcctccacctccctccctcagtcagcagccgagattcttcagggttggggagtcccagggagatagccccttcttctgctggaggctcagatgcatacaggcctggggagctagatgttggccctggaggcccccctggcctccccagttgcttcaagcaattgggatcagtgtcattacccccatttcactatgaggaaacccatggtctgaaatgatttgccccaggtcagtggaggagggggaggtgtgaaccagagtctaccaggggaatcccagcctccacgctgagccccaggagttgccaccctgtcacacggccacactgtgtcactcagccagccagtcagtgaccccctccaaacagcacctgccgcatttta

SEQ ID NO: 83608 - DNA, 1373 bp, Homo sapiens
tggccacagggaaggaggtggctggggacagacccctagagggactgtgaaaggtaccaccaagccatgggaggggttggcagctgtctctgccacccaggccctctcattcctgggatcctctgtgctggggtcaaccctcttttccaggcttcttacttcctgacctgtcctagatttttgtttcccgtgatcccagaggtcactctcaggccttcccctgagttgggcttgcccagcattgctggccagggcaggcctgggctcacagactcctgggtctcatctcatctctcttggagcaccacccagcagagcttgtgagcccaagttggctgatggttggtggaaaggtctccacaccttggagttcagacctcggtatgaaaagctttccatgccatccaacccttgcctacaatctagaagaatagtctctagcctgtggagccagggtctctgagcccatgccagcagatgggaccagggaggtctgagtggagggtggccattacaagggagctccccatggggcccgtaagatcatccaccttccttggcatggagaggtgttgggaggaagcatggctgcttttgtgagtgagcgttgggagggacctggggcctgggctgacctcttctttcctcatgcccagcagatccaatttgcctgggcagggagtgcttgttcccgccggcagcccatgtgcctgccattgtactgtgcccagctgacgtccgtgtaggcaataaccatccctcagcaggaactggcctgacaattttgttcctgctctgtgatgctgaggggctgcctggaggatgggaggaggaggtgttctgtaagggaaggtggcagagagggccgggggcactcagtccctgccatccctgtggactttcaggcgtggcctttcctcaccagcctacggacacctgtttttttattcttttctgagacggagtctctttctatcgcccaggctggagtgcagtggcatgatctcagttcactgcaacctccgcctcccgggttcaagcaattctctgcctcagtctcccgagtagctgggattacaggcacccaccaccatgcctggctaaattttttgtatttttagtagagacggggtttcaccatcttgaccaggctggtcttgaactgacctcgtgatccacctgccttggcctcccaaagtgctgggattacaggcgtgagccactgcgtccagccacacctggttttcagaggctgaggaaggggaggtttggaaagatttggggaaaaggaaggcagagcagcaggggaaagtcagaggacccctgcgagcccagccttctgtgaggtgagggggtgaaggagactgtagcct

SEQ ID NO: 83609 - DNA, 1059 bp, Homo sapiens
ggtgcttatccgcagcacccatgagtcagcatacattgttaaggggtgatggcctgtgcaggcgggcgagggcatggtgctatgccaggacttcccggcccccaccttgatgggctccttgctattgcctgccccctgtagttacagttacatgatcgacaacgtgatcctgctcatcacaggcacgctgcaccagcgctccatcgctgagctcgtgcccaagtgccacccactaggcagcttcgagcagatggaggccgtgaacattgctcagacacctgctgagctctacaatgccattctggtggacacgcctcttggtgagccgctgtggtggtcatgggaggtgggcagtggtgtcagcatcagcgcatcagggtggggtttgtggacccgctggggggcgaccctgagccagaaagtgagacctgcccactgctgcttacctttgtctcccttcaacttcctcctccgattctctcctcacttcacccctcttctgctcctgtcctgttgcttttgctgggccaggcaggctacccagggcctgactgggactgtctcactttgtgaagcagtctgatctcccagagtgcagaggagggctgagctcatggagaagagtgagagaggcccaagtcccttggagtcccgagagctctgacagactgtggcccggagctggagcctgagtaaagccagagtggctgcctgtgaggcaaggagcgaagcaaacactgccacttccctccaccgagcaggtcccctgggccaggtcagacagcatccagcaggatgcaaggtccgtatcagaagccagggaaggggaatcaagagcttcctgcagagccctgcttaggcagtgctagttcctgcctgcttaggaggccgaggagaaggcattaagtgtccttgtagccagagtcctgggcctggggtaccacctctaagaagccaccagggttgaactacagggctctaagctgcactgggttctgagctaagaggcctgagccctacctgctgaccttgtctgccgtaggctctcccagcaactct

SEQ ID NO: 83610 - DNA, 1007 bp, Homo sapiens
ggagtgcagggctcatgacttaccctgctctagattagggccagcctacagcttaacatacagaagggcttcaaaggctgtgggttgtggattggaccttggaatttcccaggctttcttgtcatcttggggaggaactgttcctcttatgctcgaactttggggctccatgtgctggattgtggcccaaagatctggtgcatctccagggccttagctgattgccctgtggtaggccctgagccaacagggagatggagatcagggtagtagcgggacacaactgcaggggagagctggggctgagttggggtggggatggggacttgggacccttggggaggcccagcaaggctagcccttaccccctacccttgggtttcagacttgaaactgcatctgcagagcactgattatggtaacttcctggccaacgaggcatcacctctgacggtgtcagtcatcgatgaccggctcaaggagaagatggtggtggagttccgccacatgaggaaccatgcctatgagccactcgccagcttcctagacttcattacgtgagtgtgctttgtagcgccttcttctcttacctgggcaggatagctacacctgcaggagctgggttcagtgtggcttaggctagctgccttcgtgcctgtgtcagctgtcagagctgatggcagctctgtcaggccaggtgtcccaggaccctaccttcagagtcctccctgactgtgtgcgtggtcattcaacaaccctggacttccaggccaccacctatgaaatgggtcaccagcacgttcactactggctgaagatatgatgggcaggcaagagtgtcccacgcagtagtgctggatgaagcctcttcccccagtcacatagactggggcagggaaacctgggaaggtgggagccctttttcttaccctacagcacccaaacagaacactcaccaggccccactccccatgcgaggggtcaggtgtcgggatggacagagctct

SEQ ID NO: 83611 - DNA, 1032 bp, Homo sapiens
gaggtaatgctagggctgagggcacggggcctcacaggctgtgggggagaggcagaactccagcttcagggctacatggactgctgggtgaaggtgacagcgaaccattcaatttggaggacttcattctggtgatggtatggagagtggtcttgggagtagggagccaagatgtggggcagaaggcctgggtagtgccaggagatggagctggggggagagtcatctgaacatggggacaagaatgtgggaagcagaggagttgtgggaaggtcctggggtgcagactgaggagcaagcctaggcctgagggaaggctggagataccgggagaccaagttggtctgctgcttctgagttggggttcaggtcagacagcagagagaacttcctgagagcagcagcatcttttgaacatgagaaatcagccttcaaggaagtcttttactgtgagagatcccaagctggccagacattcctgttgttgggccatggatgggaggatttggggtagacagctgggcttgtgggtagaccagagcggtcccccgagtctgtgctagccagaacactgcttgctcatgccttggctgggcacgtctgggcctctcagtggccatcactgaggctgtcaggctgctgagcccaaggcccagagcagaactagcccctggcttcccagagcccctgccgtccttggctgccctcagaggctgggccagggctgggtggccaggtctcccacaaagctctcaacaagttccaggcctctccttctgtgcttagatcctgctcccagtcacgtcccctcccagtcacatcccctcctccgcatccctcagagagagcaggaagctggggaggagggagcatcccaaccagccttgtcctaggcctgaccagtactgtcttagggcttggggctgccagccactgggtctgggagccaggtttctccaacagggccagagctggtttagaagccctgtgtggtctcctcatgggtgagctgagggttcagcaggcctcctt

SEQ ID NO: 83612 - DNA, 1113 bp, Homo sapiens
tggagctgatatgaaaaaaaaggtctcctcccactcctgagcctagggaggaggtcaggcgcagcacattcaccgaggaggggcagggcagctctcgctttgttgggccaccagcctggccatctgtccacattggtccatctgtctgagttttcctactttgagccagtagaagttgtagcattggaggtagagcccaggtccagtcccttcgaagccgacttctcagccaggcccaggggagtggtagaacaggctccaagactctgccacccttgcagagaatggcattgtgggcacaccagagtctagggagcatgttctcacatctggttccattcagtgggcctcaattcctgaaaacccctgagctccccaggagagcctcactgagtgacctctggaaaagcagaagtaaagtctgggaacactctgtcctctcacactgtgctgtggccagctggccagcaagacccctccatgggccggccatgaggccatgggggagcctcaagcgggtctgccccgcccagtatgctggccaggggctgcctccatgcctactgggccctggggcatgtgggaccaaccccctggcacgggccaggaccctcctttctgcctccctatggcccttggggaggaactgcagaggcctgggggctgaaaaagccgtgtgccatctgagcctgggagccctggagaggctgaaagatccccttctgggttggcaggatctgggaaaagtttcaggaagtgggcgggggcagggctgcccagctgccacctctcaaggcctgtctggggttagctgccaagcccatactttgtcacacagagagcagaaagcactgggcaggctgagtgtcccatgccctcctattaatcaagggctagggtgataggggtgccagctggggctcagtgtggccagcctgagtctggtgcagcctggcgacccctgagaggggcagccatgccaggtgggtcttgggctgcagccttcccaggcctcttcaaagacctcagctgcccctgctggagccagggcaatggtccttgacacaggcaacctcagggtggacagggccggcctgtggaggtgggagggca

SEQ ID NO: 83613 - DNA, 1396 bp, Homo sapiens
ttggctcactgcagtctcaacctcccagactcaagccatcctcccaccttagcctcccaggtagctgagactacaggcatgtaccactgcgctgggctcattttgttttattttttgtggagactaggtctcactatgttgcccaggctggtctcaaactccctggggtcaagtgattccctcaccttggtctcccaaaacgctgggattataggtgtgagccactgtgcccagcctcggccagcttttgagcacagcacattgccataactggccttccttgggctacctggcatctggccaggccagaccactttacctcttactcatgcccaggcaaactcacatctttgggaaaatgaaaagaagctcttcttcacagttccagatccaccccaacctgccggttctataaccgtggtggcaaacctggagaagaaatagcttgcttcggtcaaagtgcagggcatcaacagaggagggtgtggcccccacctcccagggtgaggctgggttgtctgattctcaggctgggctgtggccagggaacataggaaagctgccctgcaagccctgtgtctcctgggacatgccagtcccatggagccttcaggcctgggtggggacggcctggtgacgggctgtccaggcggatctccactcagtcagaggagagcttcttggaacttgccctgggtgcagcagtaaccagttctgcccctccctttggcacatgggactgtcgcctgcctggcaccctcctgactgtcaaacgagttgacttcctcctaggatgtgagaaatgctttcatcctcccagcctcagggacaaggtgttcctgagagtatgagggtaattaaatgtgtctctgccaccacctaccacctgtcccagagcagggagtggggtgatgaacccagggcagacatccttttgcttcctggacttgggaggtgactctcccatttgatccctgtgtctgatgttgctgatggtcggtgccgctggcccctggtgtcagctggaccatctctgcagattggccccattcccctactgtgagtgcctcacctcactgaaaaacctctagcatgaaacaaaatgtaggtccagggaccgaggaaggagaacttactgtcttttccctgcaggagctctgccttagccacctgaaacctagtaacttgcatgtgaccgtgccagcaggagactccaggttcttcccaagactactggcctgccagcccagaggtttcccatgaagcaagagctgtccttggctatactacctcctacctgctcctgagaccctcagggcaactcagggtgtggtgggtggtgcagagttctgtccttgcctctctctatccaggttgctggggctgctcagagctc

SEQ ID NO: 83614 - DNA, 1938 bp, Homo sapiens
ggagggaggtgtggctggaccccgtgagtcatccaggctctctctctgcttttccgtggggcagctgccaccagcactgtcccttgggtctctgctctgggccctacttccctcacttaagtctcagttggccttctcagatgaggtagggcttgtcgcttagtgtctcctgtctgtgtacctctacccatcctcacctccctgtgccctatcttcctgggttgggaaggagaaggccaggggacatttcctgatgctctttgccttggtgcccagtgcaggctgctccagccttgcccaccacaccgtcctcatttaccctcacctgggtcatgccagcagctcagagttggagctgcaggtacagcacagtgtgctatgaacccatgggtcttgggagctccaagtaggagcttgaggcagcccagggatcagggctacacttctcaggctcctagaaccatgcacctccctaggtagtcaccactcttgtcttgccaccctggcctctccaggagagggaaaatttgtcttcaggacagaggatgaatttttctctctcctcaacctcatttggcactccctctgaggggcatgtaggatgtatgtggcatgtataggtacatatatgcagggtgactccgggagatggccaaaccaggcacctgaacaccatgtaagcactgcaggtccacacggtcaggctggcgatgggttatcagttgattgacaagtctctcctaccctgtaccccagtttggaggcctctccattgggctccttggcgtctgcctcatccaacacctactccctggctgatgttttaaaaaatctatcctgcactagaatgttggtcttcctccttttcagaggcaggaaagtcaaggccccgaagggtgctttagtaggctaggctgctgctttgtggcctgggcacctgctctgtgtgtccaaacctagcaactcccctgaaggaccaaggagtaggcacaaggggcagtgctgggattgcccctgtgtgaatgtgtgtggtcctgaggaccgctgggcagattggtggcaggggaaaggaatatgtggaggagcagccctgactggtgctggacactgctttcctggccagctcttgcctggccctgggcacttgcccagaccttgccccactttggatgctcaggcaatggttttcaggccttgacctcaacagaggctttcgtgcttggctggtggatggggcttttccctctgaggagtcatctgaaactcagcttttactgcctgcccttgtccctgtgctggtggccactcagaggctccacagccccagggtctcccctgcagctgtcatcagttcttctgaggctgttccatgggtatccaggccactggtctcactgggagcccctgagtggccctcaggggctgggttgcagggagtcaatgtggtctgggcctgacgaggctagaacagtgtcatagctggacaggctcctggaggtaccgttatccagctctcttcatctgggaagctgggtccaaggtaaggcccaagggcgtaattatggtctcctgacacctgtcttggcagttcctgaccaatcactctatgttctttgatttttttccccctttatctattcttccatttgttcactcaaggatgcctggactatatctctgtgaactggcccccaactcaggaacgggtagtcatgcaaaaaggaccctgtttctggggcccttgtcttttcctcaggccttgccacatgggatctagcttgaaacttgaagggttgggagctgatgaatacagatgagctgcagtccatgatgtagcacacaaggccctgaggctgccaggtcatgggttcagctctgcctgttttcccatgcccccaaccctttaaccttcaaactagataccatatcacaaggcct

SEQ ID NO: 83615 - DNA, 1129 bp, Homo sapiens
taaagtgaaaataaatacctttaaaatagaaaacttaccgttaaaatacaataattgtaggtgttatgattttaatgtaaatctgcagtacaggccaggcgcggtggctcacgtctgtaatcccagcattttgggaggccaaggcgggtggatcacaagggcaggagttcgagaccagcctggccagaatggtgaaaccctgtctctactcaagatacaaaaaattagctgggcgtggtgacaggcgcctgtaatcccagctactcgggagactgaggcaggagaattgcttgaacctgggaggcaaaggttgcagtgagccaagactgcaccactgcactccagcctgggcaacaacagagcgagaccccgtctcaaaaaaaaaaaaaaatcggcagtacaataattgtaggtgttatgatgttaacgtacatctgcaagaaaagttgtttaccttacttatgtgagtggaggtggggaaggagagcactttaggatgctgggtagtaggcatctgccagcaaccgattacccttactgtggtaaaaaggggagaatagagggaggctgcctgggacagggcctggcacacagttggagcttaatgtgagttttgtggactgcctgggacttgtcgaaggtctttatttgcctaaatctaaggtgaacatcattgatcatcaatagacattcggttggttgtttcccttcttgactttcctcactcctgctgctgtccgctctcctgtaacagcttctgggggcacagggttcttcccatcttcccaggggaccctctatcatcccccatgaacatgttaggccattctttctacacatttttcctataacactgctcaacataggcacccaccctcccgccctctgccccaccttgtagaataccatccagatctttagtgtggcattcaggtatcctttgctcattcacacacatttctttctttctttcttttttttttttttttttgagacagagtctagccctgtcacccaggctggagtgcagtggcgcgatctccgctcactgcaacctccacctcaccagttcaagccattctcgtgcctcagcctactgagtagctgggattacaggcatgtgccacca

SEQ ID NO: 83616 - DNA, 1701 bp, Homo sapiens
ttcccttgattcagcttcagaattcagcacgtattggcctcaagttccccgcctccagaccctattctcctacctcaatcggacctcagtttccctctggggaggaggctggcccagcagtctggaaactttccaagcttgagaagggctcgctcccttctttaccccgcccgccctgcagcgtcaagtgcagcaaaccggggaaagctagagaaggcccagtcaaatccctgcggccacaggcgccaccaagcggccggcctcaaacttcctctttttagcgcgcaggcgccgcagggccagcccacgcctgcaccgcgcttccgcgcagccacccggaagccgggcaccgctcagagccacgcccccttatggtcacgtgaggcgcttgcgcgtcacctgacgcacttgacagcccgctgaggacgcagcgtcagctgacctggggagtcgcgattcgtgccggccggtcctggttctccggtcccgccgctcccgcagcagccatgtcgttcttcccggagctttactttaacgtggacaatggctacttggagggactggtgcgcggcctgaaggccggggtgctcagccaggccgactacctcaacctggtgcagtgcgagacgctagagggtgagccggggccgcgaaaggcggggatagaggctgtccggggcctgagggttcagaggtgtaggccgggaagccggaagggggggtcttgaagggcctgagaggcctctctgggaatcctggggctgatagcggacgcgcaggagcgggatctacctctagctgtggctcggcgcgggcccaaactcaaacaaggctttaagaaccgcagttgttcgcctctgcttgggccaccttttctctcgctgtgctcaccctgcagtttgggaggagggggtgtttcgggggtagttggtcggtgcgaggtgtggccatacaaacctctttaccctgacgtagcccgagagctgtcgcgtagcaacccttagggaagctaagcggaaaagtcccccacctcttccccctccccccgccaagacactaaggtctttgggatcatcgtgtcttcgcgttggcctgcggggtgagccttcctggggaattgctgagccagtttatcgagggttttctcccaactctgaactgctggctgggcagtatctcctgaaggcaatgtttgggagaacaagggtggcccttgcaggtctggaagttcatatacaagtatttggccaattaatcccaccccctcagcgagggggatgcctgttgggacagggtttctgagcacaagagtaatgagaaaccgagttcccctttcttctcagcacacagctccagagtggcgttgacttctttttttttttttttttttttttgagacggagtctcgctctgtcgcccaggctggagtgcagtggcgggatctcggctcactgcaagctccgcctcccgggttcacgccattctcctgcctcagcctcccaagtagctgggactacaggcgcccgccactacgcccggctaattttttgtatttttagtagagacggggtttcaccgttttagccgggatggtctcgatctcctgacctcgtgatccgcccgcctcggcctcccaaagtgctgggattacaggcgtgagccaccgcgcccggccgtggcgttgacttctgaggcacagct

SEQ ID NO: 83617 - DNA, 1233 bp, Homo sapiens
cccgcctcaccccatctcccggaccccggccgcgccttgtctttcctcccctccccccgggcgtggagaacgcagcttctcccacaaaagccgccgcctccgggcctgcagagcctggcgctgctgccttcctcccacggcaaggccctggcggccggtgccccggggcgctgggatgggccaggccagagagcgggctcaaggcgccagcctgggccctggcacgcgcgctccctgggagcccttgctgccttcgccgcaggggaggctgggctggaaatggggagggggcgacgaagggtgcgggccggcctaggagctgagctaatcctcctagctctaggggccggcctaagcggctttgtggccggccccgaggtgaccgagcctgggctggagccgggctctccgcccaaacctggcgtagccgaagccggagaggatcgtccttgtcggggaacggagcttttccctggaaatggaggttggcgcaaggttcctgcaacagccgggcctgggctctctgcagaactggtttgggcaaggggctgctcaccagggctagaggtcggattcagtccagattcagcaccctttgtcctcctctccagggtgagccctgagtccggcctcccctacagaccctccccagccagttctaacgtgtgtccaggctggccgccccagcacctactgtgcgcagcctcgtgtaacaatacttgtgccctggctgcagtctgcggggccgcgccctgggcctgccgcattcggccaacgcacagcatctgaggagggttatgaccatctggcagatgcagaaacaggcccagagaggttagtagtattctcaaggtcacacagctggtttgggagaagcgaggattagatctgagtccttgcccctgcgacacccacctccgtggtattggagggaggagaggaatgataattgggggctgaggtacaaaatactccagcgggacaaggaggactggcatagctccttcttccaccgccctctccggcttgggtcctgtgactgcggcgggagagaggagcaaggtgagccgccccaggggtctgggtttgggtgcgggtgaggggaggactcaggactctgggctgggtcccgcttgagagaagcgggcggggagggcgcgggtgagtcacggcggcccctctgcgtcgccgctcggactcagccctggccaggcccggcccgggggaggccgc

SEQ ID NO: 83618 - DNA, 1227 bp, Homo sapiens
ggggagagctctctgcttccttgtgcaaggttccctctgcaggggaactcccatcaagccccggcagaagtgttccctcctccaggaagccctaacctcttcccaagaagcaccatgcagcagtaccactgctcagtaccactgcagcagaatctcctgctgtccatgtctgtaggggtcccacctaccccactggaagctcctggagcaggtactgagtcccaagcagaaagtatgcacagcaaagtttggggatagaaaagcccctcagcctttcctgatatccccttttctactcacacctgaaccagatcacttcagaaaatagcccagatatcacccagggctgcccttgcccagccctccacaccaaagaggcaaagggcatccgtacctcccgccactcaccaagcgggaattcctcttggactcccttatctgcccctggagtttctcttgctcctgctggtgcacttccaagtaggccctgaggaaaggggcgaccacaagaatgaactcggctctccagcctcatgctgcccagggtgcagacagcagggagagggcatggggctggagaaggttcctgctagcaggatgcgggcttggggagggatcccgggacagggctgggaacagaggagctgctcacgtcaggccccgcttcagcgccgtgtacaccaggtccagccgctcgggctgcggcaccttggcggctgggtgagccacggaaaacatcctggacactcgggagagcgcggggggcttccgtgggggccccggcgggctgaagaccgggaaactcctgaaggagaggctgtcctcagaaagaggagagcaggagtcccccagactctcactacgcacccccagacccagccccatctgacgccctttgaccccaccaaccctgcgcggccgcgtacctgggcccccgctcgtggctgccgaggacgcctgcgaaggactggctcctattgacccgggcgctgagcagacggcgctgcggccgcaccgacagggacatcatagagtgagtccgcgcggggctccctgcgggtgatcgggggggtgtccagtaccagtcggatccccgaagccctctcccacgcagcgggatccagggctggcgcaggtctttcctgtcgctaggcacagctgccccagcgggctccggccgggtccgcctagtcccgccgacccgggcactaatgacaggacagccgc

SEQ ID NO: 83619 - DNA, 1579 bp, Homo sapiens
catcagtgaggctagtgtagatgctgccttggctgaggcttcagtggaggccgttggcccagaaagcctagcctggggacctagcccacctacacacccagctcccacccatggagagcaccccagtcctgttcctcctgccctggaccctggccactctgccacaagctctaccctcggtacaacaggctctgtccccacatctacagaccctgccccatctgcacacctagactcagttcataagtccacagactctggcccttcagaactgccaggccccactcacaccactacaggctctacctatagtgccattaccactacccacagtgctccaagccccctcactcacactactacaggctccacccacaagcccataatctctacccttactactacaggccctaccctcaatatcataggcccagtccagactaccacaagccccacccacactatgccaagccctacccataccacagcaagccccactcatacttccacaagccccacccatacccccacaagtcccacccacaaaaccagtatgtcacctcccaccactacaagtcctacccccagtggtatgggcctagtccagactgccacaagtcccacccatcctaccacaagccccacccatcccaccacaagccccatccttataaatgtaagcccttccacttctctagaacttgctaccctctccagcccctccaaacactcagaccccaccctcccaggcactgactcccttccctgtagtcccccagtctccaattcctacactcaggcagaccctatggcccccagaactccccacccaagtcctgcccattccagtaggaaacccctcacaagccctgccccagatccctcagagtctacggttcagagtctaagccccactccctcacccccaacccctgcaccccagcattcagacctttgcctggccatggctgtccagaccccagtcccaacggcagccggagggtctggggacaggagcctggaggaggcactgggggccctaatggctgccctggatgactaccgtggccagtttcctgagctgcagggcctggagcaggaggtgacccgcctagaaagtctgctcatggtgaggagggctgggctgggctagggcaaccagggagggcagccagggggcggcagccgctctgatgcccttcacaacctcagcagagacaaggtctgactcgcagccgggcctccagtctcagcatcactgtggagcatgccttggagagcttcagcttcctcaatgaagacgaagatgaagacaatgatgttcctggggacaggtgagggggctaggcaagatgggtgtgaggctaggtgagagggaaaaggtgaggcaggaccaggggaaggtggaacaggtgaattgggagaaagtcaaaggacaggacaggtgaggcagggccaggtggagcatgtgaggactgagttgctggcaggtgcacctgtgtccacccctcccatgtccttcatgcccatgtctccaaccctacgtgtgtccccagtgcttctgaccgccctcttcatc

SEQ ID NO: 83620 - DNA, 1037 bp, Homo sapiens
tctttttttttcccctaaaggaataaaaaaatctgtatttttaagatgtcaaatctccagagtttttagatgttagcaactgaatcagatgtttttaaacttcatgagctgattaaaccacacagatgagctgtcagtttacgacccctggcttggcttggaggaaagagtgaagagaaattccatggccaaatcctggggcactccaatattgggagggtaatggagaaggagtctgaaaggcagcatctaggaagtcatgaaagctagcgctgagttgtggaatccctgggcagagaaggtttcaggtaggaggcatcagctgagcggtgtgataaacttgggccagagatgtggctattggattgggtcaccttgcaagtcactggagaatgtcactgatggccttggcttgattcacgtgagtatatcagggaggtggacctgaccggaatgggttaaacagtcaccaggaaagtgaggaaatggagacagcacatgtatgcaatttgagagaggttttgctgtgaagggaccagataagtttggggatagatatagaaagaaatcttttaaaagatagtaggggccgggcgcagtggctcacgcctgttatcctagcactttgggaggccaaggcaggtggatcacctgaggtcaggagttcgagaccagcctggccaatatggtgaaacccggtctctactaaaaatacaaaaattagttgggcatggtatcgcgcgcctgtaatccaagctactggggaggctgaggcaggagaattgcttgaacccgggaggcagaggttgcagagagccaagattgggccacagcactccagcctgggcaacaaagcgggactccatctcaaaaaataataataaataaaataaaagatggtagggttcccagagcatgtttatgtgccattgggagggatatggtggggaagaaagatgggtgatccaggagagaggaggcttgcttgacctatataggagtgaaatccatcagaagatataaggaaacagggaggg

SEQ ID NO: 83621 - DNA, 1299 bp, Homo sapiens
cggcttcggcgcccgcctagcttaagggttcggaccgactgccgccgcgcgctaagccaggtcccggtgccgtatgggtgtcgggccctggccgtcgcgtctcgggctgcccctcctccagccagccccgtccccggaacctaccctgccggcctgcgtgccttcccagctgcttggctgctcggcggtcgctcccagtccgcgcgtcgccgccgctggtctccgtctccgccgagtggcgcaggcggcgctgcagcggctgcgagcagagggaccccagagctgccgagagctccctctgcaaggctggctgagctgctcgcacctctacgctgcctgagcgggcggggggacgcgcgctcgccgcccccgctgcgcccccaaactcgcgcccgggttcctggccggacccgaccggtgcggcccccccacggtgggcggaaaagatgcgagttccgcaccaagtagtttttatccagccgggttcggactccccagccgagtgatagcagcctgactttgtgcgctcagagatctcaaagggactgaaacttaaatttcattctgatctcaagtgacgtgacaaatttctgaatttgggagtatgggctaagtcccttgagtttccctcccgctttaaaatgtcctcacactaacttagtacctgatgctctagggctaggtgaaggcggttctgccccaggattgtgcaactcgatctagagcgccagtagggcagaatgagtttattcttgactcgactggtaatttgcccatgcgatgaaatatgagggttgatgttgtaattgaatcctgggtcacttgctgcagatggtttataaatatctacgcctaatgtaactactgtttagtaggagacttcctgtagccccgagttcagcgttaagtaaacattcgcatacgtagtcttcatactttgagtttcgatcaactaggaaagttaaaaaccaagtcctcataggtgggaaaggaagttaaacaaggcatatatttaaatttattcggtccttaagttttctttcttcactaaaaagcatcccgttgaattgcgggagtcttttgcttttccgtaaatattctagtgccttaatatagttcattgcagcagttaatgtatcagttcgggttgttttggagagaagaaagtctggattaacctgtttttaggaaggaagctatgttaagtttatgaagaaattaaacagcctggtcctaaccaaagttgtccagtccactgtatgtaatctcaatgtgtagctcctcactgcagtcctcttc

SEQ ID NO: 83622 - DNA, 1031 bp, Homo sapiens
ctcccgagtagctgggaggactacaggcgcctgccaccacgcctggctaattttttgtatttttagtagagacggggtttcaccgtgttagcaaggatggtttcgatctcctgacctgcccgcctccgcctctcaaagtgctgggattacaggcgtgagccaccgtgcccggcctgtggggtttgtttgtttgttttaagacagggtctttctcttttacccaggctggagtgcagtggtgtgatcacagctcactgcagcctccacctccctggctcaaatgatcctgccacctcagcctcctgggtagctgggactaattttttctaggtatggggttttgtcatgttgcctaggctggtctcaaactcgtggcctcaagcagtctgtctgccttggcctcccaaagtgctgggattaggtgtgagccaccgtgtccagcccattttttttaaacacctgtaaactttctgtagtctgtcttcgtatctttcctgctagtatctttgtgcattttctcagtgatttaatatttgaatgcaaagttgtggcattgcatatagactgccaaaatacagtccaaaggtgagggttaggatggtattctttcacacttgatccttgtttttggtcactcttggaattttcaggggtagaaaatttcattccctttgaggtatgctggtaataataatggactccagtatggaagtgttggttggactaaatatgctaatcacctatttgtgttactaaaaattgcctctcaacagaggagactttagcttcatctaagtattagtgagttttgtggagtttagctaattgtgagatggatttcctcttagaagatgtacctcatgtgccaaattgcttggaaactttttttttttaatacattttgattgaggcagtggcatgatcatagctgttgcccagataggagtgcagtggcatgatcatagctcactgcagccttgaactcctgggctcaagcagtcttcctgctgcagcctcccaagtagctggta

SEQ ID NO: 83623 - DNA, 1329 bp, Homo sapiens
attgcagtggagtgttttgttttgtttttttttttgagacggagtctcgctctgtcgcccaggctggagtgccgtggtgcgatctcggctcactgcatgctctgcctcccaggtttgcaccattctcagcctcccaagtagctggtactacaggcgcctgccaccacacccggctaattttttgtatttttagtacagacggggtttcaccatgttagccaggctggtctcgatctcctgacctcgtgatctgcccgccttggcctcccaaagtgctgggattacaggcatgagccaccgcgcctggcctttttttttttttttttttttgagacaagatctctcactctgtcaagcaggctggaatgcagtggcacaatctcagctcagtacagcctcaaactcctgggtgagtctcccaccctggcttccgaaagcgttaagattactggtgtgagcctggagtactattttgctacttagaaacctttagtcctttatatatttagcaaatgtgtgaaaaaataaatgaatgttttgttattggcttgatggtggacatttatggaatggctcggttagtgacatgacatgaacaggtgttttgtttctttcccaattttttctgtcttcagttttccctcattttttttcatactatatgcgtatttgtatgaatttagtgtttcataaaatgatttgtgcttttcttttagaatgattacggacctgaagccaaagaacaagatgcgctagtggacagattgctgaccaggggcttgagagctgggttctattttccctcctcaaactgactttgcagccacggagaggtaagtgctatttccattttttctatcttaaaaatggtagtaatataaccctcctggagttggaggatttgttggctaattcttgaatataggggatgcaggatatcaggtgattgagagcatacaggcttcataatcagagtcctgggtttgaaactctttacgatgatatactagctgggtaatatggggcaagttactttaacctgtctactcctgtagtcctcacttgtgagagaataacaccaccaatctcagagactattctccgttaatgagaatgtgttttgtaaagctttaagtactattctgaacatgtacatagaaagatcccaggaaattgtggctgcttttctgtagaaacccttggaatgtgtattttgactattggcaaatgaactgaaaagaaagtccatgacctgtggctacttgtaattttgataagaaacagatggaatcctgttcttggggaacctggtatcctggataaaaattg

SEQ ID NO: 83624 - DNA, 1133 bp, Homo sapiens
caaaaagggggaaaaagacaaaagactcattgagtcatacattctgttattgcttatgtgagaattatattagttttgagataggctttgtagtttttttgttgttgtttgttttgttttgttttgagacagagtcacccaggctgggatgcagtggcgtaatcttggctcacttcagcctctgcctcccaggtccaagcagttctcctgactgagcctcctgagtagctgggatttcaggcgcccaccaccacgcctggctaatttttgcattttcagtagagacggggtttcaccatgttggacaggctggtctcgaactcctgacctcaggtgattcacctgcctcggtctcccaaagtgctgggattacagggatgagccactgcgcccagccaggatctatattttttaaagctcaccagaataggtttgggaatcattgctcaggcagcatctgtccaaaattcataaaagtacctgttaggtgttgtgtaaatcctgcattatgtgtgtgtagtttattcctattttgtaatacatttattcaaggtgatagacttgctatagattctcagtctttctcctattccaagtgatgaaaagactgtagggctgctccaaagacggtctaactctgagctgcttccagggatatgggtctgcagtgtggcaaggagggatctggtggtctctaacatagtctcttattaggggaacagaaagtgaagcttaggttactctacaccagcaaaagtgtcatttgggctatggagagcagagagaggacagcatgtacttgggaggcagcctcctgttggtactatggcaccaatgttgactcacagatgagcattatctttgtaaatgttcaataagtgaaataaacaggctacccttaacagagggctctgaaaccacatcaaaataatatatatttttttgatacagattctcactctgtaccccagactagagtgcagtggcgtgaactcagctcactgcaacctccacctcctgggttcaagcgattctcatgcatcagcctcccaagtagctgggattacaggtgcacgccaccacacccggctaatttttgtatttttttttagtagagacagggtttcgctatg

SEQ ID NO: 83625 - DNA, 1383 bp, Homo sapiens
gctacgattacactactgcgctcactccagtctgggagacagagcaagaccgcacctcttaaaaaagataaataattataataatattaatttgagatggcttaatacagttccactcagttacattaaatttcttctgcacaaaattggtctaattccatacatatttttgttatataccgttcacctgttctgtagtttgtcaggcaaggtccacctcatcatttgatatccagctgtagcaattcctttccttaaagcccttcacccactgaagtcatcctttatgccagggtggtaggaagtatgttaaccgttgttacagtactcatcacactatatagctgctatttgtttttctttctgcctgccagacaaggagctccctaagaactgaacctcgtgcagaagacaaagcttatctgggagtcagctttagcacagtactgattgaagactacccctagtacatatgcttgtactctctctcccttccctgcctccagccccaaatgacgcttcaacacctaatacccgatttcttccattaacttgaaaaagagcctggacgcggtggctcacacctgtaataccggcatttggggagaccaagatggctggatcacctaaggtcaggagtttgagaccagcttggccaacatggtgaaaccctatctctactaaaaatacaaaaattagcctggcatgatggtgggcatttgtagtcccagctactcaggaggctgagacaggagaatcacttgaacgcaggaggcggccgttgcagtgagccaagatggcgccattgcactccagactggtcaacaagagcgaaactccgtctcaaaaaaagaaaaagaacagttagaacttttttttttttttttaaagaagagagttcctttctacagcagcgtcagccaccttttggcgaaagaattattgtctagcctttattattctttgtagcaaaagaactccttcccctcctcccatactagtttcactgttgccattacaaatattttattagtacgtatttcctagattcaaagcttcagtgggctttcttcaagtagctgttagaataattgttttgttttgaccataccctttaatattaacaaatgggaggggagattgttaacaaaatactagaatgctcttaactttttttttaacttagaagaaacattttcatttcccttttaattatttctacacacacacatacaaaaagccctgttattttataattttttatttttatttttttagtagagacagggtttcactgtgttagccaggatggtctcgatctcctgaccttgtgatctgcccacctcggcctcccaaagtgctgggattacaggcgtgagccac

SEQ ID NO: 83626 - DNA, 1025 bp, Homo sapiens
agctagctaagaagtggctgaagtggccgggtgcggtggctgaagcggccgaatgtggtggctcacgcctgtaatcccagcactttgggaggccgaggctggtggatcacgaggtcaggagatcgagaccatcctggccaacgtggtgaaacctcgtctctagtaaaaatacaaaaactagttgggcctggtggcacgcgctggtagtcccagctgctcaggaggctgaggcaagagaatcacttgaacctgggaggcagaggttgcagtgagccgaggtcgtgccactgcgctccagcctgggcaacagaacgagaatctgtctcaaagaaaaataagtggctgaagcaagaggaggaagaactgatccatgccccctaaggatacaggcctctggggtctctgtgttggagcctaggcccttgcatcctcacactcaccattcagcaggggcagagaagcattaagatgccagttttccttccttttagcccctcatccccgattgcctggattgttcttcctcagtctggaggaacctcctgttcatcatctacacagaagttgactgaataataaaatttttttatctaagcttcactttttcacctagatgatagagaaacacaataaggatctggtcttaggagctccattttatggtgataccacagtccggacgactaaaccacccactttgccaagctcatttagttggttagtgatggattgggtatactggagtttctgtttattccctgtccagtgtcattgagttgaaggtgacagccaaacattagtagatcctttaggcagtgaaactgggattgcagatatggattggaaagacctctgtgtagaaacagtggaagttaaaaggctagtgtaatgggcggctacggagccttggtgtgctcaggggggctggtgaaagagtactcagagacgaagggagctaagggaggaaagaggcttatgaaggaataggatgagtttcatcttgtcagatgccagagaaactgaga

SEQ ID NO: 83627 - DNA, 1073 bp, Homo sapiens
cttattgattcagaggagagactcccatcgtctggaaagaaagtaaaaggagagatccactgcttgatggaatgcactaaggggtgtgtgtgtgtgtgtgtgtgtgtgtgtgtgtgtgtgttttgttttgttttttaagacagagtctcactctgtcaccgtgtgtgtgtgtgtgtgtgtgtgtgtgtgtgtgtgtgtgtgtgttttgttttgtttttttttaagacggagtctcactctgtcacccagcctggagtgcagtggcgtgatctcggctcactgcaagctccacctctcgggttcatgccattctcccacctcagccttcccagtagctgggactacaggcgcctgccaccacgcccagctaattttgtttttgtatttctagtcgagatggggtttcaccatgttagccaggatggtctcgatctcctgacctcggggatgctctgagattctgagcagtgtattgagaggctgatggcttgctactttgtgtctgatttttctctattaaaaatagaagctattgctttaagaccgagtagatgctgttgttttgtggactttatgccatgtgttttttttcagtgagacagtactctgtcagctcaacttcttggaagcacagttggtttctatttgtactcttttgtaccacttctttttctacctggtttataattctgtgacctcttttaggttggactcggttgtttacaagcaatttttttttttttttttgagatggagtctccctctgtcacccaggctggagtgcagtggcccaatcttggctcactgcagcctccgcctccagggttcacgcgattctcctgcctcagcctcccaaatagctgggactataggcacctgccaccacaactggctaattttcgtatttttagtagagatggggtttcaccatgtaggtcaggctggtcgtgaactcctgacctcaggtgatccgcctgcctcggcctcccaaagtgctgggattacaggcgtgagccactcagcccagcctgtttacaagcaatttttaacattttaagttttcaaattcacac

SEQ ID NO: 83628 - DNA, 1071 bp, Homo sapiens
taccctctcctctgtcctgtgctttaagccagttctttttcttactcataactaattcccacatgtatttattgtacccagaaatccaaacctttcccctacagaatacatcctctgccctccactgtcaaactctgcctttaaatgtcctgctcacgtttcagggttccgttcaaattccacatttatgaagcatttttctatcacacctggttatgttatctttctccaaacctatgtaatttcaccttgaaccattgtgctacctattttgtcctttatgttagacagtaactcctagaatgtaggaccaggcctcccaaaatgctgggattacaggcgtgagccaccacgcccggcccctattttgctcttgtttaggtaatgtcattctctctgtagtagttcttgtgctgcctctcaggtggtcctggcttaaggagtcttctctgactgctatcatggatataatacaatgttaaggtgcctagacagagaattggagaaaagtgtgtctaatagaactaacaaaagcttcgtttgagctgtattcttggccaaaaatacaaaacacttcaatgttttgttttgggttttttttttttttttttttgagacatagtttcactcttatcgcccaggctccaggctggagtgcagtggcactcggctcactgcaatctccgcctccaggcttcaagcaattctcgagcctcactcagccttccaagtagctgggattagaggcacaccccaccacactcagctatatatgttttattttattttaattattattatttttttgagacagaggctcgctctgttgccctggctggagggagtacagtggcccaatctcagctcactgcaacctccacctcccaggttcaagcaattcttctgcctcggcctcctgagtagctgggattacaggcatgtgccaccacacctggctaatttttgtatttttaatagaaacggggttttgccgtgttggccaggcttgtctccatctcctgacttcaagtgatctgcccgcctcggcctcccaaaatgctgggattacag

SEQ ID NO: 83629 - DNA, 3121 bp, Homo sapiens
agttgaaatttctaattgtcttgtgtcacatctttttcaccatttattggtttgaatcaggatccaaagaagattcatgcattgtgattgattactgtctctttaagactcttttatctgtatcagagtttctcagcctcagtgctcttgacatcttgggcctgataattctttttttttttttttttgagatggaatctcgctctgtcgcccaggctggagtgcagtggcgcgatcttggctcactgcaagctccgcctcccaggttcacgccattctcctgcctcagcctcccaagagctgggactacaggcgcccaccaccacgcccggctaatttttttgtattttttagtagagacggggtttcaccgtgttagccaggatggtctcgatctcctgacctccggtaatctgcccgcctcagcctcccaaagtgctgggattacaggcgtgagccaccgtgcccggcctggcctgataattctttgtggtggaggactgacctgtgtcttggaggatgtttaatagcatctctagctttcacccacgagataacagtagcacatcccagcccagtagtgacaaccaaaaatgtgttagccaaatgttcctagaggcaaagtcaccccaggctgagaactactgatctactggttctccctccaatcagtcttcccttgtattcttcttgttatctatttgcagaagaacctgagtataatcttgcagtgtttccctcggtatggatttcactgatttaatccctgtagtataatttaacatcctgagtcaccaatttcctgttaattgggttggatctagagacttgattggtttcagagttttggagtttgtttgacaaaattgcattataggtagtggttttttctttttcttttttttttttttttttttgagatggagtcttgctctgtcccccacgctggagcgcagtggtgcaatctcggctcactgcaagctccgcctcctggattcaagctattcttctgcctcagcctcccgagtagctgggactacaggcgcccgccaccatgcctggctaattttttttgtatttttagtagagacggggtttcaccgtgttagccaggatgttctcgatctcctgacctcgtgatccgcccgcctcagcctcccaaagtgctgggattacaggcgtgagccactgcacctggccagtagtggttgtttctttcatcaagaggcacatgtctgttgtgtcttttttaatattaacaaccattgatgcctaattcattcaccaaagggtctttttgttttaaaatgtatatttttatttagacatgctttgctttaaataacaatctgtgttctcccttaataaaggcaggggaaatggaaggtgatgcagtcgaagccattgtggaggagtccgaaacttttattaaaggaaaggagagaaagacttaccagagacgccgggaagggggccaggaagaagatgcctgccacttaccccagaaccagacggatgggggtgaggtggtccaggatgtcaacagcagtgtacagatggtgatgatggaacagctggaccccacccttcttcagatgaagactgaagtaatggagggcacagtggctccagaagcagaggctgctgtggacgatacccagattataactttacaggttgtaaatatggaggaacagcccataaacataggagaacttcagcttgttcaagtacctgttcctgtgactgtacctgttgctaccacttcagtagaagaacttcagggggcttatgaaaatgaagtgtctaaagagggccttgcggaaagtgaacccatgatatgccacaccctacctttgcctgaagggtttcaggtggttaaagtgggggccaatggagaggtggagacactagaacaaggggaacttccaccccaggaagatcctagttggcaaaaagacccagactatcagccaccagccaaaaaaacaaagaaaaccaaaaagagcaaactgcgttatacagaggagggcaaagatgtagatgtgtctgtctacgattttgaggaagaacagcaggagggtctgctatcagaggttaatgcagagaaagtggttggtaatatgaagcctccaaagccaacaaaaattaaaaagaaaggtaaaacgagtttatccatagtggtttcataaaaccattttgggataagcatacaacacagtgcatatgcaagttgttttatattaaccgtatttgtaaaaggtcgttatgtgggtaccgttctttaaaaccagtctaaaataagttttttccagattgaatgctctttttttaatcccaaagaagaaggaaatgtattagtgacatgagataattatgacttatattgggttttgttattaaaagctaatcaaatatatttgtagaaatttaagattaggattaatcttaacactttgaaactctgcagcaagtaagtgttttattttgcacataggtgtaaagaagacattccagtgtgagctttgcagttacacgtgtccacggcgttcaaatttggatcgtcacatgaaaagccacactgatgagagaccacacaagtgccatctctgtggcagggcattcagaacagtcaccctcctgaggaatcaccttaacacacacacaggtgctggataagaatgttgggggctacaacagcaaatgctcagacttcgctttttagtattcattcaagctgactccagcgggaatttaaaggaagtttttattatttcttatgatgccctttttgtaatcatgattttattgtaagcacttggacttagttattatagacaaatgtaaagaaaatttaatgaaaaataacaccctctctcttaaaaaaaagaagtctcaggcaatagatgcctggtactatgaggaagaatgttagaaatagaagtgaaatcccagtgaaaccctgtctctactaaaaatacaaaaaattagctgggtgtggtggtgggcgcctgtagtcccagctactcgggaggctgaggcaggagaatggcgtgaacccgggaggtggagcttgcagttagccgagatcccaccactgcactccagcctgggcgacagt

SEQ ID NO: 83630 - DNA, 2078 bp, Homo sapiens
gcagtggtgggatctcggctaactgcaagctccacctcccgggttcacgccattctcctgcctcagcctcccgagtagctgggactacaggcgcccaccaccacacccagctaattttttgtatttttagtagagacagggtttcactgggatttcacttctatttctaacattcttcctcatagtaccaggcatctattgcctgagacttcttttttttaagagagagggtgttatttttcattaaattttctttacatttgtctataataactaagtccaagtgcttacaataaaatcatgattacaaaaagggcatcataagaaataataaaaacttcctttaaattcccgctggagtcagcttgaatgaatactaaaaagcgaagtctgagcatttgctgttgtagcccccaacattcttatccagcacctgtgtgtgtgttaaggtgattcctcaggagggtgactgttctgaatgccctgccacagagatggcacttgtgtggtctctcatcagtgtggcttttcatgtgacgatccaaatttgaacgccgtggacacgtgtaactgcaaagctcacactggaatgtcttctttacacctatgtgcaaaataaaacacttacttgctgcagagtttcaaagtgttaagattaatcctaatcttaaatttctacaaatatatttgattagcttttaataacaaaacccaatataagtcataattatctcatgtcactaatacatttccttcttctttgggattaaaaaaagagcattcaatctggaaaaaacttattttagactggttttaaagaacggtacccacataacgaccttttacaaatacggttaatataaaacaacttgcatatgcactgtgttgtatgcttatcccaaaatggttttatgaaaccactatggataaactcgttttacctttctttttaatttttgttggctttggaggcttcatattaccaaccactttctctgcattaacctctgatagcagaccctcctgctgttcttcctcaaaatcgtagacagacacatctacatctttgccctcctctgtataacgcagtttgctctttttggttttctttgtttttttggctggtggctgatagtctgggtctttttgccaactaggatcttcctggggtggaagttccccttgttctagtgtctccacctctccattggcccccactttaaccacctgaaacccttcaggcaaaggtagggtgtggcatatcatgggttcactttccgcaaggccctctttagacacttcattttcataagccccctgaagttcttctactgaagtggtagcaacaggtacagtcacaggaacaggtacttgaacaagctgaagttctcctatgtttatgggctgttcctccatatttacaacctgtaaagttataatctgggtatcgtccacagcagcctctgcttctggagccactgtgccctccattacttcagtcttcatctgaagaagggtggggtccagctgttccatcatcaccatctgtacactgctgttgacatcctggaccacctcacccccatccgtctggttctggggtaagtggcaggcatcttcttcctggcccccttcccggcgtctctggtaagtctttctctcctttcctttaataaaagtttcggactcctccacaatggcttcgactgcatcaccttccatttcccctgcctttattaagggagaacacagattgttatttaaagcaaagcatgtctaaataaaaatatacattttaaaacaaaaagaccctttggtgaatgaattaggcatcaatggttgttaatattaaaaaagacacaacagacatgtgcctcttgatgaaagaaacaaccactactggccaggtgcagtggctcacgcctgtaatcccagcactttgggaggctgaggcgggcggatcacgaggtcaggagatcgagaacatcctggctaacacggtgaaaccccgtctctactaaaaatacaaaaaaaattagccaggcatggtggcgggcgcctgtagtcccagctactcg

SEQ ID NO: 83631 - DNA, 2106 bp, Homo sapiens
tagtactaggtaaacacgagcatttattttttagcttactttgttctaaaagaagaccaagcatggtggctcacaacctgtaatctcaggactttgtgaggccgaggccggaggattgcttgagcccaggagtttgagacaagcctgggcaacgtggcaagactccatctctacaaaatagaaaaaattagccaggcatggtggtgcaagcctgtagtctcagctactggagaggctgaagtaggaggatcacttgagcctgggaagtcaaggctgcagtgagccttgatcctatcactgcactcccactgggtaacagaggaagaccctggctcaaaaacaaaaaacgaaaagaaaattggatgccacttttcttctcttgttaattgttttacttcttatccataccaccagactatacactttcacaggaagaactctgtgctttaccgttagatccatagtggttctaaagaatcgaatgaacaaatgaacattccttggaattgcttagtttttattatactccagtcactcttcctctccagcattctcttcattctcaaagagaatcatttctgcagatggctggttctattcattacattgtggctcttcctaattgtatcctcaaaggcagccttcctttggttttagtgtttgatactaccttgctgtcaccccttacctgctgcccacaattacagatggtcactagtctgtgaaactagcactgcattgtgctctcagttttgtctctaagattccttcagtgaaagacaagaaatgtagagagtatattattcatgttttatattggatgaattgacattcagaatgatcacagcatattagacatggatgtttgaaaatcatttgtttaaatcacataaaaggaaatactatgtaaagcctgtgataagcctctgaaattccttatcaagacagatacatgtggaaaacaagttatatgtttgtgtttttaaaagaaagttgcagaatatggacagcccaatggccctatatttatagtcataatacaacgagatttgagagacaggatcttgctatgttgcccaggctggtctcaaactcttagcctcccagagttctgggattagaggcatgagccaccaagcccggtctctattaacttttaatccataatgaccaggatattcacaaaataggaataagaaggtttttattgtattcaaaggcagcggattcagatgggtaattaagagaaactaatttggtatgtgttataatatcctggtgttagtataaattcatccaggccctcccatagttttcggagctgacttttgtatctgctttcaagctactgcagttgatgggatgaatagggttccagtctcatagcagttctgtgccacacattgaactctgtcattaactgtgcccttgatcttgctcttcctgttactccatcctttctctaggtactcgtcctcacaagtgcccagactgcgacatggcctttgtgaccagtggagaattggttcggcatcgtcgttacaaacacacccacgagaagccattcaagtgttccatgtgcgattacgccagtgtagaagtgagtgttcagctttttgttggtatctctcttaggcagaccatgatttatttcaatacaaagctataactactacccaaacggacttaagatgaggtagaaaaatgttagtaaattattaacactcccacacaacaccgctcccccaaaaaacttatgatgattgtgaaagatttacttgttaaaaagagtcaagtttctggctgggtgcggtggctcacgcctataatcccagcactttgggaggctgaggtgggcggatcacctgaggtcgggagttggagaccagcttgaccaacatggagaaacccgatctgtactaaaaaataaaaaatttaggctgggcctggtggctcacagcctataatcccagcagtttgggaggctgaggtgggtggatcacaaggtcaggagattgagaccatcctggctaaaacggtgaaaccctgtctctactaaaaatacaaaaaattagctgggtgtggtggcaggcacctatagtccca

SEQ ID NO: 83632 - DNA, 1002 bp, Homo sapiens
gaccttgtgatccacccacctcagcctcccaaactgctgggattataggctgtgagccaccaggcccagcctaaattttttattttttagtacagatcgggtttctccatgttggtcaagctggtctccaactcccgacctcaggtgatccgcccacctcagcctcccaaagtgctgggattataggcgtgagccaccgcacccagccagaaacttgactctttttaacaagtaaatctttcacaatcatcataagttttttgggggagcggtgttgtgtgggagtgttaataatttactaacatttttctacctcatcttaagtccgtttgggtagtagttatagctttgtattgaaataaatcatggtctgcctaagagagataccaacaaaaagctgaacactcacttctacactggcgtaatcgcacatggaacacttgaatggcttctcgtgggtgtgtttgtaacgacgatgccgaaccaattctccactggtcacaaaggccatgtcgcagtctgggcacttgtgaggacgagtacctagagaaaggatggagtaacaggaagagcaagatcaagggcacagttaatgacagagttcaatgtgtggcacagaactgctatgagactggaaccctattcatcccatcaactgcagtagcttgaaagcagatacaaaagtcagctccgaaaactatgggagggcctggatgaatttatactaacaccaggatattataacacataccaaattagtttctcttaattacccatctgaatccgctgcctttgaatacaataaaaaccttcttattcctattttgtgaatatcctggtcattatggattaaaagttaatagagaccgggcttggtggctcatgcctctaatcccagaactctgggaggctaagagtttgagaccagcctgggcaacatagcaagatcctgtctctcaaatctcgttgtattatgactataaatatagggccattgggctg

SEQ ID NO: 83633 - DNA, 1052 bp, Homo sapiens
tagtaatgcgcagtctttttttttgagacagagtttcgcccttgtccaggttggagtgcagtggcacgatctcgggtcactgcagcctccacctcctgggttcaagagattctccagcctcagccttccgagtagctgggattacaggcgtgtgccaccatgcttggctaatttttgtattgttagtagatacggggtctcaccatttggccaggctggtcttgaactcctgacctcagatgatctgcccacctcagcctcccaagtaatgaccaatcttggcttatctatacccgtattcatttacccacttctcttagataatgatatggattcgagaagcaaagtttacaaataatgaagagggaagaaggttatcttttagacttctgtattctgaacttcagtgccccaaagctaagcttttgtgcctaacctactgtgctcttgttacagtctgtgttaacagaagttaaagttcggttgttttcgtatttcaggtcagcaaattaaaacgtcacattcgctctcatactggagagcgtccgtttcagtgcagtttgtgcagttatgccagcagggacacatacaagctgaaaaggcacatgagaacccattcaggtaggacttctccactccttactgtattaatgagcttcttttcagtgaatcccatgggaccctgtggaccactgtgtgtccccattgtttatatgaatgaagactggcatgaaaatagtatggaattgataatgcttctccggcatatcctctgaattcgttgttcagaaaacacattagaaaatagtaccttttgttttgttcaacttgaatctgcctacaacaagaaaaattttaagggagaaattaagttaaaatggacagattttaattttaaaagtctgggtagatttcctaacctaccttattcagttttcctggatattgtcttttcctaaaaagaaaaacttgtgggttctccattcagtctcccccaaaggtaagcattgctgtaatgtggaggattccagagtagagctgggcagagcaga

SEQ ID NO: 83634 - DNA, 1063 bp, Homo sapiens
gctgccgcgcccggcctacactaaatattattaataaactccggctgcatgtaaactctagtttaactatgcacagaaatacagttaccactaaaccaataaaacagtcccattacctagagaaagtacagacgttctcaaaaaaatacaatagaatgacctgagtttgaatcacactatgttactttcctatttggggaaggaaggctactaattaaaggtgtactctgtctcctcccatcacagctcccattaatttatagatgagttttactcaggacagaatcttgtggcctgactacagtaagaaaaggaagaaatagaaaaaaaaaaaaaaaaaaagcagctaagcaatggcttttactaaactaagtgacaggccattcctatacataaaatgttatgagagtcagaaggtgaagttatttttgatccccatatttcgaaatataaatccttcaaaatatttttttcacttctcactagttaatctacttacccaaatcactttttcgggctatgactgtgtcacagtggggacagtgaaatttggccacattttctgtgtgcttctgtaaaatgtgcatcttcatggtaccactttgggtaaaccgagcatgacaaatataacattcataaggcttttcccctttaaagaaaatacagaatgaacacataaatgaaatgaataaatactgtaatttaactggagggtaactcaggtggcagatatgctacaccacagagaatctacaggtcttaggaaggctgaggctcagtcccagttcccggatcttgtctatcttcagatatggccaagtcctaaactgctgctggccacctctgctctgcccagctctactctggaatcctccacattacagcaatgcttacctttgggggagactgaatggagaacccacaagtttttctttttaggaaaagacaatatccaggaaaactgaataaggtaggttaggaaatctacccagacttttaaaattaaaatctgtccattttaacttaatttctcccttaaaatttttcttgttgtaggcagatt

SEQ ID NO: 83635 - DNA, 1645 bp, Homo sapiens
cactgtgcctgccaactcttagacttctcaaagcatgacccattctttttattttaattctactttttgccttggtgatcttatcagctcccatgggctcaaattctaacaactctttgtggcattggtggtacagtgataagcatagctgctttcaaatcctaacaacttgtacatttatattcctactccagatctttcttttgagttagccttatataactgtgtatcccttgccatcccacccctgcttttatatctctggcatttcaaattcagcatgtctaaaactgaaggtctaaaacttctctgtcccctatgcccccccaccccccgaccctgaaaataacacatacaacttggtcttaagccctcttccactattcttgtctcaataaatgaccccaacagctacctggttttccaggcctgatacctactttattcttcactctctacagtcactaaatcctgttgattcaactgcttccatctctcatcagttcttccccttccatccacacccattgtcatcacccttgtcccagccaccatcttctcccacctatcctgtttgaacaatcttaattgttctccctgcacctgttactctgccttttcattcattttctgtatagcacccagagtaatacttaagaatcaggagaaatgggctgggcgcagtggctcacacctataattccagcattttgggaggccgaggcgggcagatcacgaggtcaggagattgagaccatcctggctaacatgatgaaaccctgtctctactaaaaatacaaaaataaaaaataaaaaaattagccgggcatggtggcgggcgcctgtagtcccagctactcaggaggctgaggcgggagaatggcatgaacctgggaagtggagcttgcagtgagctgagattgcgccactgcactccagcctgggtgacagagcaagactccgtctcaaaaaaaaaaaaaaaaaaaaagaatcgagaaatgtattagtaacttgttaaaatgcttgtttgtgttttcacattaccctgggctttttactgtgctttcaggtgtccacttgcgaaagcagcattcctatattgagcaaggcaagaaatgccgttactgtgatgctgtgtttcatgagcgctatgccctcatccagcatcagaagtcacacaagaatgagaagcgctttaagtgtgaccagtgtgattacgcttgtagacaggtaggaaccttcattgaaagttgttggtgctttctcggtgtctggtgttatcagagggcatttacatatctagtacagtggctgtttttaaagatagtattttcaaactgtggattatgaggaatgtcaccaaaatcaaaggtcatgctccttgtcaattgtgtcatcccggtgtccagatgatgttttattcagtcacagcttacctcttccttaagcagacatctttctgaaaactgtggaaagtaagtccaggacttgagagaggggaagaatctcatgcggggacatgactgttgggagggagccaaagaaggagctcagcaggaataagcagctctatctgtgctacaattatggaagcagttgtgcaccacactaaaaatacctttatcaagccgggtgcagtggctca

SEQ ID NO: 83636 - DNA, 2170 bp, Homo sapiens
agccgagattgcgccactgcactccagcctgggcgacagagtgagactccatctcaaaaaaaaaaaaaaaaaaaaaagtcagctgggtgtggtggcaggcacctgtaatcgcagctactcaagaggctgaggcaggagaattgcttgaatccgggaggtggaggttgcagcgagccaagatcgcgccactgcactccatcctgggcgatagagcgagactccgtctcaaaaaaaaaacaaaaaaaattagccaggcatggtggctcatacctatggtcccattttgaagctgcagtaagccatgatcacaccactgctctccagactttgcaacagagcaagaccctgtctctaaatatatagctttatcatctcaacaagccgtgtggagtctagacctagcttgggtgagaaatacctgttggccacatgcatgcaggtggcagctggggcagtagccccatgagcaggctctgaggcctttccccctatgccgtttcaggagaggcacatgatcatgcacaagcgcacccacaccggggagaagccttacgcctgcagccactgcgataagaccttccgccagaagcagcttctcgacatgcacttcaagcgctatcacgaccccaacttcgtccctgcggcttttgtctgttctaagtgtgggaaaacatttacacgtcgggtaagggtcagaacttcactttgcctgttatgatactgaatattggatttttggtcttcctctgcagagcatggtagtttttttcactgaggttataaacagagatgctccattgtttggaaagggttagtcatccccatcttgatgtttctatccatgtgtgaacccttccactgatggggaacacagtatctttgaatagattgattgcataaagaaatttcctggccaggcgcggtggctcgcgcctgtaatcccagcactttgggaggccaaggtgggtggatcacgaggtcaggagatcgagaccatcctggctaacatggtgaaacaccgtctctactaaaaatacaaaaaattagctgggtgcggtggcgggcccctgtactcccaggaggctgaggcaggaggatggcgtgtacccgggaggcagagcttgcagtgatccgagatggcaccactgcactccagcctgggcgaaagagcaagactccgtctcaaaaaaaaaaaaaaaatttccttaggtggattgaaacctgcaccccaccctaccccacccttagctagctgtagcctgttctgggtcttctcttgggggctctgttagatcttgacagaactaagagctggtctgatcctcccccgtctctgtctgcaggctgctgagcctccccttagagaacccagccttatccatttcccctgagcagagacagcgtgttcaggacacacttagcagatactagaatttttaggcttaatatggattttattaaagtaaataacttccaatctgatcttagcttttttagtggtgtgaaagaggattttgttctttttgttagaataccatggcaagacatgctgataattgtgctggcccagatggcgtagagggggaaaatggaggagaaacgaagaagagtaaacgtggaagaaaaagaaagatgcgctctaagaaagaagattcctctgacagtggtaagtgacttgttccttgatttgcttactatggcaggctttggagcccagtttccagtgtgtttatgtatggatatgctgggatatagaggcgggcacacactcttcctttctttaaacttctcatctcctaacgtctatttacaacagcagttagtgtttttctggggcatattttcttttttcttcgtggcattccgctcattaatgcccttttttttttttttttttttttttttttttttttttttttttttttgagacggagtctcgctctgtcgcccaggctggagtgcactggcgcgatctcggctcactgcaagctcagcctcccgggttcacgccattctcctgcctcagcctcccgagtagctgtgactacaggcgcccaccaccaggcctggctaatttttttgtattttttagtagagacggggtttcaccgtgttagccagaatggtctcgatctcctcacctcatgatccgccctcctcagcctcccaa

SEQ ID NO: 83637 - DNA, 1054 bp, Homo sapiens
atcctcctgcctcagcctcctgggagtacaggggcccgccaccgcacccagctaattttttgtatttttagtagagacggtgtttcaccatgttagccaggatggtctcgatctcctgacctcgtgatccacccaccttggcctcccaaagtgctgggattacaggcgcgagccaccgcgcctggccaggaaatttctttatgcaatcaatctattcaaagatactgtgttccccatcagtggaagggttcacacatggatagaaacatcaagatggggatgactaaccctttccaaacaatggagcatctctgtttataacctcagtgaaaaaaactaccatgctctgcagaggaagaccaaaaatccaatattcagtatcataacaggcaaagtgaagttctgacccttacccgacgtgtaaatgttttcccacacttagaacagacaaaagccgcagggacgaagttggggtcgtgatagcgcttgaagtgcatgtcgagaagctgcttctggcggaaggtcttatcgcagtggctgcaggcgtaaggcttctccccggtgtgggtgcgcttgtgcatgatcatgtgcctctcctgaaacggcatagggggaaaggcctcagagcctgctcatggggctactgccccagctgccacctgcatgcatgtggccaacaggtatttctcacccaagctaggtctagactccacacggcttgttgagatgataaagctatatatttagagacagggtcttgctctgttgcaaagtctggagagcagtggtgtgatcatggcttactgcagcttcaaaatgggaccataggtatgagccaccatgcctggctaattttttttgttttttttttgagacggagtctcgctctatcgcccaggatggagtgcagtggcgcgatcttggctcgctgcaacctccacctcccggattcaagcaattctcctgcctcagcctcttgagtagctgcgattacaggtgcctgccaccacacccagctgacttttttttttttttttttttttgagatggagtc

SEQ ID NO: 83638 - DNA, 1034 bp, Homo sapiens
gatcgagaccattctggctaacacggtgaaaccccgtctctactaaaaaatacaaaaaaattagccaggcctggtggtgggcgcctgtagtcacagctactcgggaggctgaggcaggagaatggcgtgaacccgggaggctgagcttgcagtgagccgagatcgcgccagtgcactccagcctgggcgacagagcgagactccgtctcaaaaaaaaaaaaaaaaaaaaaaaaaaaaaaaaaaaaaaaaaaaaaagggcattaatgagcggaatgccacgaagaaaaaagaaaatatgccccagaaaaacactaactgctgttgtaaatagacgttaggagatgagaagtttaaagaaaggaagagtgtgtgcccgcctctatatcccagcatatccatacataaacacactggaaactgggctccaaagcctgccatagtaagcaaatcaaggaacaagtcacttaccactgtcagaggaatcttctttcttagagcgcatctttctttttcttccacgtttactcttcttcgtttctcctccattttccccctctacgccatctgggccagcacaattatcagcatgtcttgccatggtattctaacaaaaagaacaaaatcctctttcacaccactaaaaaagctaagatcagattggaagttatttactttaataaaatccatattaagcctaaaaattctagtatctgctaagtgtgtcctgaacacgctgtctctgctcaggggaaatggataaggctgggttctctaaggggaggctcagcagcctgcagacagagacgggggaggatcagaccagctcttagttctgtcaagatctaacagagcccccaagagaagacccagaacaggctacagctagctaagggtggggtagggtggggtgcaggtttcaatccacctaaggaaattttttttttttttttgagacggagtcttgctctttcgcccaggctggagtgcagtggtgccatctcggatcactgcaagctctgcctcccgggtacacg

SEQ ID NO: 83639 - DNA, 1089 bp, Homo sapiens
ctgttatctacaaaaaaatacaaaaatcagcagggggttgtggcctgcgcctgcggtcccagctacctgggaggctgaggtgggaggatggcttgagcccagtaggttgagctgcagtgaactgagatagtgtcactgcactccagcctgggtaacagagcgagaccctgtctccaaaaaaaaaaaaaaagggaaaaaaattattgcactgaactgttgggggttttcagaaatgttaggagactcccagatattaccagtgatcagataatcttaaccttggggatccctatagttgttcttagttgcaaagccgcctgctgccagactctgtcctatgtcctgctttctcctgatactgccttgttcacttctgtggttcatctccaggaagaccagcttctttccctaattgtatgtaaccagaagcatctttagtcaaaagagattattgatagcttctgatagatttctacagttctgtgttctgtctgctgctggttagtagagcatggaatttggttccaggccttatacctagtgactctttatctcccccagaaaagggacgtcagcctgggctccatgccactgttggccatgcagtcttacttgtcctgacccagaagttctgcctgtcggctgtctacagagattgaccagcagatggtctactgctgttttcaaggctttttgctgaaataccaccaagccaataagcctttgatcctgttagcctgcttttgtgtgcttttcccccaattctgactgaacttgtttagttttctaggcattgggccaacttaggcaatagagggcttgaagaagttcagcagggaagcatctctcgttcttgacacactgccacctatctatatattccccacgttttcacttaggatttcagtcacttgagaaataaggcattttatctggaagatcaggagtttacccacagatctctaaatttaaacattttgttccagagaaagagagtgcatgttaataacccgtgctttctagaggaaggcaggcagtgtacattttgtgccgcagccatgggggagggataacaaaagctctttggct

SEQ ID NO: 83640 - DNA, 2831 bp, Homo sapiens
caatatggtgaaaccccatctctactaaaaatacaaaaatcagccaggtgtggtggcgtatgcctgtagtcacagctactcaggaggctgagacaggagaattaaacccaggttgcagaggttgcagtgagctgagatcgtgccgctgcattccagcctgggcgacagagtgagactctgtctcaaaaaaaaaaaaagaaggaaaaaaaaattacctgggcatggtggtgcgtgcctgtagtcccggccactcaggaggctgagccacgagaattgcttgaatctgggaggcagagattgcagtgagccgagatcgcgccactgcactccagcctgggcaatagagtgagactgtctcaaaaaaaaaaaaagaaagaaagtgtatatatatatatatatatatttataaaacaagacttcaaataatatataattgttttctttcatcttccaccacccttctccttgccccaccacctgtgcttcctgatttcatgaaaagaaaatgctgaaccagatctggacgacaatgaggatgaggaggagcctgccgtagaaattgaacctgagccagagcctcagcctgtgaccccagccccaccacccgccaagaagcggagaggacgaccccctggcagaaccaaccagcccaaacagaaccagcgtaagttgttcatctctgctctggaggctggcgtcttctccgagcatgtgggggagccagatgggtccttgttctttggggatgtgggaactaagccatgagaacaagttaagggcatgtcgagaacaaactctcaggaaatggctttttaggagtttttactgaggaacatctgaggaagtctttagaggcctgttacatttcaagaagaagtccagagtagaagggtacttgtgttctgcaagatgggtactgttaatgtgggcgggttttgaaaaacaaccaaagtcacagtcagctggcagaatggatgcggtaatgaatataaaagagccaaatcgtaaaggttggagagggaaagcagtttctgcactgagattgccccttctaagaaactcagggtcaggcggtggctcatgcctgtgatcccagcactttggggggccaaggcgggaggatcacctgaggtcagtagttccataccagcctggtcaacatggtgaaaccccatctctgctaaaaatacaaaaattagccaggcgtaggggtgggcacctgtagtcccatctactcaggaggctgaggcaggagaattgctttaacccggggggcagaggttgcagtgagctgagatcatgcccgtgcactccagcctggtcatagagcaagactccgtctcaaaaaataaaataaaaaataaattgactgtctctggaccgctatctaataaggctgtcctgcattgctgacatcccgttcgctgtcagtctaaaagacccttgtgattcttggggctttaatggaccatttgttctgtctgtgctcttctttgccagcaacagctatcattcaggttgaagaccagaatacaggtgcaattgagaacattatagttgaagtaaaaaaagagccagatgctgagcccgcagagggagaggaagaggaggcccagccagctgccacagatgcccccaacggagacctcacgcccgagatgatcctcagcatgatggaccggtgatggcggagccttgtgcgtcgccaggacttctctgggctgtgtttaaacggcccgcatcttaatttttctcccttctttctttttttggctttgggaaaagcatcattttaccaaacataccgagaacgaaaacttcaaggatgatgttagaaaaaaatgtgatttaactagaacttgctgtctgatgttagcaaatcatggaatgttctgagtccctgagggtttactgtgaagtgctgaggacagtgttgacaactaactcgttttcctagatggaaacggagacattgacccctccctccatgtggtaaaccactccagaatggccaccaggcttcccagagttctatggtcttcttcccaagagagtttttaattgtaaatgcatacttgggaaggacttagagttttaaactgttttttgcttttgcttttccctgactccctttgcttggagtcagctgcacaccagtagtatggcatgctacgatcaggttctgtcctgaaagctttgcctctttcttggcaaagtttctggtatggtcaagcttgtaaataactttttttacattttaatcttttccattaattaagaggttgaaaagaagtgcagtgtaagaaaacccagcattttaattacttgcaaattaagttaccacagactctgtagtgtgtaaatgttgacaaggaattggatcacaatcatgtagcagaatggcacccagaccactgcccaccagtgacggacatgcacgtggcagatcatgatttccagcccacggagccagcatttgaaccttgtataattaactttcagttatgatttcccatcgacattttctttgccctgtttgtagctgattgttgtgttttataaatcttctgttaaggcagaagggtgattatgagtggttcacagcagcccttataagctgggccagaaaatttcactaggtcagtaatttaaaccttggatcttcaaaaaataaaataatgtgaagcaaaaccaactaaaaagtgattcttgcacatgaactgtcacatgtttaaaaatgtgttttttagagagcctcagtcttactgatttcaaacacttttttcttctgtgtattgcttttaagagagccatcagttagctatcagact

SEQ ID NO: 83641 - DNA, 1147 bp, Homo sapiens
tgactccaagcaaagggagtcagggaaaagcaaaagcaaaaaacagtttaaaactctaagtccttcccaagtatgcatttacaattaaaaactctcttgggaagaagaccatagaactctgggaagcctggtggccattctggagtggtttaccacatggagggaggggtcaatgtctccgtttccatctaggaaaacgagttagttgtcaacactgtcctcagcacttcacagtaaaccctcagggactcagaacattccatgatttgctaacatcagacagcaagttctagttaaatcacatttttttctaacatcatccttgaagttttcgttctcggtatgtttggtaaaatgatgcttttcccaaagccaaaaaaagaaagaagggagaaaaattaagatgcgggccgtttaaacacagcccagagaagtcctggcgacgcacaaggctccgccatcaccggtccatcatgctgaggatcatctcgggcgtgaggtctccgttgggggcatctgtggcagctggctgggcctcctcttcctctccctctgcgggctcagcatctggctctttttttacttcaactataatgttctcaattgcacctgtattctggtcttcaacctgaatgatagctgttgctggcaaagaagagcacagacagaacaaatggtccattaaagccccaagaatcacaagggtcttttagactgacagcgaacgggatgtcagcaatgcaggacagccttattagatagcggtccagagacagtcaatttattttttattttattttttgagacggagtcttgctctatgaccaggctggagtgcacgggcatgatctcagctcactgcaacctctgccccccgggttaaagcaattctcctgcctcagcctcctgagtagatgggactacaggtgcccacccctacgcctggctaatttttgtatttttagcagagatggggtttcaccatgttgaccaggctggtatggaactactgacctcaggtgatcctcccgccttggccccccaaagtgctgggatcacaggcatgagccaccgcctgaccctgagtttcttagaaggggcaatctcagtgcagaaactgctttccctctccaacctttacgatttg

SEQ ID NO: 83642 - DNA, 2058 bp, Homo sapiens
ggtgagggggagatgtgcacacactttcgtgcaaacacacacatgcagtgacttggccatctcccttgcaggggctctgtaatgtcttctggggtcatgtagcccagggctatttcagggtccccttagttagcatcaatgggatcatggctgaggccctacctgccatctttggctgcttggtattgcaggtggagagtctggctcagcaggcaacagtgacaatgccccctgccctaccagcaccggatggaggtgagcccagcctccttgagcctggggaattggaaggtcttttcttccccgaggagaaggaagaggagaaggagaaggtaagtggttttagaacacggggcatggcactcccagtcttcccatcttgctgtggagtgtggaaggtgaaaggcagctcttttgggttggtgctctcctaccccaggctgagtttgtgccctccccaccaggatgacagtcctccacagaaatggcctgagctcagccacggtcttcacctggtccccttcattcacagtaagtcagggccttgggggagggagtttacgtgggtgggctgaagctccattagacttggggacccggggacctggatgaactcattcagccttgtctgggtacccaccagcccttgactgggccaggtcgggccccttgtgcaacctgcaaagctggggtctgctgtggtcagcccggggcgggacctgggcggatctgggacaggacaccggctcagctcgcctccccgcgcccctttccctaccccagggacgcgcatgctgggcggcggcgcggagccgcgcgcgctcggggccgcgctcagcaccacggacagcggcggcggcgggggaggggcggaggggcagaggggcggggggacgggcggcgtagccgggcccctccccgcgccctgggcgggtcccccgccgccctagcgcctccgccgccacctccccgggctcggcgctcggtgctcttctggtgctgtcccctcaggtgctgctgaggaagcggagccggagcccgagctggcggctccgggagaagatgcagagccgcaggcggggccgtccgcgcgcggctctccgagccctgccgcccctgggcccccggccggcccgctgccccgcatggacctgccactggcggggcagcccctgcgccatccgacccgggcccggccgcggccgcgccgccagcaccaccaccgcccgccgccggggggcccccaggtgagcacccttcccccactccggagcgcgtggaattggggatcacgggtggcccggccgctcctcatgggtggtagcggtcaaggagagggggtggtgggggcccaaggccacctggtcgtgcggccgcggtcacatcctggcttcttcctgaccaccccccaccccaggccatgcctgtgcgggaccatgggtgtgcgggttccgttcggggtgtgcctgggtgtgggactccgtctcggggcggcccgcggcctccgtggctgcgcgagagagggtgtccgtcctccctccctcccccggggctgctgagagatgccgggcagccgggtagccgagccgcggggccaagcctgcgtctgctgcgcgtccggcggcggcgcgtgtggggagatgcgtgtgtgggctgcaagcccgcgggggcagcgggcactggcggagggcggggaggagccggcttgaggccccccagagggtctgacgcagcagccggcgccactgagccggcagcaggccgggtggagtgggggtggggtgggggacactgcagggaactgttcggagcagagctggtggcaagtgggaacgggtgaccccgggggcacgtgagggctaggtttgctggtgaccgggtggctcgggcgtgtaggatactctgtgggacaaggacgggtgtggactgggtgtgcgggagccagcagcgagtgaggagtgcgtgaaatctggagtctctgtccagcagcaggacagtaggaggctggtatcagcagcccctagggtcaccccagtctggaatcctggagttattcag

SEQ ID NO: 83643 - DNA, 1099 bp, Homo sapiens
ggggcctcctcctccggccccgcccagcgaaggagcttcctcttccgaggaaaggcggggcctgggcgcccgcgggaaacccgggcccgttgcatccgctgggtgtagccgtggggatggcaggttcggggaggctggtcctacggccctggattcgggagctgattctggggtcagagacaccctccagtccacgagccgggcagctgcttgaggtgagcccccattcagggcccggagaccgaggcggaggcccggggtggtgggattgacgccgctcgccgccgtcaggtactacaggacgccgaggccgcggtcgcgggcccatcccacgcccctgatacgtccgacgtcggggccacgctgcttgtgtctgacgggacccacagtgtccgatgcctggtgacgcgggaggccctggacacctcggactggtgagaggccccgcgcggctctggaggtcggagtccggcaggagagcgcgaggtgggcgggccttgtgttcaggtgggcccggcagtgaggatcctgcttgttgcagggaggagaaggagttcggcttccgcgggacagagggccggctgctgctgctgcaggactgcggggttcatgtccaggtcgctgagggcggcgcggtgagtggtgagactgccttgggcgggttaccgggcatgactcttcgtgacgattctgagacccccccttccccccgaactcctccagcccgcagagttctatctccaggtggaccgcttcagcctgctgcccacggagcagccccggctacgggtgcctggttggtaagtgatgcctccgccctccagcagctctccccaccccagcctggccggcgctggcagacgcctatggggtaggagggcttgggcccccattaactacccttctctttttcttagcaaccaagacttagatgttcagaaaaagctctatgactgccttgagtgagtctggggttgggctcgggggccacgtgttgtttggtgaggggatggtgtatctaggtagacaggcctcagcatggttcctgagtcctggccactctcttcctgtagggagcacctttcagagtccacctcgt

SEQ ID NO: 83644 - DNA, 1009 bp, Homo sapiens
tggctggtagggggtttttctctactcattgctccacagcagctcggagccagcgtgggtcatcaccgccaactgtgccacacgggccgctgcccctgccagccctcgtctcctgcctgttccctcatagccaaatcccaggagcctcagaagaaaagatttcctcagagaacaggactcaggacttcctaatgggctgctgctgggcctgccgtctcagcagatagcgggagagtttggggcctcactggggtggaggttaggaggggttctgttcttaatgtcacggtgttggctgccagagtgctcttgaggtggcggggaggagtggtttcagggaggtggcacagggtgaggaggaggaggaagagctccaggcgtgccccatggagcagctgtggctggacccgagggccaatcacccaccatgctcttgactgtgctctgcacagggccagccttctacccagctctgccagaggcggcggggggtgggggcgggggggcacggtgttgagaaaagacatgcgttcccctttgcttgtttgaccagcctgccaggatcgttcagcctggaccaagttctgttcccttctctaaccttccgccctcttccctgccctgggctccttgccagaaaagcccagggagggcttcctcttcctcttggcaccgcttctagacgtcaccaggcttgttttcctgtaatttcctggattcagatgtccttgtgagagggaataacaagggatagggttggagtgtgcctactgcatgctgaccctcagggcaaacgtgtatgttattatttcccttaacctccaaaccactctctgacggtaaatattctcatcattcagatcataaaatggaggcacagagggcaaagctacttgcctcctgtagattgtacatgatggagccaggagcctggtcaggaccatctaaccacagagcctgaccttgaaccacgcttcctcccagcatttgggaatcttcagacctgagg

SEQ ID NO: 83645 - DNA, 1061 bp, Homo sapiens
aaaacaaaaaaagaagaagaaaactttgtcttggcttcataattcagcatcataccataactatgggtattgtgactgtgctttttaccaacttttcttgcacctgtggggttattttgtataaatacctcaggagttataatggggcattatcaaaagcaaatgtaacctctggggaaaatcagtactgttaaccaaattctgtcagaaaggcttcatgaaaatcattgtgttctgtgcagaaaccttcattactttcacgttgacccagaggaaggtaagacaagtaggccaaaatcaagtcaaggtaaaatggaagggagcagttgccacctgtggaactggatggactgtgggagggtgttttgaacgtgggcacaaatactttgaatgagcttttggagagggtactgcttaaatacggctgtggtgtgacctgtggatttgtgtgagttttctgaactccaatcagaaaaacacttgttttcagagaaaggtagacttacagaggactctcaaaagtcctggttgctatgacagtgaaacctttgacaaataattacttaacttctatgccattttctggagcagctgagggcagttatcatatctggcctgtaataaagtaatcaacagtgtttgacaggccaaccatgaggaaaccctaccagataaaccagcaatgctaatagaagctactttcactgaactgattttctagttttcccataagaggagaaatggaatggggatgcaatgtcatctgatgttagaagttgaaatgcagaggtcggtgttcagaaaacacaggatcagagagaccactaacttagaaataggaaaagtgcctttctgatgcctgaaaagtcactcatgcatatttatttttaaatgtttattcatttttgagacagggtcttgctctgtcaccaagcctggagtacagtggcgtgatcacagctcactgcagcctctgactcctgggctcaagtgatcctcccacctcagcctcctgagtagctgggaccacaggtgcatgccaccatagacagctaataaaa

SEQ ID NO: 83646 - DNA, 1038 bp, Homo sapiens
ggagcagccttccctactcactttccccttgcggcaccaaatggtcactccttccagagcaaaaactggcactcatagcaagccagaacccccatccccatcctcatgggtctgtggctgggtgcaggccatcaaaatggacaccacgagacagaagtggggactgcctggccacctagcgccttcccactccttaagcaagcacaaagaagatgaggcagagaattgtcagagctgaaagttcctttggttgctcacaactcaggtatgcacccatgtggcagccaggcagcggagccctactagactgccagtctcatgcacccagacctgtggccagattgtggcctctggctgcctcaggcattttcctctttgcattgggttttcctgcattagtaactacagctgcaacagacatcctccacattgtgcacactggttttgcctttgtcctcaagagttgatacttggcattagcatgaaacttgtgggtgtgggaggatggagagagaactctaacacaaaacatcttattaaaattgtacttgagagacaaaaaaaaaactctgttgtattttgacagaattatttttattaaaatacacatccatgagcagtcatgtgtgtctggtctctgttttgagtcttactgaggttggcaccccttctgtgacacatcctgtcctaaaggatttgggcccttcccagcctctcaagtgcccaggccctcaggtgccttcttcaaggacctttgaaactgtgtatttgtaagaccccaaagaggacaggtacttaaacctcagttctctcttgaaacggctttcttcttatacaaggaaaaagtagcaaattcaactaaagagcctgggcacagtggctcacgcctataatctcagcacgttgggaggctgaggcaggtggatcccttgagctcaggagttcgagaacagcctgggcaacatggcaaaaccccatctctacaaaaaatacaaaaattagctgggcatgggggcgcattcctgtggtcccagctat

SEQ ID NO: 83647 - DNA, 1362 bp, Homo sapiens
agggattggggataggggacatacctcctgaaacatgtggtgcctggcaaccaggccctggcctttgtgggaggagaggtaggggctgtctgctttgcttccacaggatggtcctgatcaagtgagcatctttccttcccctagagcttaccttaccaggcttgctctgagtgagctgttagaggcataggcccaacaggaagctgcttctgctgggtaggacacgttctgcaaacagctgatatttcacatctgcgtgtgccatggaagaggaaccactgatagcagagatcagggcagaacaccaggggtctgtgccaggttcacaagggcagaggctagtccctgcctgagtggcaagcaatgaaaagaaataacaaggtgtttgatatcgttcctccctgtcctcctaagagtacagcacatccagtgaaagatgtctctgttttgagcaaataccagtagcaggtggctttgtgcggttgctgtcttagagattattggcatgtagatgggtttcttttttctttttttttttttttgagacggagtctcgctctgtcacctaggctggagtgcagtggcatgatcttggctcagtgcaagctctgcctcctgggttcacgccattcccctgcttcagcgtcccgagtagctgggactacaggcgcctgccaccacacccagctaattttttgtatttttagtagagatggggtttcactgtgttagccagggtggtctcgatctcctgacctcgtgatccgcccacctcagcctcccaaagtgctgggattacaggcgtgagccaccttgcccggccctgacgtaggtgagtttctagtagtctggaaatgctgtttgtctatacctgccaaataggcaccacttctttcctgttccatatagcctgggacccatgttacagctgacagtccctgcagtgtccaccattaacaccacctctctctggagcatctttcaccttgggatctacagtacttcacaggggtctgctgtggggcagccaggtccctctgtgagggaagccatgcttcttccgagctgggtgagttgagccatcagggcccactatgcttctgggtgtcactccttctgggaacaagcctctgctcccctggcatgattgggcactctgtcagccggtgcctgactgaggctggtagggggaagaaaccaactgattgtcaccctgtagttcaagcctatagggtgcctccaggcagccctgcctggaaaagggctcatgacacaggagggtctctgaattagctggagcagctgttcagcaccagggctgtgggaagataggttgggtttgtgtacctggtgctgccttgc

SEQ ID NO: 83648 - DNA, 1055 bp, Homo sapiens
aaggtgtgtgttttttttttctacctgaagaaggaagtacctatatatttaaagttcttttataaatgtttatgtatgtccgggcacggtggcttacgcctataactccagcactttgagaggccgaggcgggcagatcacttgaggtcaggagttcgagaccagtctggccaatgtggtaaaaccccgtctctaccaaagatataaaaaattagctggatgtggtggtatgcgcctgtagtcccagctactcaggaggctgaggcaggagaattgcttgaacccaggacgtggaggttgcagtgagccaagatcgtgccactgcactccagcctgggtgacaaagtgagactctgtctcaaaaaaaataaaaaataaaaaatatataaatgtttatgtgttagagtggagttaggtatcattgaaactaccttttctctcaagtgcttggtcttctgtgtttgaataggcgtgtttagtacggtagctgtagtcaaattatagaaaaagatggcacagcaatcaaagtcaagatgttgatgttttgagtgttttcttgtaggttgcactggctcagcaaggacatctttgccagtagagctgttagacgcagagggcagacaccctggggtcttgcttggaacctggggcagatgataacagaaagtccctctccagtgaggctgtggtgctcagactttcctgggagcctatgggcatgtcttagtttgcatggtcagaggtttctgctggaagatgtggaagttttgatgtttatcttttgcaaggtgttttttggccttcttaggtgtgaaaccaaggaacgggtgtggccccaaaataaaaatgtcagaactcttggctaaatgactcggaagcagggcaggtgaatccaactgcagccccaccctggtgtcggtgagctggcagggaagggcagaggccagggtactggactggggaagcaagaagacgaagtcagggttgttgatggagagagtggggtttgggcgtctcccaggcttggcactttaagggggtgggagaaagacaaa

SEQ ID NO: 83649 - DNA, 1074 bp, Homo sapiens
caggtgtggtggcactcacctatggtcccagctattcagggggctgatgtgggaggatggcttgagcctgggaggcagaggttgcagtgagcaaggtctcaccattgcactccagcttgggagacagagtgagaccctgtctcaaataaaaactaaaaatagaaattaaaatttaaaaattgtaaaaagtaatttgtgttagttgtagaaaatctggaaaagcaaagagaaaaaggaatccaagaggactggactgtgcttgcagctctccacatgactgcagggtttcagcagacttgagctcgggtggcagggctgggtggacccccttgctcgggtggcagcatggaccccctgccagttgcagtggatagtgggagcttctgggtggatttgtgagtgtggacacctgtgggcctttgctgcctgcttccaggtgcggttgcttcttctctatcttgtgttctggtggatctcgactccacttgtcccaagcagtgcctatttgctgccctcttctctcttgagctagatagggcagaatagctgttctcgtatctccaccttgcattgtggttttggcaggcaacggtaggaactgagaagttacaggcctactcatggcctcactgccacgaagagcttgtctgttgcctctctgtgcttcctgtctcacctctctggcatgatatttcttctccactttgctgccatatagaagaaaggagtaaatcagatggctttaccttactttcacctgtgtcatagcgtaaataattccctctccccagctcctgaaatatatcctgcagttagaaaagaaggccctggtagagaagtgttgggagctaagctgctctatctattctagtcacctgctccgggagtaaaagcccttgttgccgccctccctcccaggctgacccaggcaggttgtatctgtgagtgtttctagcatagcctggcccattaccaacaaggaagcaaatattcacctcctttctccttggtaatctcaagtaaacaggtgtttgttttagatgtcctgagatccaggccttccagaatggcctc

SEQ ID NO: 83650 - DNA, 1157 bp, Homo sapiens
gcgtgaacccgggaggccgagcttgcagtgagccgagatcgcgccactgcactccagcctgggcaacagagcgagactctgtctcaaaaaaaaaaaaaaaaaaaagagatgtggagcgcagaacatgaggtcggtagggccagactgaaaataccttgtgtgtggcctggctcatgcctgtaatcccagtactttaggagactgaggcgggcaggtcacttgagttcaggagttcgagaacagcctggccaacatggcgaaaccccatctctcctaaaaatacaaaaattagccaggcgctaataatagtggtggtgcatgcctgtaatcccagctacttgggaggctgaggcaggagaatcactcgaacctgggaggtgaaggttgcagtgagccgagatcacgccactgctctccagcctgggtgacagagtgagactctgtcttaaaaaaataaaaaagaaaataccttgtatgctgtggccagggagcgtgggctgtatcttgagggcagtagcagtgtggggggctgtggatctacccatgcttttgagagtgaagaaaagaagagactctgccagtctggttcagccaggcttctctggccaagagcccttgtccagggtgggccagtgactttaggtctttggctctagcatggttttctcatagcggttgtctttttttctcttggctgttcctttggtatgaagagatgaagggatggggtgtgaaagactggtagccaggaggcttctcagaggtgagaggactctgcttgtgctggagttctggtattttggttttgccagctcccatctgaaagacagtaatgccccatgttttatacccaagcatctcctctggtgagccagaatcagccaaagtgattttccatggagacctagagagccactgttaattaagatatcttgattaagatctcacctgccacattcctggtgtggaggaccatctaagcttaggcccttccagctgagagacagctgtggctggcttctcaccctggatcccctcaccaagttccagtctacatgcattgtacagtgctgttgagaactttggtgctcatatgtcatctggggaaggcgttgtcctgcccgccctgataagaaggtgctgtccttgcccaaggt

SEQ ID NO: 83651 - DNA, 1089 bp, Homo sapiens
tgtctaggctggtctccaactcctagcctcaagtgatcctcctgcctcaaagtgatccaaagtgctgggattgcaggcaggagccaccattgtcagcctcccatggattttggaggtgtgttttttatcctggtttagtccatgacccaagcattaactggttgtctagctttcctgtgttacctagtttgatcctcacagcatctctggcaagtggctagagcaggtgatcatctaccttcccattttgtgagtgagccctgagtccctgggatgtttggtggcctaccctggctgcagggcttagggtgtgcagtggagtagcctgacttatcagatgtcctcgcctgatcctagacacacatgtccatgctgctgctgcctttccccattgtagctgttgcatttcttccctgggtagagtgaaggaatgttctgttggattcctaccagattgcaatgttaggggacagagctgaaaggtgcatggtgctgtgtagggccagagaattgtggcatgctctgggccgggcttgatcaacttactgttccatttaatctgtaaacttgcttttctgtagatttgagtacacctcctttgtaaaaggtatttataaacccagttgttagtgtcattgttctccagaacgtcctttgttttgacaatatcttttggagaagaacacactaagctagtctaataaggaaagtttcatgtcaagatttcacagaatatttatatatacctactatgttccaggccctatactaggtatagggagaacagatgtaaagccagcacagatcagctttgtcctcaggaagcctgtggcccattcagtagagagtggactgaaagtctttctgcaagaggaggcagagcctgggaacagttgggaggaatgagtaggagttccccagtaggcgagacctgttagacctatgagtctgatgggtaactagcttgacttctgggtgctaggctttctgggcactcctcaagtataagagagctctgtggagtaggaggggctgtgtttgagctaagagcttggcacagactgatgggcttcaactgcattttgccga

SEQ ID NO: 83652 - DNA, 1374 bp, Homo sapiens
tacccttgttttgtttgtatgggcagtgtctcaggcaggactgctgttctcaggaggaggtgaggcaaaggtggaaggtttaagtgtttattcagttgtctaatgattcctcggcctgtgtaagtgcgtcctctggccacagaggagtggagttgtcatggaggagttgcagagaaaaatgaggcttccatttgcatttccttctgctgaaatttcttacttgccctctcctgttaggtcatggcaaaaatcacaaagatgcggcctcagtgcgtgccacccaccccatacctgctgcctgtggcatttattactttgaagtgaagattgtcagcaaaggaagagatgggtaagcccttcatgaccaccctctttccctgatcatggagctgatccctgtggtcagagttcaggtcctttggctggcacttgttgctgatgtgagctggggagccgcatgggtctgggctgccattatttcctgactgtgggcatggtctggtctaagcagcagatcttgatggccagtgggtgtgttgggggtaaagcagggattatttttagtgatgatgtaatttgatacctagaaggttaggcaaacaagtaacaagtttactttaaaaatttagtgtccagaatggagtttccctcatgagcatgtggtgtttttgtgacttccttcctttcacattcttgctgtattcatgaggttcttttttatggcatttagtcatgtggaggccctggtagccttcaaagagatagtagagtctttgcagcattcatgaaagcttctgtggccaccggcctgtcatctcagggtaaacagcatacacatgatcagaatcaggtgaccttgctgctcataaacttgtttttcagtccaaggacttgaacactactagttggatcaactttaggaaggtcctcattaaagtcagcattaggagccaggcacggtggctcacgcctgtaatcccagcaatttgggaggctaagatgggcagatcacctgaggtcaggagttggagactagcctggcaaacatgctgaaaccctgtctctactaaaaatacaaaaaaattaactggcatacctgtaatcctatcacttcagaagaccgaggcgggcggatcacttgagatcaggagttcaagaccagcctggccagcatggtaaaaccccatctctaaaaaaaaattcaaaaattagctgggtgtggtggtgtgcacctgtaatcccagctacttgggaggctgaggcatgaaaatcacttgaacatgggaggtggaggttgtagtgagctgagattgcaccactgcactctagcctgggcaatagagtgagactctgtcccaaaaccaaacaaaaaaa

SEQ ID NO: 83653 - DNA, 1688 bp, Homo sapiens
atggtcaggcctggaatccctgtgaccccacccttcttctttgtagcaagtccagagtcggcctccagcacccctgagtctctccaggccaggcgacatcatcagtttcttgagccagccccagcgcctggtgctgcagtgtaagatcccacaaccccattcctcatgggcctcttgggaagggagcattgggtatgctgtgtacatagggtcctcccccttcctacgggtatgcagatgattacccagcagggcagcttcagctgggctggggagagctcaccaagagcacccctgccatcctggtgcctgcctccacggcttagaggagcctgggtgaggggaaagtatgtggttggtttgtagtcagaaaaggcttcctggaagacgattagcagaatcgggaaaggcagcagtagagtaaggagagagactatccattctaaggcctggagtcatggacccaagcaggtaccaatatagataataagtctgaaccaggatgtcgagtcgactgtggagggacagagccccagggaaagactggcctctatgtggccccctgacccaactgcccctcagcaggtggtcagggctgctggtcctggctggccaagggccacgtggtccccagcctcagcagaagccagcaagacttgctcttgaataagagcctccttgaggcaagttcagccccctctgtccactgttgccctcagcttatcttcagagcctgcagagcctctgttggtcaggcatccccctaggccccggaccaccggccccaggccccggcaagatccccacaaggctggactgagccactatgtgaaactctttagcttctatgccaagatgcccatggagaggaaggctcttgagatggtggagaagtggtgagtcctgggcacatggggtagggagaggaacccctcgggtcatgatcagactgttcagcctgctctatccccaccttcttgacagcctagataaatatttccagcatctttgtgatgatctggaggtatttgctgctcatgctggccgcaagactgtgaagccagaggacctggagctgctgatgcggcggtgagaaggcggaaggtgtgggggtgctggctgggggagttttggtgctgattctgcctgtcccttctcttcctccactgcaggcagggcctggtcactgaccaagtctcactgcacgtgctagtggagcggcacctgcccctggagtaccggcagctgctcatcccctgtgcatacagtggcaactctgtcttccctgcccagtagtggccaggcttcaacactttccctgtccccacctggggactcttgcccccacatatttctccaggtctcctccccacccccccagcatcaataaagtgtcataaacagaatattctgcattttggtgcatgtcctggggccagccaggcagggactgattcccccccacaactccccagcacagtctggagaatggcatggattcagacaaacacttttatattaaaagctaggggttagcaggactggagtacgcaggctgcccacaagttcctagcttgcaggctctggctctcgaggtcccacacgcctgatgtcaatcacctgaagccgctccagggcagtctggaggatttccaccacggcttcttccttctcgtcaccctcctctg

SEQ ID NO: 83654 - DNA, 2869 bp, Homo sapiens
catgtctggggtggatgcttttccaattgcccctcttttctgtgtggctaacccctacttatcctttgtgattctgctgaagtcacctctgtgaagcctttcccagcccctcctggttggttcactcatatgccctctctattcccataccccaggggtcttcttcggtccacactgctggtgacatagggctgggaacaggggcgatggtaggggcaagtggtttctgggtccctagccctgagggaaaacggctccagaccaagacccctgatgaaggcatgtctctatattctctatccctcctcaccgtaattctcggcataattgctggtctttacacagagcccggagagccctgcttgaaacggcttcccccaggaagttgagtggccaaacaaggacgatagccagagggcgttcccatggagccagggtaagtacccagcccactgaccccaaagggccctggctgcctcggggaggggggttgaggtctagctctgctctggagcccaccttgaggaaatctcaaggcagacggacagactggttgcttggtgctttgccgatagtctgttggcagatcggcccatattcaggccagtgggcacttggaggaacagacacctcggacgctgctgaagaacatcctactaactggtaagtgagcgctggcctgccggtcagagttaggtaccagtccaaccccagtcttgtggtatcttttattcagggtggcctgttctgtcagccccaccctctccttggtgtttctgcagccccagaatcttccatcctgatgcctgagtcggtagtgaagccagtgccagcaccgcaggcggtccaaccctccagacaagagagcagttgcggcaggtacacagaactcccccaccttggattgtgctatgggcagcttagtccgggagtttcttgggggttgcaaaagccagaattggacttcctggcctgtctgagataagctccattcttatagcctggagctgcaacttcctgagctcgagccccccacaaccctggctccaggtctgctggcccctggcaggaggaaacagaggctgagactgtcagtgtttcagcagggagtggaccaggggctgtctctctcccaaggtgaggccctggacaccacttttgctaccctctccctcctgtcctctggagaggctgaggagtcctgagagagggccctcacaggcctggatcacttaccatggttttcttcttttacattctcttgccggttgctgacagagcctcaagggaatgctgatgcctcttccctcaccaggtgctgctctgggtgtttcctgttctgggagtgggtggaggagagacttggggagggaggtgctgcctgggatggaatctgcccatactacttcctaccagttttagcctcacagcatctgttctaagagatgagagccccagggcagatggagggatctgtgggcaaactgggtctcaggtacctgactttcctctgtgcctccccacctcaccagatccctcaacctgacctttgccacacctcttcagccacagtcagtgcagaggcctggcttggcccgcagacctccagcccgccgagctgtagacgtgggtgcctttttgcgggatctgcgagatacttccctggctcctccaagtaaggttgggttttcccctgctggcctttggggaaagctctccccgctatgacagataggaggtgatgctgagtcagggttgcacccctctcggtggggtcaaggacagcgagcaactctggtcagtgggtctacaaggaatttctgcttgctttctacagggggcctctttccttggtccctcggtgtctcccagggccccatatccttagactatagggctggaggttgtaaaggggtgtggtgtggtggccaaaacttgttgagaggggccaggtttcaggatcagctggccaattcaaactgacctgggagcctgattgcagaaaacaagttcaccagagtaagaagagggtttgggaagacggagcagaacaagcagcgaagaggtattttaagtgggcagctggtgggcgggcagctataggggcctgggactgccaggcagaggaacaggaaggtaagcaaggagggctgtaggcgataaggcctcgcgtgctaggtcgtcttctttctctgaaggccactcagggtggacccatgcagcccactgtccaggccctggcaacgctgagtagcagccggtgggcctggaatacgctgagagccagctggcccctgatctccaggtgacagcctcagaacctgttactactctgcccacagacattgtgttggaggacacccagccgttctctcagcccatggttggctcccccaacgtgtatcactccctgccctgcacgcctcacactggggctgaagacgctgagcaggctgccggtcgcaagacacagagcagtgggcctgggctgcagaagaatagtgagtgtgtggcactggtggcctggagccaaatttagcttgggtgagagttgacaatggtagttttccttcctcaagcccctctgtgcccctagagcaccctggctgtggctgcctccttcatccaagagcagagtccatgttgggccaggagacttcagatccatgtcctggtgctgcctctggctttgtctttcctcagtgggcaggactgggtctgctggtccatctttacccttctctgagctatgcagccttggcctgctgcgtctccggcctgtattctctccccttcactcaggccctgggaaaccagcccagtttctggcaggagaggcagaggaggtcaatgcctttgctctgggctt

SEQ ID NO: 83655 - DNA, 1198 bp, Homo sapiens
cttcggagagggagatgggaatgagagagccttctaataatagcaattgctagttaccagtgccctggcttatcgtgtgttagactctgagttaaacatcaactccttgaatcattacaagctccttatcaggtgggtatcaacctcaatttacagatgaagaagccaagacttgggctgcttgcattacattaaccgaggtttacccgcagcgaggctgcctccaaagcatccggagtttgcaaccatcactgtccaccccgcgagctgcgatagtgcgagaactacaattcccgtggggctgtgcgggagcatcgcgagagttacattaactgtggcggcgggaaggcggagcctgcagctggctgggcggttaggagggcccggggccgagacgatggctgaccacaaccctgacagcgactccacgccgcgcacgctgctgcgacgcgtgctggatacagcggacccgcgcaccccgcggcgaccccggagtgctcgggctgggtatgtgagggggctccccgagtacttgagcaactagagggaccggggagtggggtctgggtggaacccagcgtcgactctgttcgaagaggaaaactgagtctcagagaggagcagggtctgggtggaacccagcgtcgactctgttcgaagaggaaaactgagtctcagagaggagcagggcctgggactctgagaactggttccattgctctagccgggcccgggccagctgtttgtgcccctgcccccagggctccaggcagccagccctcgggaccacagagcctgactgatcccgggtctctgggggctcggccactggagatggaggataggggttcagaatctcaccttctgctctgttctctaggcagctttccccagaccagccagggtgtgcctaggcatttgccctgaacttctgcgtcccgagggttcccactgttcctgctcattgtcttactgtccttgtagctcccagctgggaaatgggaaaggagctagaggacagcctgggcagaagttgggaggcagcaactggaagatgctttgctaaggagcagggaatttggcctgagtcagtgggagtggcagtgggtgagggctgtggtgagctcatggtgcagaggatgcatacgttgacatctgccagactgggacagtggagtttctttatagggaatgagaa

SEQ ID NO: 83656 - DNA, 1021 bp, Homo sapiens
cgcaagaagcacggaatgtgaactggtgccccggcagcctgctggactcccagaccccatccagccaggggaccgcaggccattgttgaactcctctatactcctgggcactggttgacagtactgaggcttaaggcagctggactctcttgctggtgacctggcatcctcaattgtttcctcctgaagtggaagctggggccttagactctgccctggtgacaccagcaattatgactttgtctacccttcctccccagttattgttgcagattctggttaagcagaggcttcagaaccactgaacttgaaacttaccctctagggatgcaggtgggatgtccagggactataggtttgggaaaaccataccttaaggttggtcagcagtcagacaactctaatgtgtgtagtgataagagattcaagtaacatcagttctcctccttttcatgcttttccttcccaggtgcagcctgtgattctgatggggactggtaaatctgtgcctctgcctcctaggacttattttcccaggaggccatttacaaggggatctggatgacctgctgatggagatccagcttgccagggacttaggtttatcctgttttgtttgctactggttacaaattctattttctgtacaattagtcagactaaagttttcactgtgtttgtttggcaaaacaaattaaacaaaaagtaaggtttttatttgggtctcgccattttatttttacaaaaacatagttaaatgtccttgaaacatggggaaataggcctcagcctttctgaaagaccaggctgaccctgaaagtagagatgcttcaatgaccagtttttccaaaaatgggccctaagcacatggatcctggccttataaggtcctcacagagttcctggcccagctcaccctaaagagtttggaaactgcaccaaatgggcccagtttgtccatggattatctccctgtatcctttcaacaagaaggaccaactggtaactaagctatattgtg

SEQ ID NO: 83657 - DNA, 1045 bp, Homo sapiens
tgatggggtgaggcggctcctgccgggtaggcccagcccacgcccttctctatcagtgaccaggccccagcagcaacacagaattgccccgcaggacaggatgacttcataagaatgggatgttaaggtgggacttaatgcacgggaagtagaattcaggcctgaggttcttgagcctagtgctaaaccagaacctgggctggaaggggctttggggggtggggcacgtagatttcagactttgtggggccctcccgaagcctgggtggcagaactagggctggaagctccagaaagtctggcttcccctcacttgcttgctcacttcccaacaactggagctgcctgtaaacaggcaggaacctggttgctttatgaaattgcccttactgatgccatcagagaccctactgagttctgggggaagagttatctttgaccaaaaaatactatcctgatatcctttgtaaaggcgcttctgattgagagatggtaaattaaggaaccagtccagagaagaccttgggactaggggagagatggcatgtaaagcgttgatttctctgagccgcagtctttccagagactaaagaagtagctcaggcctggcgcggtggctcacgcctgcaatcccagcactttgggaggccaaggccagcggatcacctgaggtccggggttccagactagcatggccaacatggcaaaagcgcatctctactaaaaatacaaaaattagctgaacgtggaggtgcacttctgtaatcctagctactcaggagactgaggcaggagaattgcttgaacccgggaggtggaggtcgcagtgaactgagatcatgccactgtactccagcctgggtgacagggcaagactctgtctccaaaataaaaaaagctgggtgtggtggcgtgcacctgtaatcccagctacttgggaggctgaggcaggagaatcgcttgaatccgggaggcagaggttgcagtgggcagagatcatgccactgcactccagcctgggcgacagagcaagactctgtctcaa

SEQ ID NO: 83658 - DNA, 1039 bp, Homo sapiens
ctgcagctctggcctcaggagcaagcagaatatcaggtctcttagaagggctgattgagacccaaggtgaagaaagccactgaccctgcatatttttttcttcctccttgaatattttcccaggtaatgtttttctgttcatttctggtcacttcttccaagtactcttgacctagaagttttcttgcatatgaattgctctgcctagttattctccctggtcaggaagaataggcaagaatgctgctcagattttaccaagccctgccttctctctggatgtaactttcctagtccatatcctggcccatgaggacatggaaatcaggttcatccaagaggctcaggagaggccaactttgccagtggagctgggcaataaggagggactacccacaggacaatgaggtgaaatctagaactagaagcagttatttcaagaccctgtagattgtctgcgtgggtactttctaggacacagatttcaggtgagctggcttacggctatggcgtagtttgcgtatttcatggccctgggtgacttgaccaggagagtttttgtttttctctcgagacggagtctctctctgtcacccaggctggagtgctgtggtgcgatgtcggctcactgcaacctccgcctcctgggttcaaacgattctcctgcctcagcctccctggtagctgggactacaggcgcacgccaccatgcctggctaatttctgtatttttagtagagaaggggtttcaccatatttgtcaggctggtcaaactcctgacctcaggtggtctacctgccttggcctccccaaagtgctgggattacaggcatgagccactgatcccggcctaattttatttttatttttatctatttatttattttgagacggagtctcactctgtcacccaggctggagtgcagtggtgcgatctctgctcattgcaagctccgcctcccgggttcacagcattctcctgcctcagcctcccgagtagctgggactacaggcgcccaccaccacgcccagctaact

SEQ ID NO: 83659 - DNA, 1053 bp, Homo sapiens
gccatgttggctatcagtttccctgttggaggagtcctttccaggctgtgcctcaaggctgtgtttttggcctccgtgatagcatgtgtggaggatagccacgactggtaccaattttggggccctcactgtaggccatgcaaatctgctggcattccctgtgggcttcagcagacacatgagaatctttctgtgtgccagtctggaaggagtgatagcgtcttctcgatcactctcctgcctcaggctaggatctctgtctgctctgtctgctttgctgagatggtagaacagggttgtgacctcgaaggtttgagaaagctgacatcatcctccatgaaaactcctgttgtttggactctaggtttgatgtggaactcttctgcctgaggcctttgtttggaggtggaagccctggttcaggactgccttgcccctttctgagagagccaggctcagaggagtgctctcactgatgtagtctgttcttgtctccaggcccacgttgtcactagaagtcctgactctggagaggcctccaaatctggtcagtccaattccaccacctatcagctgctgacctagagcgagttggagttggctaacctcgctgaatctccttttggtcatctctaacaagggggttgactcacagggtgtggttacaaacaagtgcacataagctctttgcacatttctgtgcctcatatgcattagtgaaaatgaagtgttcacagccagacagttattttgagttttgttcttggaaacacttaaaattggaagataaaaatggagtttttctgttgtctaacgggatctcctgggtcagaggttttaacctgggatctatggctgaacagttgaaaattattcacaaggctggggcatctctacctctgtgcaaatgtgttgggagagggccacagttgctgagacattcttggagggtctttgcactcacagagacctaagggtcagtgaaggctggtgttcagtgggtgagaggtcatcagagtcttttctgctcctcaaggagcctggcctcagcct

SEQ ID NO: 83660 - DNA, 2155 bp, Homo sapiens
tccaccaccacttcagtcaaggagtttttgtatcagaaagttatcacaggccagttatggtggtgcacgcctgtaatcccagcactttgggaggccaagctgggtggatcacttgagctcaggagtttgagaccagcctgagcaatatggtgaagcctggtctctacagaaaacacaaaaagcagccagacgtggtggtgcttgcctggagtctcagctccttgggaggttgaagtgggaggattgcttgagtcctggaggtcaaggctacagggagatgagatggcatcactgtaccctgacctgggggacagagcgagacccttttcatgccccgggacatttgctggtgctgtttcttctggttggcataccctttctgaggactgcccaactttgctctgagccaagggtagaaggagatgtggcccttatccattcctccagcttttcccctaccctcagagctcttaggcagtgggtatggcaccttggaagctgcagcagggtcagggcacattgagtgactaagcatagcaagtaccaggtggacggggcagaaatgccagaggtgggagctgtgctctgccttaggtcctctaagtttgtgtgtgagtacagccagtgtctgacctcttggaaatgtgaccaagaccacagtgaagactagatgatggtcctgtgctttccccacttgttgatttctttcttggcagagtatgaactaggacacaccttgtgttcctgtgtggcaggcgtgactggatccaagctttctcccctgcttgctttagattttcctggacatttcttagtcatcccagcactgagcttctatttttagtgccactacctcctaggggacctaaaataaagctggcttagcttcctgctccctcattggcttgagtgttggtcacagagcggaggattggctgcgttctcactctttccctacacgattcctccccgctggctcctctggctttgggcgaggtcacacggactggagtgagctagcacttaccatgttgagctgagggctttatcatgttcctttagagaagcttcacaaccaccggcactgtcaggttgccatccccatcttatagtggaggaggctgaggccctaagaagggcagtgacttgcatcagatcccaccactgcgaatgcttgtctgctggggtggaacccacctcctcactgctttggttcagagtcctattatcaggacagagggagtgggctcctctacagttggggccatccacagaaaaacatgtgggtctgcagtcaggggatctgcagcaagatgtgggcttccctacttggaagcagcctagcaaagcccaagcggctctcccatctggggcttgggttttccatccagtatccttacagccatggtctctagttgggagggggcctcctctcagagacccgagagagacagctccttagggtaaaagcaatgctgggatgaggggatatgaagggatgacacgtttcccttcacagcctccatcccctcttcccacaaccctcagctttccctctgatccttgaactcatgtccccagctctgaagtgggtaggagtcactcccatcaatgaagaaatatcctagaaagggccaggtcaggtaatcacctggcctcggggaagtaaactgcccccatgagactaagggatcacttgctgtttttggcagaggagggcccttggctgggtacagtggctcacgcctgtaaccccagaactttgggaggccaaggcgggtggatcacttgcagtctggagttcgagaccagcctggccaacatggtgaaatcccatttctactaaaaatacaaattagctgggtgtgttggcaggcgcctgtaatcccagctactctggaggctgaggcaagagaatcacttgagcccagggagcggaggttgcagtgagccaagatcacgccattgcactccagcctgggcaacaagagtgaaactctgtctcaaaaaaaaaaaaaaaaaaaaaaaagaagaggggccttgagaatctccccacatcctcactgggtcttccatctgtcagcgtagccctgggacagtgttgggggcctgagggctgtagtacaaaatagtacacacacacaggtatcagttg

SEQ ID NO: 83661 - DNA, 1169 bp, Homo sapiens
gacaaggggatgctgggggacagtagggaacaatgactggtcattgtagtgggatcatctcccctgctcttgcaattcctgagttttatgacctcgagggtagcctcaggccttgagttattccgacccattcccaaagggaacctgaggcacctgccaattcagcatattctgggggtctgagggaccttagcatgggcggctaagttgaccccgtcccaggaccatcggagtccatgctctgggagtgggcagggacctggcgccttctgagtcgagtagggctttaggtggcccagtgcgtggacgcttacttcagccccgtgggactttcctgacctcgcggacacaggggcggggccgccgagggggactggctgcgggaggggtttaggcttccgcccccagcccggaacctttcttctccggccctggcaggttccgggagcctcggctcgtgggtgccggaagtggaggcggttggtggggttggcggggctcagcgacgctgcgcgggtggcggtttgcgaactgcgggtggactgtgtagtgaccggcgtcccgctgtctcgccccgtggcgggtgagcgagggtgcgtggtgcgcggcggcggcggaacgaacgcggtgcgggcggggcgcccgccgcagggcccatggcctcctgcgcgagcatcgacatcgaggacgccacgcagcacctgcgggacatcctcaagctggaccggcccgcgggcggtgagcgggggttgcgggggtgggccccaggcgagctgacaaaagggcggcgcgcgtctgaaccgccattggggcccacagctcccttaggactagctctggatcctcccggcgggtaagggtggacggggattgactgtgcccctcgaagggcgcagacccctgggtgtgacccctccctatcttgtcctcaggctgttctgccttgtccttcagcgtctcggttgaaggtgaggcgccttctctgaatccgctggggccctctggtttcctggccccgaggtctctagtgttcctgggactggcctagctcctcttccctttctccatggttcagaggcctggtctgggctccgtatatggaattctgggcccaggcttaagcgcgatgctgaagagctgccggtccccctccataacttgcccttctc

SEQ ID NO: 83662 - DNA, 1619 bp, Homo sapiens
atggcttgtacccctcccccaggtagaagagcctcatgctcatccttggtcctgcctacatcagtgtttatggaacgagagatgaacacagggccctcctcctcatggacatgctttgctcagttgagtgttcctagagcacctcatagttcttgaaggaaactctgaaaggggagaggcttgtgggcaggtcgagcaaccttatcagaatgaccctctttgtccccaggccccagtgcagagagcccacggccatccagtgcctacaatggggacctcaatggacttctggtcccagacccgctctgctcaggtgatagtacctcagcaaacaagactggtcttcggaccatgccacccattaacctgcaagagaagcaggtcatgtgagtacctaggagacgacaatagtggtgatggtgtatttggggtgtctgctagctgaaggcatgagatggggagtgagcggggccagcagcctctgctgcttcctctctagatgacctggggtggagcttgagcttgcactaggatgagaggcaaggacaagctcaggggtttggcctggatacctggtttagaatgaaagtaggctcattcccaaggaaggagatgagcaagcagagctgtgggtctggggccagtggaccaggcgaagctgacattggactagataccttccccagtctggctatgtcctcgcttcctcccaaccctgcccgctgagcctttgggtgaacaagaggcaaagtttttgcactcttccccacagctgtctctcaggagatgatagctccacctgcattgggattttggccaaggaggtggagattgtggctagcagtgactctagcatttcaagcaaggcccggggaagcaacaaggtaggtactgggatgctgtggcatatataatgtacgggggcacacccagcctttccagtctccctcatgctgccagttcctatggggaccaccttgacactttcccagtttcaggaagccagggctgggtgccaagcctctgtgggagtctggctccaggaggtaacagtgggtagctggacttgcatctgtgtcctctcccatccccagggatgttgggggccacctaggctctggggaagttccatgacttttctcaccctgggttctcaggtgaaaattcagcctgtcgccaagtatgactgggaacagaagtactactatggcaacctgattgctgtgtctaactccttcttggcctatgccattcggggtgagtaaagacagtgaggaggaaggaatgttctgctggatgtcccacagagccagttccaacatcaggccactcaggccttaggggtacaatggaaggtttgtccatgctgcctcttggggagctgggtgggaaaaccaagcttgagactctggtggtggcagggagacaggtggggcagcgcttctctgctactgcctgagcctggatacgtattcatggtccactgctctcctgattccagctgccaacaatggctctgccatggtgcgggtgatcagcgtcagcacttcggagcggaccttgctcaagggcttcacaggcagtgtggctgatctggctttcgcgcacctcaactctcc

SEQ ID NO: 83663 - DNA, 1050 bp, Homo sapiens
ctcgggcttgatggaggccctggggatggagatcggcataataccccctccctcctggaggcagccttgacccaggaggcctcgactcctgacagtcaggtttggcccacagcacctgacattactcgtgagacctgcagcaccctggcagaaaggtgaggagcttgggaggggaaaagtgtgctagcaggaggggcttcagatagattcatccatggctaagttggcctgtcctcccagccccaggaatggccttcaggaaaagcacaagagcctggccttccaccgaccaccatatcacctgctgcagcaacgtgacagccaggatgccagtgctgagcaaaggtgggagccactctacaccattgccctcatggggggatgggcagcaagtgggcaggggcttactcctccttccccttcccacagtgaccatgatgatgaggtggccagccttgcctctgcttcaggaggctttggcaccaaagttcctgctccacggctgcctgccaaggactggaagaccaagggatcccctcgaacctcacccaagctcaagaggaaaagcaagaaggatgatgggtagggagaaatcctagggagggagagggtggtctctaggctgcctcacatagcctgaggtgcttctcgcctatggcagggatgcagccatgggatcccggctcacagagcaccaggtaagtgaatgagcccactttgtacttgtggaacttcaccctgggcgggtggagaagggctctgggccattccctggtctggtgtgtgggaataggtggggcaggcatcgtgtgactgtcagtgctactgacaggtggcagagccccctgaggactggccagcactaatttggcaacagcagagagagctggcagagctgcggcacagccaggaagagctgctgcagcgtctgtgtacccaactcgaaggcctgcagagcacagtcacaggccacgtagaacgtgcccttgagactcggcacgagcaggaacgtatccttgagactggtagcacaacatggcatagggacgg

SEQ ID NO: 83664 - DNA, 1380 bp, Homo sapiens
cccgctctcccagcctgtgctcctttccctcatccagcagctggcatctgaccttggcactcgaactgacctcaagctcaggtaagtggggacagccagggatggggagatgagctggggagtggggcagtgggagggagcagtttgaagctgacgcccacttctgcctgaatcctctccctaattttctccaccagtcctttctgccttcacccagagggttccctctgggcctcggtgccaccagggggcgctcccgtctgctggcacccacctgtagcctgtcctttcccccccatccccagctacctggaagaggccgtgatgcacctggaccacagtgaccccatcactcgggaccacatgggctccgttatggcccaggtgcgccaaaagctttttcagttcctgcaggctgagccacacaactcacttggcaaagcagctcggcgtctcagcctcatgctgcatggcctcgtgacccccagcctcccttagctgctaagcctgccttgcccaggggtgggatggcactgaaggccagcagacaggcctaggctggggcagggtcacggctggcctttacctgctcaggcccccatctctggggtgtttgggggtcagggagcagggagcactggccgtggtctacagcgtgtggtagtcagaaggtttagctgggcccagggcaggtattgcgcctgcttgggttctgccatgcctggagcatgaccctgagatcgtgacaccacttgagtggaattttccatgttcctttttacctctaatttggatctttttgtttttgaaaaacattgagaaattcaattaaatgcttttggaataaaatggagtatgtgtgtgcttttggtttgtctttggtgtgactctcataactgccgtctgttcgttctctgcccatctcttgcccgtggagctctgtcgaggccaacccagccaaggggccgggttacccactcatctgctccaactgccttcccagatctcccttctccctccttctatggagtgagggtccaggggcctgcccagcaccagcctgtgctcctgcgaatttctgctctctgaggtctcctcgctccttttcccatctgggtgttggaggcggagccgccggctgggttcggagccccacccccagctcccatccaatcaccgtccctccctccgggggctgggcggacgggctgcactccaagcagctagctcctgcactaggctctcagccagggatgatgcgctgctgccgccgccgctgctgctgccggcaaccaccccatgccctgaggccgttgctgttgctgcccctcggtgagtgcgggcatccggggcccgggccacacccccttctcgcccagc

SEQ ID NO: 83665 - DNA, 1078 bp, Homo sapiens
ttgctcttgttgcccaggctggagtgcaatggctcaatcttggctcaccgcaacctctgcctcccgggttcaagcgattctcctgcctcagcctcccgcaatatggtgcctctaaatcagggtcgattcagttggccatacccctagaagagatttggaatgctgattcactagagggtgggtttgctgaataagcatattgtctaggtctaattgtagttttgtgcttgttaagttgcataaatgagctagaaaaagtgcagccttcaggaaacctgtttgcatctgacactgagctccagttgcacttcacctcaggcatctggttggcatctagaacagaatgcccctacagaagtaggtgctggagttctctatcataatcacaagttcatagttaaatgagtgagactttggtttggccttctgttttactttggaagtgtgagtgtgtaatatgggcaacttaggtcctcttcacagcttctcagctgtatgatgtgaatgggctataggtgtgccaaagtatcgacccttaagcttcaggatagctgagaacagctgtctccactgactcccgggtgttatacaatagtatcattctatcattctctctgtgtatcttggcatggggaaaaatttttgagaaaaagtacagctctggaagaagggaagcagttctgcttgttgagagctggagagagacttatttatttgaactccctttccttccaggaatcttactcaaggagcattaagccggtttgtgttggctaggtcatcactgagctaattcttggtacagccctctgttgccatggtgtctgatgtgatgctaaggtggaaacatgtgatgttttcatttgctgggagaaagttttctttccaagctgccagccttgaaatggcctctcagggcatcctaagagtcatgtatcaagggactcttggtgtggagccatccaggctgtaagttccttaagattagagactatggccgccttctttttgtttgtcgcaatctctggcagagttcctgacccacagcaggaattcagtaaatatttctgggttgaac

SEQ ID NO: 83666 - DNA, 1043 bp, Homo sapiens
aggctggagtacagtggtgcgatctcggctcactgcagcctccctggttcaagcgattctcctacctcagcctcctgagcagctgggattacaggcgcgtgccatcacgtccggggctaatttttgtatttttagtagagacggggtttcacccatgttggtcaggctggtctcaaactcttgaccttgtgatccgcccacctcagcctcccaaagtgctgggattacaggcctgagccactgcgcccagccaggccttttcttttataaaccttaggtttttccctgaggaccagactaggtcctcatttaaacaaaaatttaaacaaaaatacccagtacatgtgcctgtagatgactgtttattttgtgaatctagggttctgcttcttcaccaggaagaagtgacatctgagtggctgtgctgggttactcatgcagtttgtcttgcctccgaatggtggtagatgttgttactgagtggtcgtgggcatcggggtgagggacctgtgttctgcctcaggaataccagcccaagaggagcttcagtccttcactgcatgaggtgttgtgttttccctgaaagaagaaataagtctgcaaaattccacagtccgtagttctatcctgtggcctctgcgaaaaggaaccttggttctaaatgcctttgtttaacattatttcctagttgccatgtggaacttcctgtgcatttgggtgagaacagctgcaaatcctgaagagccttgtggaggaatcttttcctcttatgtgaagaaaaataaacaatatttttttttggtttggtttggttttgctttgtttttcagacaggatttctgtctcccaggctggaatatagtggtaccatcaccgctcactgcaacctcaacctcttggactgaagcagatcctcccaccctagcctcctaagtagctgggatcacaggcacatgccaccatgtctgactcaatttaaaaaatgtttggcagagatagggtctttctgtgttgcccaggctggtcttgaactcctggactca

SEQ ID NO: 83667 - DNA, 1047 bp, Homo sapiens
catccccatttcttttgtggtatctccccctaccacaaaccaggctggaacccaagccccttcctccacagctgccttcagtgggtagaatggggccagggcccagctttggccttagcttgacggcagggcccctgccattgcaggagggtttggttcccactcagcttctgccggtcggcagcctgggccaggcccttttcctgcatgtgccacctccagtgggaaacaaaactaaagagaccactctgtgccaagtcgactatgccttagacacatcctcctaccgtccccaatgccccctgggcaggaggcagtggagaaccaagccccatggcctcagaatttccccccagttccccaagtgtctctggggacctgaagccctggggcttacgttctctcttgcccagggtgggcctggtcctgagggcaggacagggggtttggagatgtgggcctttgatagacccacttgggccttcatgccatggcctgtggatggagaatgtgcagttatttattatgcgtattcagtttgtaaacgtatcctctgtattcagtaaacaggctgcctctccagggagggctgccattcattccaacagttctggcttcttgctgtaggaccaaggggttgccctggaggaggggtgggggccccggcctcggcatggctactctaggaagagccactgctactcaaggagtcactcagccccttctgtgccagaagtccaagtagggagtcggaccctcaacagcctcttctttctcctgagccaggaagacagacatgaatgcatgatgggacagggcctgggtctttaatgggttgagctggggagggcctgtggtgagctcagttgtaggctatgacctggttgatccaggtgctgaacttgctaactcgagtatacacagcaggtgcgcgcacattgcagtttttggtgccccaggagacaataccaataagcacccatgtgtttcccttctggcagacaagagggcctccggagtcaccctgagagggaagagggagggaga

SEQ ID NO: 83668 - DNA, 1049 bp, Homo sapiens
tggctgtgtcattcttgagtggaatggggtgggcaggcagccagcagggctctgtagctaaggcgtccctgcaggggccattacctaccatagctctagtgtctggcctaagagatgcccttcacccataacctcaggcacctacaactccagaaccccagccctggccagcattgcaggcttggtctccacccaaaccttccttctgactccacacttgaaggctcccccaccactccactgtcttgctcttgccctctagtccactggagacttgtaaattatgaaataccccatgtactaccccctcctagagactttccatggctcctcagtggcccaggacaaagctcatacctttcaatcaggcccccacaggccccactgagggctaaagtgctgacaagaggagccgctccctgactccaaggcaagttctcaccaagcactcctcaacctcgcaacatctttacctgtgacaccccttagatgacgaggcatgcctgcactgctcacgtgaagctcgtcttctgtctgcacatgctgggcttgtgactccaagttttccaggctaataagggtcacaggactcacatggggagagatgacacgtttctccaacaaacctttgctgggcccctgctgagtctcaggcctggctgctgggtgccagcaagagcatcctgtcctcagcgagaacggctgaactccgctggagcttcagaaatgtcagggagagtctacccagggcccagggagggtctatgccgggctgcacatccccaggccgctgagtgtgctccctgcaccccaacattctattaatgaacatttgtaaatgtaacagaaaagtagaaagagttgtatattgaatacccttatactgtcaggtcaccacagacctgacagtattttgttatatttgttttatcatctattcatccctctatccattaattcatcgctcctttttttttttttttttttttttttgagacggcgtctcgctctgtcacccaggctctggagtgcaaatattttgttatatt

SEQ ID NO: 83669 - DNA, 1098 bp, Homo sapiens
ggggagggtaagtgtgctttgtacctgggggttgagggtatgggaggtggggggtgggtctggtcactgcagcatctggggtgacgggggtaagggtcacggggggaatccagagtccagagtgagggctgctgctcacagtgcccggctgcctggggaatcagctagaagccaagctggacaaaccagatgtggtgaactggatgtgctaccgcaagacagaggacttcttcaccatctggctggatctcaacatgttcctaccccttggggtagactgctggatcgataacaccaggtacagccatgtgctccaccctagccccaacacgctgccccttggctactggctgctgagtggcacccccgccccgcagggttgtctacaaccggagctctgggctcgtgtccaacgcccctggtgtccagatccgcgtccctggctttggcaagacctactctgtggagtacctggacagcagcaagctggcaggtttgtgtcagagggcagggctggggctccaggcctgggtgctggcccacagcaggcatggcccaagcccccggtgctgctggtccccccacagggtacctgcacacactggtgcagaacctggtcaacaatggctacgtgcgggacgagactgtgcgcgccgccccctatgactggcggctggagcccggtgagtgtctctgcggatgaccggcttggggtggggcaggtgccccagaccccagctgccctgaccccttccacccgctgcaggccagcaggaggagtactaccgcaagctcgcagggctggtggaggagatgcacgctgcctatgggaagcctgtcttcctcattggccacagcctcggctgtctacacttgctctatttcctgctgcgccagccccaggcctggaaggaccgctttattgatggcttcatctctcttggggctccctggggtggctccatcaagcccatgctggtcttggcctcaggtgagaaggcctcgaacacttaggtccagcgatgggtgagaccaagctgatcctgggcctgccttcattgcggctcctgctcacagtggcctctaggggtgctatct

SEQ ID NO: 83670 - DNA, 1049 bp, Homo sapiens
aaaacagccccagcggcactggaatctaggggtggaggtggggtggggcagacaagtagtgttagatgggccaggggtggggaccctccttgcaggatggctcatggcgacctgtgactggctacactacgtgtagggaccaatccaatgtgcggcgcatgcacactgctgtgaagctcaatgaagtcattgtcacgcgctcccacgacgcccgcctggttctcctaaacatgcctggcccacccaggaacagtgagggcgacgagaactgtatccctttgtggagaggcaggcagttgggaggtggatagcatgggaggtcaagccagcggcttctctcctgggcacccctgggtgggcatggcccaggtggcccgggttgcccgttgattctgttgttgcctccttgacttgaggccctgcagacatggagttcctcgaggtgctgaccgagggccttgagcgggtgctgttggtgcgcggtggtggccgtgaagtcatcaccatctactcctgagcccagtgtcatcttgtggcctggagtcgaggtcttggccaggacataacaagctgtggtctggggtaacagcctcttcccagcacccacctgccagccctgcttgcctggccctgtcctggacccagctttgctaggtctccttggaaaccaggcctgggcctcaaaatggagatggatcccaggtcttgtgggaccctgggatgtttggggactttactatctagcaccccagtaggcctgtcctggccagagaagactggtaggggccgagtggggtttgaaggcagccggcccggcccagcccaggagcgctatttattgcatatttattgtttggatgtcaccatcagagacgaagggaagggtagccagggagggagtccagcccagctgcctgcaggaagatctggctcagtctactatgggcagggccccccaccaagctgagccgaatggagacagctgagctgaggcctgactttttcaataaaacattgtgtagttctgggcctcctgctgccccggctct

SEQ ID NO: 83671 - DNA, 1032 bp, Homo sapiens
cctgtgcggtgcagacactcctgaggacccccaactggcggccccggttcaagtactatcactggtgagccatgcctctgacacgggagaccctggggaggccaggagcctcattctgggtgaggcttgggtttcctgggtagggagctcttgaaacactgtggggagggagattatagggctgcgggggactggacctaggtcttacacccagtgacctgaccacccacctgggacctcccacccgggacctgacagggctaccagggcatgggccaggctgtggccaggggtcctcctggtcctgccctgactctgccctcccctctcgtccagggcgctgtccttcctgggcatgagtctctgcctggcccttatgtttgtctcctcctggtactatgccctggtggccatgctcatcgccggcatgatctacaaatacatcgagtaccaagggtgagtgagcactgccacctggcctctgccagctgagggggcccggccgagcaggcagggtggtctggcattggggtgggcagggagctgggccaccgtgggtgccaggactggggactgtaactcaggacccctgggtggtcttgaggggcagaacccctccacctcgcatccacatagacagaaccccctgggcggcaccaggggctcaccagctgtggtggaatctgcagggctgagaaggagtggggtgacgggatccgaggcctgtccctgagcgctgcccgctacgcgctgttgcggctggaggaggggcctcctcacaccaagaactggcggtgagttcccgccagaccctggccagggcgcagaggttcttaggggtcgctgtcggggtcagagggtcgagaggtgccggctccccatcctggggctgcccggggcaccctcctgggccatgctacccaaacctgcagggaccacgacccgagaagggaagaagaggaggggctccctagaacggccggccctggtctcaggctccccccacccggccactgcaggccgcagctgctg

SEQ ID NO: 83672 - DNA, 1404 bp, Homo sapiens
ggcgtgagccacggcgctgacctattttttatttttttttgagacggagtccccctctgtcacccaggctggagtgcagtggtgcgatctctgctcactgcaacctctgcttcctggattcaggcgatcctcctgcctcagcctccagttgctgggattacaggcacgtgccaccacgcccggctaatttttagtagagatggcgtttccccatgttggccaggctagtcatgatctcctgacctcaagtgatcccccacctcagcctcccaaagtgctgggattacaggcgtgagccactgcgcccggcctcttttaggtactcgtaaaaagaaaaccaaaacgacaagtttcactttccaaataagaaataaaaccctccttatccatcttcttgtttcagacctacattgccccaccagctgccattttttacccatcgggtgctcatgacacgtcgaatgccactttgaacaatatgcgtgtgtatgggaccattttcctgaccttcatgaccctggtggtgtttgtgggggtcaagtatgtgaacaaatttgcctcgctcttcctggcctgtgtgatcatctccatcctctccatctatgctgggggcataaagtctatatttgaccctcccgtgtttccgtaagtaacccaggaatttatctgggcattgcatggacatccctcccatgtagccagcctttgatgccccagatcccagagactgcagggtgggcacaggcaggggctttgacctgagcaggtgccggtgcttctgtccctcacagggtatgcatgctgggcaacaggaccctgtcccgggaccagtttgacatctgtgccaagacagctgtagtggacaatgagacagtggccacccagctatggagtttcttctgccacagccccaaccttacgaccgactcctgtgacccctacttcatgctcaacaatgtgaccgagatccctggcatccccggggcagctgctggtgtgctccagggtgggtcctccctcccgtcgtcttgctcttgagcccacaggctgagcaggggcacagagcacagagctgtccttgtgtggccagcttgggaacgggggcaggactggccgccttcccagccccccagtgtcctcccagcctggctcctggcagccgagtttggagtgagtggagcctgtctggccagcgtccaaggcctgcagcagcctgtcttccccagccaccagcccctgacactgcctggggatgttcccacaggatccataaaggcctctgtggaaggcgggcagtggcgggctctgggtgacggtggttcagccacctttgtctgtcgacttctagctgggcagctccttctctgtggtcagggtagccctgtggctgacgctgcagtcatt

SEQ ID NO: 83673 - DNA, 1020 bp, Homo sapiens
ccatcctggccaacacggtgaaaccccatctctactagaaatacaaaaaattagccgggcgtggtggcgggcgcctgtagtcccagctactcgggaggctgaggcaggagaatggcgtgaacctggcaggcagagcttgcggtgagccgagattgcaccactgcactccagcctgggcgacagagcgagactccgtcgcaaaaaaaaaaaaaaaaaattagccaggcatggtggtgggcacttgtaattccagctacttgggaggctgaggcagagaatagcttgaacccaggaggcagaggttgcagtagtgagccaagatcatgccactgcactccagcttgggtgacagagcaagactccatctccaaaataaataaataaataataaaaaagtgcagaaaggtatagaatggaaaattaaaagcacccataatcccaccatcctgaaatcactactgttcgccttttggtatatataagtcttagggtcttatgaagtattgcacacgcacactctatttacataaattgtatatatatatatatatatgtgtgtgtgtgtttgtgtgtatttcccaaaagtatatgtgtgtatatatacatatgcatttatgtgtatatgtttacgtgtgtatgtgtgtgtgtatgtttcccaagtgttgaaaacagttttttgattttggttttttgggttttttttgagacagagtctctctctgtcacccaggctggagtgcagtggcatgatctcagctcactgcaacctccatttcccaggtttaagcaattctaagtgattctcatgcctcagcctcctgagtagctgggattacaggcgaccaccacatttttgtatttttagtagagacgaggtttcactatgttggccaggatggtttcgaactcttgaccttaactgatccacccacctctgcctctcaaagtgctgggattacgggtgtgagccactgcaccctgccgaaaatggttttttgaaaacaggattctccatggtac

SEQ ID NO: 83674 - DNA, 1007 bp, Homo sapiens
ggatccgtcccctgcactgctccacgcaggacaggttgaggagccatttgtttttgctgaggctcttctgaagtcctttaggtcgctcacaggtcttgccccaggccaggacccttcaggaggggcattaaggaacttgtctaaggtgactcagctagacaagatcatggccatggagttctcttctccctagcttcagggcagcacgggcactgtctcgtgggtcttccctgtcccctctccccgtatgattttcactaatctagtcctttggatcagtgaggaggctttgctggggctccagtggaagctgtcagggccacacttcggaggctgcactcttgggggctcagtgcctcaaaaagatgtcagccagcctctgtgctctcagcctctgccctggcctcctggctggcccctactctgccctgagttgagaaagcctgcctggatttgcgtattagatcttcctcacctgccctacagcctgagcactttctctgtaggattttcccaacaggatgtcccaggggcttccaaagcaccactcactgggttcagaagcaccttttgggtacctgcagggcctgctggtgatagaaccataaacaagccaagcctgccctaatatagtaacaaaatatacaagcacattctgttaccatgacctgtagtgaccactgtgatagggagtatcagatgccaaaggaatgtgagagggagaaccaactccacctgaggcaaccttcggacatcttcccgagagaggtaacagtttcactgaagagtttgccaggccgtgaggcagggccgactctcccaggcagagtccagcacattctcaggttcgcagaatctgagggacccatgtggtcaggggctggagctaataagagaggtgatgggacacatctggtggcccaagccaaggagttggacggcacactggattacaagacaacagagggttttcagcatgggtgatgagattagacttgctttcagag

SEQ ID NO: 83675 - DNA, 2095 bp, Homo sapiens
tggcagccgaaggtgctgtgtgcggcttcgtctatctggagggcactgcctgggcggtccctgaggacaccgaacccttggcatcctgcacattgggtactccggaaagaccgggaaagggactggggcgtggaggcgatctgggggcgggtcaaacgctggccccgcccctctgcaggccccgtccctcagtgtccatacgtgcttgtgctagggcgcctgcgccctcacctggattcccttcactggagggaatgatgtcccaggttttggtcactggcctctctctggctatccctgggccttcaagagcattggcacggtgccatgtgaaaactgagttgcaacctggtgacactgcagctccaaagtgctccacagaaatgatttggggactggctttctgggaaggggcccaggctggggggctcaggaagcaggccctgattgtccctctctcttcacaggacatggcaaccacagagagagcagcccttttctttcccccttggaggcttccagaggaattgactactatgacaggaacctggcactgtttgaggtagctgaggagccattttgggccacaggtttggcacacagaggctttagctaagcaggcaggctggacacgtgggcctcctctgtcttgctcttcctctcatctcctcttgtgttcctggttctcatggcagccgggctgcagttcccttggccctttcaactgaaactgcctttccagaggccactcacaatcccacccccattgctacctccagggtggttcacctctgacttccttacaacccctcagcaaggaaacgcccgcttaggatttcccaactcaggatttctcctcttccttccactcctggttcttctccaagtccatggttcttcgctctcccatggattcttccttgtctttcttggttgacccttccagctctgtccctctctagttccctgagtcctggtccatttgcagctttaggggatacgtctctggaaagattcccaaatatctgcctctgtacttgagttttatcttcttcagactcaagctgagcagtgagatctggatttaagacgtagtttaagctcctaaactctgacccatgcattcagccactgcatggctgagtaatggagactccttaatctgccttttttttctctttcttcattttgagatggagtctcactctgtcgccccaggctggagtgcagtgacgcgatctcagctcattgcaacctctgccttccaagctcagcgattctcctgcctcagcctcccgagtagctgggattacaggtgcccaccacatgcctggctaatttttgtgtttttagagacggggtttcaccgtgttggccaggctggtcttgaactcctgacttctagtgatcctcctgctcagcctctcaaagtgctggaattactgctgtgagccaccacatctggccgaggctccttaatctccacatgcccccaagggccctcgtcttcctttctcacaccaaagcaacttctccctgtgtgtaggtcagaaaggagctgacagagagggaaaagctaaatgtgggcaggaggcaggtagaagcacagcctcgagaaggctgcaggagcagggatcatcgcctagaccccggtggggctgggggacctgagctctgggaggcctcctgacctgggaaagcagcaaggttctgcggtgaaggccttggcccagccccgcctgaggatgggctggaggatcaggatcccatctccgcgattgatgtgggtacttgcaggactggggtcaggggaagaccatccagggagatcagggtttgggcagacaagggagacttcacttgtcccagacatcactcttttgccctctttggttccctgaggtgactagagtggcttttttgtggggagggtaggcgtgagtcctagaggtgcagccatagccaggaggtggctgggcagagcaggcaggatgaagtatgccattgcccccctgccagccgtgttcttccctgccctctctcccctgaggcaggtggttttcacaaatgggctggcagtgattgtagccaaggc

SEQ ID NO: 83676 - DNA, 1059 bp, Homo sapiens
cagtcaagcctgggtttgagattccagcaccttaactctttaacttaggtgccagggccgagaggtaagccccatctccctcctccttcctcccaggtgcccgcgtctctccacagccctttctctatctcctaccccaggaggccccccagagggctgttcttgttaaggcccaccctcggagcacgaacacggctgaggacatgtgtctgtgtacgtagtggcatatgcatgtgtaattgtgcttgtacaagtgtgtagctgtgggtatcacagggtgaaggctggttcaggtcagggcattctcacagcccctgtttcctgcagggttgacagtgatgaggatggtgatttgactgatgataaatgcctgtgatatctgtgaccgatcatgatggagatatgtaggaagtgtgtggttgacacgtgtcaggtgacgttgtctggacctctgatccatctgtgatggtgacacgactgagatgatccatgcccaatgtgaatgatggctatgtgtgtgtatcacttgactgccatgtgcagaggtagcacaggacagtggcatgggctgctggacattgcagaggttttacaggcttgacagctgtgtgagtgccccagcctccatgcccttgtctgcccctagcttgattcaagtggtcaaagcaaaagccagcattcctgcttccctaaccctgggaggacctctctccccagagggtagactgggctgcatccccaggatcagcctggaccagtgggcaggcagagctgagcctagctgctggccccaccttggccacgccttggcccctacagggtgactggagggacctggagctacattggctgagtcctgctagatccccgcaagctaggccagctcctcccactgcctcccttcctctttctcctcctcttactcctttccagccagaccttggctgtctacaggatgggggacaccctgagccccggtgagtgattttgatccttggtggggactgcaaagggtcagagggcacaaagcacagtgagcctcagatctatctcctgccc

SEQ ID NO: 83677 - DNA, 1079 bp, Homo sapiens
aagctatcacagtcttatatgtctctagtctcaaatttaatttacttacttgtaggaattgtctgtttggcatgatttctctatttttttatccctagcattgattactcagatcatagtctttgtttttatgtagtgtgtatatatttctcatagaaaaatattaggatttttcaagagtagttaagatttgtatttgagttgtgatgactctatagtgcccttctctcgctttgggcatttcttggtgctttttcagaaacatccttaatgatgtttaggtttctaaaaaattgttaacaatgggtaaccatgtgataaagcaaatctagcaaaatgttaattgtagaatctaaatggtgagtgtttgaatggtcactataagttaacaatgggtaaccatgtgataaagcaaatctagcaaaatgttaattgtagaatctaaatggtgagtgtttgaatggtcactataaaatgttttcaagttttttatatgtttgagtgtaatcatagtatagataacattttctagaccttccaagtccacctttttctgctggcagtgagctagtctagtgggctggctgtttaagagaaagccagcctgactctgttgttggtgtgtggggtgtgtgtgtgtatgtgtgtgctgcatgggtgtgtttgtcagtgcatgtgtatctgtgtcagggcagtggttgatgcagcctcttgtgttcccaggggacttcagacgcagagcgagcccttgctgtggccaggcttgtgtaagttcatcctctgtctttagcactgcctttgcctctcctttgagctgtgagggtttaatgtcctggtgactttgtaggtgactcacccttctgccttctagcccattaccttctgtttccaggttaagagtgcctggtttccagccaggtgcggtggctcatgcctgtaatcccagcattttgggaggctgaggcaggtggatcatgaggtcaagagatcgagaccatcttggccaacatggtgaaaccctgtctctactaaaaatacaaaaattagctgggtgtggtggcgcgtgcctgtagtcccag

SEQ ID NO: 83678 - DNA, 1050 bp, Homo sapiens
gcactccagcctggtgaccaagcgagactctgtcttaaaaaaaaaagagtgtctagtttccttctctttgtggcatccaagggctggcctgggactcatgtgtacctacagtgcctagatctcagagaccctctatgcatattggggggagctgtttttttgtatttattcgtgaaactccttcccagggactcccatgactatgagtcctgaagctttaagtatcaaagtataggtaagacatattgcttcctgaattaacatagataggaagcctggggaacataggcagagctcatctctacaaaaatggtggtgcatgccagtggtcccaactacttggaagactgacgtggaaggatcacttgggcccaggaggtcgaggctgcagtgagcctccattgcgccactggactccagcctggggaacacagtgagaccctgtctcaagaacaaaaacaaaggcaggagagtgctatagttaatgtgataggttttgaagttaagacagacctggtttgcaattctggttttgctacttgttaactgtgtgacctgagataagttgcttaacctcaatgagaacctagttttctcacctataaaatagtgctaccaacctctggcatagggaagggtaaatgaaataatgcctgtaaatgtctttgcagcatgtggcacatactgacatcttagtaagtgttagctatcgttataattacaaagagtgagtgggaactcaggcagttattgctgctgatcacggactattaactatgtattactatttaggttggtgcaaaagtaattgcggtttttgccattactttcaatggcaaaaaccgcaattacttttgcaccaacctaatacataccagaggacggagtgaggattcttttgacatctaagaattgtttggattaaaccatctgtgcagcccagccaacaaaggcagtgctagaacttccaccagaagctgtcgtctggcaaagggctcttaggctcatgtcacttttctgcattgacaaatggcttttactatttcagcc

SEQ ID NO: 83679 - DNA, 1438 bp, Homo sapiens
gaaagcttctaccaggtaactctgatatatgctccctggattaagaacctcagttttattttatttttttaaatatttatttatttattttgagagggagtcttgctctgctgcccaggctggagtgcagtggtgcgatctcagctcactgcaacatccacctcctgggttcaagtgattctcctgcctcagcctctgaatagctgagattacaggcatgcaccacaacacccggctaatttttgtatttttagtaggtacggggtttcaccatgttgttcaggctggccttgaacacctaacctcaggtgatctggcctccaaaagtgctgggattacaggtgtgcgcagggcatcccccttgtgtacactgtacttgggccatggctgacaattggcagggccaggacatgaactcaggtctcagtgctttccaggcctatgctttcctatcctcatctgctgcctcccagaaaccaggggagtgaaggagactgcttttcttcagttggccagtgggtctattgaggcaagcctgcttgtaggtagatgtgctgttcctctgctcaaatatggacttgtctctcattctttctccccaaagacttggatctggagagttggtgtccaggagagtgtcatgctagagcctggccagaagacaatctctagttgccatttcccctcagtgtgacccttgcaagtgcctagggtttttggttacctaatttccttcctagtccttaacacacacatgaaacacacagaaatactgaagaaagtactgagagctacttggataaaatagcaaaaggaagttctacaagacagagaattggatcagaccagctggtgttgcttaaatcaccaaatgtcagaggattctaagtgagcacttgtaatggaaccttttagagatgttgctctgagcatgaaggatgggactagaatgagaatttttattgtatttcttgatgaacctgtcagtcccgcccttaaaatgtaagtgcctctttaaggcctgccagggtgaccctaagacctcaggccaagtctgcctcctggagcagcacctagagactgttccttcctgccagtccctggcatttgggccagcaggtcctgtcttgctcatgaactgtctgtcagtccagcctcttgatctgatgtcttctggaatggcctgcttcatcctgtccctgataggcctccactactggtttttgcaacctggctctctgctgcccccgcctgtctagaatcaagactggcagcagccacctagatatccccctgctctgctaggcagagatccagttcttggaagagggttcttgggatcatctttcctccagcttgcctggcctgaaatttctgatgagggaagaagatagcaatgacacagacatgcagtgtcatctacacctctctatctctg

SEQ ID NO: 83680 - DNA, 1050 bp, Homo sapiens
actctgaaaccagattccaagtgtccatggctgcagcagatgatcatgacacttggcaggcggaatcaggatgggcgctgagctagatccccgagaccattgtctggctacctccattgcccacctccacccactccctactaatcttgtcttgagtggcaagcttccttcttggatgttgaacattgtttttccagtctggacctcagagtactgggagttcattcccccttcccttacaatttcttgagcatgccaaaattcatcttccctttagggagaacccaggtccaagctgctggtaggacaagaatgggagcctaggggagcaagtacagaagccttaaggcagcagctcggtgtctcagttcctctcatttctgcagctcctttcaggagctgagtagtgccctggctgagggagggagcggtgatggtgggtgaccccaactgcttcccttcctttccccaggagagcatacccagcccagatcacccctaagatgtgcctactagagtggtgccggagggagaagttggcacagcctgtgtatgaaacggtgagttcctggctgtggcctgccctgcagccagtcacagcactcccatggcttacaccctcaactctagattgccaggctggagcctggccttgacctctgtaggcatggagaagctgctggtggccaggtcagttgctgatagccctcccctcttacagtggcctgttgtccagttcagccagacatctctcttttttttttttttgaaacagagtctaatttttattttttattttttagaaatgtggtctcagccgggcacggtggctcatgcctgtaatcccacaactttgggaggccgaggcaggtggaacacgaggtcaggagttcaagaccagcctggctaagatggtgaaaccccgttttcctaaaaatacaaaaattagctggacatggtggtgggcgcctgtaatcccagctacttgggaggctgaggcagagaactgcttaaacctggaggcagaggttgcagttagctgagatcatg

SEQ ID NO: 83681 - DNA, 1047 bp, Homo sapiens
gaggtagctgggctctgcgggggggggggggggggcgcctgcgtgttcacgtgacttccttccttctcgcggagaccgagttacgcgataggcctgtgagggggcggggcccggcgcctgttcgccgtgttagtggccaatcggcagccaggcagggtgggcgcgcgtagggggcggggccgggcgcgcggcagggcgcgagagcgcacccgcggcggcggtggcggcgactgtgggggggcggcggggaacattggctaagccgacagtggaggcttaggcaccggtggcgggcggctgcggttcctggtgctgctcggcgcgcggccagctttcggaacggaacgctcggcgtcgcgggccccgcccggaaagtttgccgtggagtcgcgacctcttggcccgcgcggcccggcatgaagcggcgttgaggagctgctgccgccgcttgccgctgccgccgccgccgcctgaggaggagctgcagcaccctgggccacgccgatgactactgcaaactgtggcgcccacgacgagctcgacttcaaactcgtctttggcgaggacggggcgccggcgccgccgcccccgggctcgcggcctgcaggtgggtgccgggccaggcgggaccgtggagcgaccccgcttctcgctcgcaggatctctcgctccctccctgttcccttggatgaccggagaccgataaccctgtgtgtgtgtgtgcgcgcgcgtgtgtgtggtgagttaaaaacggatttaaatcgctgaggaggcgtgtgggtcgctgcgacgtggaagtggtggcgggcttggctggaagcaaactagtggggaactcgactccgggacgatcggggtttggaggcccagggtccgggctgctgcccaagtggcgtctggttgtcgttgctttgccagtgtgttgcaaggaaaatgttgtccctgtgaattgttagcgcactgggtttttcatctattctaggtcgtttcttgaaattttagtttgaaagatgcttatttttcaacggtaggacccctctaaaaatc

SEQ ID NO: 83682 - DNA, 1051 bp, Homo sapiens
atgagataatgtatttaaagcacttagcacagtcctggtcctatttaagtggtggtaactaaaatttttttaaacacgcaaccccccccccccaacatttctttaaaaacacacacacacacacacgcacacacacacgaataggctagtttttacttccttctctttgctagacccttctccacatgctaaattaaaacattgagagatagtagggcatttacaaacagtagcattttaaaaagaagaaaaaaagagattagggcagatgagagattcagcaatttaaaccttacatgagttagaatatttggtcttaagacatttttatctgtttaattctagtcttttaaatgttacttacctcttatattttatcaaatactgaaagtaatacacttttaattatatttttccactttcttgaattaagttcttagtacaatgtgaaagttggttgatctgccaaacatttaagtatataattggatatttaaatcagtatgaaaaggaggaagttggttggtttcttgtagaaatttaatggtgtgtttgtacagcccattaggaactgtaaaggaggttttggatgcttagtagctttattttcttaccttaggccaacgttttctgtagagttgaatgtagtgagaatatgtattagacgactgagtcgataataaatattttaacatttcatttggaagaatacaactctgtttctttgacacatttcctgatgttgaaggatgcttctgggggtaactggcagaattttgtggtttagattagtgaaaaaatgtgtttcagcaagtatggggaaaaatcgaggaaaaatttcaatgtcatgtttttgttaaaaacattcatcattgcaagagctattcctgtactttcttaggtgttcctatttgccaatccagaaaggatactttggcatatattcttaactattagtagaagtaatactgtagtagttttattaggtgttataaaagttaaaacttgggtattatatacatagccaagaagttgtgggggttaagtaagg

SEQ ID NO: 83683 - DNA, 1032 bp, Homo sapiens
ttagtcctagtcctgccagcagcatctcttctaggagttggttctctgatgcatcttcttgtgaatcgctttcacatatttatgatgatgtggactcagagttgaatgaagctgcagcccgatttacccttggatcccctctgacttctcctggtggctctccagggggctgccctggagaagaaacttggcatcaacagtatggacttggacactcattatcacccaggcaatctccttgccactctcctagatccagtgtcactgatgagaattggctgagccccaggccagcctcaggaccctcatcaaggcccacatccccctgtgggaaacggaggcactccagtgctgaagtttgttatgctgggtccctttcaccccatcactcacctgttccttcacctggtcactcccccaggggaagtgtgacagaagatacgtggctcaatgcttctgtccatggtgggtcaggccttggccctgcagtttttccatttcagtactgtgtagagactgacatccctctcaaaacaaggaaaacttctgaagatcaagctgccatactaccaggaaaattagagctgtgttcagatgaccaagggagtttatcaccagcccgggagacttcaatagatgatggccttggatctcagtatcctttaaagaaagattcatgtggtgatcagtttctttcagttccttcaccctttacctggagcaaaccaaagcctggccacacccctatatttcggtgagttgatggaaatggctgctggtcatttttcatgtttatgggtcattggtggcatataactacattatcagtatataatggttatataatggtttgaccatttctcctcttcctatttttaaaaaaaattttaccaaataacttaatgtttattttcatttgcatcttaaaagtatttttagataggttaaatataattttaaaatatatagctaatgaattgttgataataataaattacatttaaaaatccttgctaggtttggaggcttatg

SEQ ID NO: 83684 - DNA, 1376 bp, Homo sapiens
ttttgagacagagtctcgctcttttggccaggctggagtgcagtggcgcaatcttggctcattgcagcctccgtctcctgggctcaagcatttctgcctccttagcctccctagtagctgggattacaggtgagtgccaccatgcccagctaattttagtagagatggggtttcaccatgctagcaaggctggtctcgaactcctgacctcaggtaatctgcccacctcggcctcccaaagtgctaggattacaggcatgagccaccgcacctggcctttatttttattttctaaaatttatttatctttaagcatgtaccacctttgggaaataaaatagattttattctaaagatgaaataattatttattaagcactcaccataaccagaattgtaacttactaaatgaagttttattttgtaatacattgtttcaaagatcaaaggaagaaatgttggtgctggcaaagaagccatttgaatcattgcttggcaataatagcatggtgacatgcatctttgtgtgttttgtttgtagcacatcttcattacctccactagactggcctttaccagctcattttggacaatgtgaactgaaaatagaagtgcaacctaaaactcatcatcgagcccattatgaaactgaaggtagccgaggggcagtaaaagcatctactgggggacatcctgttgtgaaggtatgagacttttggggcttgttttgcagataccatacacctagtgatgattagacaagtctattcagttaggtactagagagtgcaaagagcataaactcaaaactagagagcctctgttgttttgggggcttgttgatgtgactacacttgtgcattgagttatatttgctaggctaaaagatgttctttctggactgactttccttctggggagactctggagaaagattacagtggccaaatagccgtttttctgacaaacaaatatggccgtattatatttatgaataaaatatatgctcatttaaaatttaatacaggccgggcacggtggctcacgcttgtaatcccagcacttggggaggccgaggcaggtggatcactagctcaggagttcgagaccagcctggccaacacagtgaaatcccgtctctactaaaaatacaaaaatgagcagggcgtggtggcgggcacctgtaatcccagctctgcggcaggctgaggcaggagaattgcttgaacccgggaggcagaggttgcagtgagccaagatcgtgtcgctgcactccagcctgggtgacagaactagactctgtctctaaataaataaataagtaaaatttaatcagaaaaataggaaggataagcaacaaattacccaaaatctaa

SEQ ID NO: 83685 - DNA, 1049 bp, Homo sapiens
actaaaagtgtctccgatttaacagtctgttagaggaccttcctatatacccaaatctttaggtctggtctgaatggttaatgttgcccagagtacagaatcagtatttcttttgtgttttctacagcagagtcagaaagctttgtacagttttggtcgatctagatatttatcttaaaaaaacaaaaccaaacccacattcctttatgtaacgtattccagtgttttatttcttaaactaatttggaaatttggagggctgctcactggttacttttggttgtattttttgaaataacattttgtgtgtcaatagtatatgatagagatataatagacttactattgttggcatattgtaaaatgcatggataatgaattgtgcttttctgtgtttctttttcctgattagctcctgggctataacgaaaagccaataaatctacaaatgtttattgggacagcagatgatcgatatttacgacctcatgcattttaccaggtgcatcgaatcactgggaagacagtcgctactgcaagccaagagataataattgccagtacaaaagttctggaaattccacttcttcctgaaaataatatgtcagccaggtattttgaaatatacctaaaatgtgcagttctttttttctctatactttcagaaaaaaagtaaatatatttttgaatataaatataaaatattgttctaaatggcattatgtaaataatgtacatttagtacattttctaagagtggtagcatatttccagaaggaaaattcaattcagtaagtgtttttatactatatattaccagccaagccattatcctaggtgatagggatataaatactgtatctggactttcatcaaatggctcacagtctatctaatagggtagacaataaataaacaattatgatacaattatgattgttctatttccttaaggaaaacttttgactttacctccaggcatcccacttgacccatttccaaataagatgaggtggccaacttctgaatgagaatgcaatagagttttg

SEQ ID NO: 83686 - DNA, 1083 bp, Homo sapiens
aattggctgggtgtggtggctcaagcctataatgccagcactttgggaggccaaggcaggaggattgtttgaagccaggagtttgagaccaggctggacgacaaagtgagaccatgttgctattaaaaaaaaaaattagctgagcatggtgtcatgcatctgtaaccccagctacttgggagactgagatgggagcatcacttgagcccaggaactggaggctgcagggagctaggatcacatcactgtgctccaatttgggcaacagagtgagaccctttcttaaataaatatacttagaaatcacattaatatatctattttgttttataaacagcttagttcttttagtgtgttttgttgccattgtcttgaattttaaaagcctaaatgaatcccaaaatttgcttctctttattttctttttgtagcttgagtttgtcatttatgtatcaaagatttttaactaatattttgttttttctcaactctttaaaaaaatttaaaacagcccagcggtctgctcaagaacttcctcatattgagaagtacagtatcaacagttgttctgtaaatggaggtcatgaaatggttgtgactggatctaattttcttccagaatccaaaatcatttttcttgaaaaaggacaaggtaagtaatatatgagttgattgacttcaaactaaggggcaaagggtaaaataaattatttagatgtttctgtaacaaaaattacaaagtagttttcataaagctatgggtgtcattttgcacttgattttattttaaaccaaacatttattaaattttcatataaatgttaaattatctttaaggagctgggcatggtggcatgtgcctgtagttccagctactcagaaggctgaggcaggaggatcacttaggcccagaagttctaggttacagtgagctctgattgtggcacttcactcctcagcctgggcaacagagtgaaaccttgtttctaaataataatgtaataataataatttaagatgtctgaaaagtagaattcccccagcaactctactcctaagtgtttacttgaaagggttagaaat

SEQ ID NO: 83687 - DNA, 1752 bp, Homo sapiens
ttgtatcctgcaactttgcagaatgtatttgttagtttttttgtggattttagtacttgttttgatccccacatgatggcagaggatcaagtgagatgcatgtgagaaccattgtaaagcagaagttctatgaatgtcagagtcatgatttctggtatatgatgcaacatgtaaaaccagatgacttggtaggcttcggatcagggatccccaagtcaatacttaattaggccctagggctttgttttttgttttagttacttaattttgaataggtaataaatacacagtgaaaaacattcaaaagacataaaaaagtatatagtaaaaagtaaacttcctaattctgtcgcttagtcacctaattttccttcccagcagtgactctaacatagtttcttgtgcctcttcccaaagatattcatattatacagaagcaaaacgtgtatgtgtatacatatatatatgtctacacgtacacacagacatacacgatattttatatgaactgccttccttggcatttgagtttgcccctcagcttacgctgtagttgtgtaacctagcatgaaggcctgtcatgataattttatgtattgtataataatatttgctttaatcattttcttttcagttttgatgaagcaagaacacagagaagagattgatttgtcttcagttccatctttgcctgtgcctcatcctgctcagacccagaggccttcctctgattcagggtgttcacatgacagtgtactgtcaggacagagaagtttgatttgctccatcccacaaacatatgcatccatggtgacctcatcccatctgccacagttgcagtgtagagatgagagtgttagtaaagaacagcatatgattccttctccaattgtacaccagccttttcaagtcacaccaacacctcctgtggggtcttcctatcagcctatgcaaactaatgttgtgtacaatggaccaacttgtcttcctattaatgctgcctctagtcaagaatttgattcagttttgtttcagcaggatgcaactctttctggtttagtgaatcttggctgtcaaccactgtcatccataccatttcattcttcaaattcaggctcaacaggacatctcttagcccatacacctcattctgtgcataccctgcctcatctgcaatcaatgggatatcattgttcaaatacaggacaaagatctctttcttctccagtggctgaccagattacaggtcagccttcgtctcagttacaacctattacatatggtccttcacattcagggtctgctacaacagcttccccagcagcttctcatcccttggctagttcaccgctttctgggccaccatctcctcagcttcagcctatgccttaccaatctcctagctcaggaactgcctcatcaccgtctccagccaccagaatgcattctggacagcactcaactcaagcacaaagtacgggccaggggggtctttctgcaccttcatccttaatatgtcacagtttgtgtgatccagcgtcatttccacctgatggggcaactgtgagcattaaacctgaaccagaagatcgagagcctaactttgcaaccattggtctgcaggacatcactttagatgatggtaagttcatctctgatatgttcttgaagtagtgaagattcagggactttattctcccaagtgtcatgaaaaagtttctatggattgcttattggcatatggttgggctt

SEQ ID NO: 83688 - DNA, 1050 bp, Homo sapiens
atcttcaggttcaggaaaagaataacatgaccaaactttggtgaatgttcattgcagcttcaagaggaaataacatataaatggagtctaaaaataccccgaaatcctttacaaaattgcaaattagaaaggcccgttgggattttgtgtatatggcagtgtgtatctactcccttcaaagagggagcacactgggttaccctgcccctctctacctggttgtgaggttccatactatatacttgtcagttctaactttgaattcttaagcatgggaaatagctctaaataagagtcctattggtactcaagcacctcattcttgtgtgtagaaatagcattccagtggactgccaatttgaacatttcttgaatacgaactttttctcttacagcaaacattattgatagctgtgactctacttttgttgtggtggcacaggcaaattcaggtgttggggtagtggaagtcacagatggtggctgccaaaagtgtgccagatcctgtgacctacataacctgttagcacccttattgaggactgttcactcttgttctaggcttttaattcactttgctctttaaagggaggaaaatgagggctgggtgcggtgactcacgcctgtaatcccagcattttgagaggccgaggtggccagatcatgtgaggtcaggagtttgagaccaacctggccaacatggcagaaacctcgtttctaccaaaaatacaaaaattagctgggtgggaggcagcagttgcagtgagccaagaccacaccactgcactctagcctgggtgacagagtaagactctatctcaaaaaaattggggggaagaaaaatgataaaattgtacattaggggcataaacaattccttatactcttatcttaaattggtgaaaaaaataggaaaccacctcacatacttagtggactagagtttatttttccttttttttttttttaagagacaaattgtcccggccgggcagggtggctcacgcctgtaatcccggcactttgggaggtcgaggcaggtggatcacg

SEQ ID NO: 83689 - DNA, 2036 bp, Homo sapiens
gcagtacatcagcatgggcagagaaaatacaggactccagatgggaaggttttaagagtcacactggcatggaaggcttatctgccattctatttatagcctgaaatgattctggcctaccctgtcctgtctgtatgatctaaaaaccagccttttccccagaaggctctgagcacatccagaagtgataacctgaccctccacaccaaagacaccctggtgctgctgctggtgagactggtgtccaaggcagggcccagcagaaactgcagcctgctgtctaccaaaggaggtacccgagttgggtactttaaaaaaaaaaaaaacctgcccttacccctctccctaatgggattttttttacctgttcctgggcccattacagagcctctgaagtttgcagtatgctttcaaatgaaataatatacttccattgattcaggaagcagattttttgagtgcctatatgtgagacagtgtgctggttgaaggcctgatgctgttattccaggagactgcaggcccttgatgccaggactctctctactaaggccagttcaggtctgggaaagggagctggcctattgcccaccacctgttgtcagtaggttaggagctgttgactcaggatgaggaagtatggtctttaaaaaaaacaaaatatattttagatttctcccctaaagttagttagagaaaaaggtctattcttcagcagatcactgtggcccctcttggagctgggtgttttcaaattttcttgaaaagtgagttgtgtcacagaatgtggatagtgagatttgcttctgggcctgtggttggacgcccacagcttcctttggaggggcaagaagttggcctctcggttgacattccagagaaatggccagacttgcccctacccttttgcccctggtgtagctgcctcacatgaggttattgcaagagttccccttgcaataccctttgtgccctcaagaattaaaagcctctatgatccagagttgctatgcaccaaattttgatgccttctaaataccttgatgcctgtagcactagaaatgctttcctatttaaaataaacattaaattttaaaatagagctttgtatactatgtaagcagttttatatcagctttgtaaaagctttggtgttaagagtcaatattttttggctttgtagataaagacttaaatttttgtgcaacatagtggtgttaaagcacacatccattggactatgcaaatcaatttctactagcagcactgagcaactgggcacgtgctagtacgcaccccctcctactctaactgtgctagctcttgggttgaggaatggaatgggtagccttctgcttactggagatgcacagagaaacatggctgaaaacagctttaaaaagaacatgtctttgggttcatgtgtggtgctgctgcccgggtgtaaactatccccacccagggccagccattatcaccagacctcttctgggcctggctgtgaagccctgtttttggtattcagaatggatctttaaggctcagatgggctcaaattgaaaccttgtgttttataaaatggatgtttagtaaaggaactggttctcagttatgtttacagcacttggaattgtgtgttcttgtacattttgtattttaaaaccttttatgggagtgcagtgctccttacacaaatacaaagggaagaagagccagcagttgaggctcctcagttttagtgctgaaataataaacagtgacaggtcaacagtatccttaatctgtctgagtgttcctccgcctggggttggtgtggagcccctcactttggggcaaagttaagggtcctgtgtcttttaaaaagtccatttggtcaataacttttcatttaaggaagagaagatcgagttccaaattgcttccgaggcttcagttctgtaccatttaatgcgtgcaaaggacattccatggtgtctgctgggttcagggcaactggctttcccaaggcatacaagaaaagttggcagaaagtcctc

SEQ ID NO: 83690 - DNA, 1007 bp, Homo sapiens
ctccagggcggccctctgtgtccctgccctacttggcatgaccagcctgttgctgccttccttactaggtcttgaaccgctatgcatccggcccactccttcctacactgactgccccactgctgcccatccccttcccactggcacctgggactgggagggactgtgtacgcctccgaggcctgccctacacggccaccattgaagacatcctgagctttctgggggaggcagcagctgacattcggccccacggtgtacacatggtgctcaaccagcaggtgaagccactgcttggtagggggaacacataaataggaaggggtgtgtgttaggggtaaggcactcttacacatgacaaactgctcacaagatggtgtgcacagggccggccatcgggcgatgccttcattcagatgacatcagcagagcgagccctagctgctgctcagcgttgccataagaaggtgatgaaggagcgctacgtggaggtggtcccctgttccacagaggagatgagccgagtgctgatggggggcaccttgggccgcagtggcatgtcccctccaccctgcaagctgccctgtgagtgccctaggggctaggggaggaggaggcctgtggtagccaggctgttgtaagcccctaccttctatagcggggactcctttctggctaccccacccagggcagtgctgggctccgtgcacatgcactttctacttccgtctctaggcctctcaccacctacctacaccaccttccaagccaccccaacgctcattcccacggagacggcagctctatacccctcttcagcactgctcccagctgccagggtgcctgctgcccccacccctgttgcctactatccagggccagccactcaactctacctgaactacacagcctactacccaaggtaccctgcagctaagagaatatcacagtcccactccctgtcccaatctggggaaaggtcacgatcccctttctggaccagataa

SEQ ID NO: 83691 - DNA, 1050 bp, Homo sapiens
gcagcccatgggtctcaggcctgactcagattggccctgctccgctcccagcccaaagccccacctcaatatagcggacgcccatgtggtgcttgtgtctctgcagcgctaggtcccgctgctcgctgtccacaaagcggatgagggcctcgccatttctgcggccctgggcgttgaggcagagtgctacaccacccctgtggagccagtgctgttagtgcctcctgggtaggcctgtccaattgggcccacccaccctgccacacccacctggccacgttgagccctttgaagaagcgagccacgtcctggtctgatgactgccacggcaacccacgagcccgtaccacagtctcactgtccaccacatcagccttgctgctgtaggggcagggcacagtgctgtcagagctattcagctgttgtcacccccagcccctgctcccacactcaccaaggccccgtctcgtatttctgctttatcacctcgggcttcgaaaacaattgacctgagaaaagatggcctgggggtcagcagggtctggtggagaggggtgtccccaccaagttctgcaaaaagtggacaattgagagagatgaagaaatgacaggccgagcacagtggctcacgcctataatcccagcactttgggaggccaaggtgggtggatcatttgaggtcaggagttccagaccagcctggccaacatggtgaaaccccatctctactaaaaatacaaaaattaggtgggcatggtggcaggcgcctataatcccagctactctggaggcttagacaggagaatcgcttgaacccggaaagtggaggttgcagtgagctgagattgtgccactgcactctagcctaggctacagagggagactgtctcaaaaaaaaaaaaaaaaaagaaatgacaaagaggattcccccgtggtctcttagagaaggtcacagtggggaggagcaataggcatttgtcatccctgagaacaggtgacaggcagtgagggaaaccttactgctgggctctttgagtagatggaggataa

SEQ ID NO: 83692 - DNA, 1044 bp, Homo sapiens
ctccagcagctcccaagcaggccgaagacgcgggccgcaaggacaggtgacctatatgggcccctcgacccctttcgcttccggctgcggctcagggagacctgacccagcaggtctcccaaaggcgtctcggcctcgctccccgggcgggaactggggatggatcccaaagcctgcgtcccgatcccttcggtaggagtaggttcctgcaatggttgaaaagtaaggagcccaggggaatggctggcacgcgcggatgaaaggggcacgcacacgcgagagtcgctcaaagtttcaaacaagagcccagtcctgccgcctggaccggttggttgcggcacgccaggcctagcctccggccgccaatcccgcccagaaatgtcctcacgtccaggccatgccgccacccaccccggcgctcacctgctgcagcaccttgtccagcggctctgcccgcgccaggctgtcggcgctcaggccgctcgcctcgcggcactgcgtactcagtgcggccgcctcggcacgaaccagcgatttgtgcagcgtccccacctgtgagcggcgggggaaaccgatcagccgcgcccctcgaccccggaagctccctggggacctcaccgcctcttttccaccctacctggcggctccgcggctcaaccacttgccaaactaggaggattaagtcggtctcgtccgagcccaggtcccgtcccagcgcacccgccgtagccccgaagaggacgaccagtgatccgggccaggggcaggggtccgcggcggggtcggccgcggggtcagggcccgggggagggggcggcggcggcggcggagtcatggccgcagaggaagggggctctcggccagacacgcggaccgacgaggcgcacgcacgcaccgaccgaccgcagacgcggatcagcttgggcgggacaccgtgtatcgggggcggcacctgcggcccggctggctcagtgggcgctgccaagacccgcccgtggcgccccgcggggcggggcggctaccggcccacgccctctccaggcg

SEQ ID NO: 83693 - DNA, 1070 bp, Homo sapiens
tggcgtgcagctgcactgcctctatggtactggcgtccccacaccagactccttctactatgagagcttccctgaccgtgaccctaaaatctgctttggtgacggcgatggtactgtgaacttgaagagtgccctgcagtgccaggcctggcagagccgccaggagcaccaagtgttgctgcaggagctgccaggcagcgagcacatcgagatgctggccaacgccaccaccctggcctatctgaaacgtgtgctccttgggccctgactcctgtgccacaggactcctgtggctcggccgtggacctgctgttggcctctggggctgtcatggcccacgcgttttgcaaagtttgtgactcaccattcaaggccccgagtcttggactgtgaagcatctgccatggggaagtgctgtttgttatcctttctctgtggcagtgaagaaggaagaaatgagagtctagactcaagggacactggatggcaagaatgctgctgatggtggaactgctgtgaccttaggactggctccacagggtggactggctgggccctggtcccagtccctgcctggggccatgtgtcccccctattcctgtgggcttttcatacttgcctactgggccctggccccgcagccttcctatgagggatgttactgggctgtggtcctgtacccagaggtcccagggatcggctcctggcccctcgggtgacccttcccacacaccagccacagataggcctgccactggtcatgggtagctagagctgctggcttccctgtggcttagctggtggccagcctgactggcttcctgggcgagcctagtagctcctgcaggcaggggcagtttgttgcgttcttcgtggttcccaggccctgggacatctcactccactcctacctcccttaccaccaggagcattcaagctctggattgggcagcagatgtgcccccagtcccgcaggctgtgttccaggggccctgatttcctcggatgtgctattggccccaggactgaagctgcctcccttcaccctgggactgtggttccaaggatga

SEQ ID NO: 83694 - DNA, 1029 bp, Homo sapiens
cggccaggccgtggcggccacgggggcccggaagcgccgccgccagctggccccgcacggaactgtgtcccgacgcggcgcgcgctgtcgcgatccggcggcgggtgacgtggcggggcggggcctgagctgccgcggcggcggcggcgcgaccgagcatcctggcggcgccgggccactgggaggtaacgggctgggccatgggcgggcgcgccgggagcggggccggggctgggccgcgttctgtgggagccgaaccctgtgggtcttcgctgccgccgtcgggagcgggatgcggcccagaaacagcgcggggctggccgatcggggccgcgcgagaggcgctgcgggtgagggggggcgccacgaggagagagggacctcgagcgtgagggccgagtgtgggagaaacgctgtatgggtgcgagccccggaggctgatggtgaccgcgagggagccagtcttggggtgtgctggcgacgcggcgagtgtgagggagaccgggggtgtgtgtggagagggaaaccccaggtgcgagggtgaccgggacgctgagtgcgcgggccgcgccgcgagcgtgagactgtgcgacggtgaccctgagtggggctgtgactgcgcctccgactgcaggacggagaacctgtgctgtgtggcggccgcggtggggcaaagaaagacgcgggctcaggacctcaggagccaggcttcctggggctgtcgcaagaatgacgattatcattttaaaatcagtccttttactttagagaatgccgcaaggttttgtggcgtgctggagcctggagcgttgggctgctggcgctggggaacccgcgtgcccctggtgattatggctcttttgagcgtccctatagcctgtcatcttgtgtgactatctctcctgaatgtggggagatagacgtgaaacattctgaaaattctttgctgggctctaagcaaacatgttgtgtaatggtcagtataaataggaatcagggtgtcggcgaacacgtttttgagtacctctt

SEQ ID NO: 83695 - DNA, 1061 bp, Homo sapiens
agagtgagagcaaaagtggtgctgccttaaagctcagcctcactgaagcagaggtaggctgccttcactcctgggactgggggaaggcttcactagggcctaggaggagcttttttacttggtctcaggtccagacttgaaggggtttgggacagggaaggcaggagttttgggtggggactgtggagatcagcatttcccctaagaactactcactcttgactctctgtggtttccttgctctgagctccatgaggccagattcgggcacatcacatacacatttgttgaacagataagagacttctggaaagatgatgtgcttgccgatcctgttcctattgctgattcttggaggttatctctgtgaccttaaaggactaactgttacgtgggtgggaatcaaatggcccaccagatttcttctgaagatgagatgggatcaaaggatcagaagtgtgactggcacaggagttgagggagggagaagatcacgctgggtgcagggtcaggaaggtgcttattttcctttgatagattctgggtccttcataggtaggttaatgtggaatccaacatgaggggcatgctggggaagaaagcaaatacaccagtggcaaattagccctgggttgggatgcccctggatgtcctttctctaccctgtcttattacgtaacccttctctttcgggtactttggaaaaagaaagatgtggaatgggcaagcagcaacatgggagagtgaggtaggtgttgcagacacagtgatacccaggcatgtattttttttttttttttgagaccaagtcttgctctgttgccaggcagtggcgtgatcttggctcactgcaacctccgactccctggttcaagcgattctcctgcctcagcctcctgagtggggattacaggtatgtgtcaccacgcccagctaatttttgtaagtttagtagagacggggtttcaccattttggctaggatggtctcgatctcctgaccttgtggtccgcccgcctcggcctctcaacatgctgggattacaggtgggagccactgcg

SEQ ID NO: 83696 - DNA, 1027 bp, Homo sapiens
aatggtgctagccatcaggatgtataagtatgtgttcacgcatgccttcatatccttgagcaccagtagtgatggaagtgcctgtgtgctgtcagctggggcgggtgcagggtgtcccctcgcttgccagttcgccttgttctgactggtccattggcccctttgccttaggcaggaagggcagaaagagtgctctctgtaaagaggggttgggcccctgtgccctcaactcaagcctgccagtgactttgtggttttcctcctaggtctgctgacatttgtgaactgtgcctatgtcaagtggggcacacgtgtgcaggacacgttcacttacgccaaggtcgtagcgctcattgccatcattgtcatgggccttgttaaactgtgccagggtaagtggtgggaaggggggtaccaccaacagttcctctggattccctgaggagaacatggcgactctgttagcttcactgctcggctgtttctatgtacatgctagcatgtgtcagtgagtgcaagagatgggagtagatttctttctgggctttttgggccaggctggcttggccaagtggacatgagtcagcctgtccctcagggctggtttcctttggtggaggctgggagcattgcaggaagccagccaagggcctaggagctcctgaagcttgggtcatgattgggtcataaaagtaatctgtggggatagagtggctcctgtttgtggtctgtgactgccaagctacaagtaggaagactgggccctccttgagacaggtggcagggtatatggagctggaagtggggtatggaaatgggtggttattttgcagcctttacttttcatctggacttgtattcagcaatccctccccaagtcagctctcagaaaaatattaaaatattgtgaaattggcagtgtctttcctaaatgttggctttagaaagcttttcattcctggatcagagaggactggcagtgagggtaacaggcctaccaagatctcatgagccctagagaggtctt

SEQ ID NO: 83697 - DNA, 2556 bp, Homo sapiens
cagaggatgatgaggcttgttgggagacaggggcaaagcctgatatagggtacttaaggggcaggtggcgagggagccatagatgttactagtcagccttgttcaggttagggctgtagctagatgtttactaaaccctgtgcttgctctattttcatttagctgctatcaccagaggcacccagcagctttgcttttgtgtcctgactgagcttgatgtagccgaagaaaaaaaggatgagaggaaaactgactagaggtcagaggtggctttctgaggcctggaaggcaggccaaccagcaaaatcctgataacaagactctgtgggcccaactctcctgaattaaaggagccttttgacccaatcatatagtggggctcagggccagtgctcactcttattggtaagctataggagactcaggatctgggccaacctcaaggtgggggcttcagagggtggggggaagattggggaacggggggaatggtcatttagttttactcctgataggtagatgcagctcttacagatatttacttggtaaagtgcagtggggaagagggaatgctaggttgatagggctggtggcttctgaatttggtatttgaactaggagtccctatagaggggctgctttatgggaagtttttctctgaccaggtacaacacctgactttaaaggcctgaaatgctaccatttcttcctctggctcaaaattcttccctggggagagagttatattcccttatttattgatatttagtccagaacaccagttctaacgaagcatgcgtgtctcttcatctacaggatgcaataggctgattgtatttaaaaatcaaagtacccaaaactgagtccctttgggctcagaaatgtctgtggtattgggtcagactctgaccacaggttttatgctgtttagcacaatttctattgagtcttacctgcaacaatgaaccttaaagatttttttactcacgtacctgttacactttagcatacagatagatcatagatcacgttacaagcacttggctcaggtccagcaaggacagatgaacaaattcctgagtcagaagtctgttaatattgctgttttgaaggacaatcctttattttacttgagaccttacatctttgttctagctgacagtaaatctctgggtttctgttacgaactctaagagggctgaaacttctgatattcaggtggatcacctgaattctctcagctgtcaatggcttggagaacatctcatgggcccaagtcatcaaataacctgttcctctctgtaagggcagtgtgagggactgctgtgcagacccaagcaatcccaacctggtgctaggtcatttcacttttctgaaaacctcacatcaggctgcatcctcttctgtccctggcaccaggctttgtttacacttggagccaccttggtgtgggtcaccgggacagtgtactcctctcctgccagcctccccttccccgaggtgtggtggctgcagtctcaggaagagcttggtacttgtggggacttctgttttctccctgtggagatcagtgaagactgggaggaaagctgcttcaacctgagtccggctcttcagcaggctgcacaagtggaagcaactaattctggtgctcaggctgggctctccacccaagttaggcctgctctggcctaatggatcttactgtatgagcaggacggctgcattggattgtacaactgttttgtgatgcccccagacactgtcatcctgggccgagaagaacctgctagcttgacataccccatgggcttatccttaggttttggaattggtcaacagtgaggcagtctcccttcctgaccattcttctccacccagtcacagataagggaataaccttggccatatatttgctcaataaagattgaaggaagcatggtcatagttgccctgggttcagagcataatgcatatgtgaagcatggggtgacattcctactgtcatgggtttgggatttgtaacggcaaattcctgcccgacgacagggtgtcttatgcaaaggctgacttgcctgaacgctaagaacatgacttctgtctgagctaagctggcacccatcccagggctcctctggagctaatcctttaagcaaaatgtgcttgccttttaaagatccctgaccccagctttagctttctccaccagataaccagctaatcccaggaatttgctgccccccaccagtggcttctagggaaagcaaggacctcacatgccaggtgccctagtacttgcttagtgagccatgtcatcctcctttcatttttggatggtgacagcatttttcccctctgtgctggatacagacttctcccaggatcctctctttgggagcgaagccagaggatccctacagcactcaagcttcatggtggaattaatttctgccagctctttgttgtctgtctccttaaatccttttcctggtgtgcttattatcccttttgcagtgagtacagtttattaagttgtcagccctttaatattgggga

SEQ ID NO: 83698 - DNA, 1050 bp, Homo sapiens
tattaacaacttgtatctcttctaagcagactctgtccgtatgcctttccaaaccatagctgccttaactgactgccttggtgtttattctagcgtaacattgtccagtagaactatctgcagtgatgatatgttctgtgtctgcactgtgtagtagtagacacgggtggctgctgagcacttgaaatgtgattagcgcaactgagaaactgagcttttaattttatttcattttaatgtaattagctacacgtggctagtagctgttgcagcggacaccacaggtctaaggaaacaacacagaacattcagctaggggtgtaccctcatagcctgtgagtgtctcttactcactgtcatgggggaaggtgagttacacagggaggtaccttcttgccgcctcttttaggatttcctaagtatctctccttcatcctacctgccatcattctttgactttatgtccattttctaaacctttgcctacacttgctcttatctacatggagttgttcaacctgccgaagtgattaaattctgtgtacacaggccgtatatattgcagctaattaaaacaacaaacatcctaggcatgcacaaaggtataattcaccgttataacaggcagcaacttgtatgtctaatattagacatcttgctttctgtctgtaggcatagaaacaaaggattgaaagccattctcatacagcaaccgggtgaaaaaaacaaaacactgtgctgttacaatgtgctccctgctatttatactcattaagtttccccaatattaaagggctgacaacttaataaactgtactcactgcaaaagggataataagcacaccaggaaaaggatttaaggagacagacaacaaagagctggcagaaattaattccaccatgaagcttgagtgctgtagggatcctctggcttcgctcccaaagagaggatcctgggagaagtctgtatccagcacagaggggaaaaatgctgtcaccatccaaaaatgaaaggaggatgacatggctcactaagcaagtactagggca

SEQ ID NO: 83699 - DNA, 1036 bp, Homo sapiens
gcttaacaagaaaacttaaggtggcacctaatggtcatgctcagactataatcaagaagcactgcatcctgcacctgcattaggacagatttgcagtcaggtacccaccttggaccactgcatggcccttcctcctgcctttccgcacctcttacgcttgggttttggttttgacctttggaatttgaaggaatcgctcagagccatcactcctcttttccctgtgttcccttctcatggggtccagcatgtcctatcattgtggagctgggctctgagtggaagggggctattatctccctctcatagcctcttgtgcaatggagtcaaactactagtctgcagttttttcacagggcacttttacatgatatctcttcaagctggtatgctaacaacttcccccagagcataaccttagaggttttgacttggactcatgtttgtgttgagatgtgtaggtgaatgatgatcaagaaccagaggacatttacgacgatgaagatgacgagaacagtgagaataactggcgcaatgagtacccagaggaggagagcagtgatggagatgaggattccagaggtgggtggcagccccagaccgggagggactggtaggatctgagactgaggtgcaggcatagttgacaggtgcatcttaattgcctttccttctctgtcattgagcgccagcagcccagccgcaactgagccatgctgtaggagacccaaagaccagtgtttcccaggggcctcctgggggtgtaataatccatcaggcctggattcaaatctgtagttgtcattactttgctgtggctcttgggcagttacttcacctcactgagcctcattttctctccaaatgagatggttctgcatgaattttagtggttgagattatgtaaaatatgtagctcattgtctcttcccctgccccagtcaagaaaccaatgaagagagaggtttgccagtaggaataagcccagagttttcacaaatcagttatctaacttctcaaaaaactgctgcatgta

SEQ ID NO: 83700 - DNA, 1051 bp, Homo sapiens
gcccctgggaaacactggtctttgggtctcctacagcatggctcagttgcggctgggctgctggcgctcaatgacagagaaggaaaggcaattaagatgcacctgtcaactatgcctgcacctcagtctcagatcctaccagtccctcccggtctggggctgccacccacctctggaatcctcatctccatcactgctctcctcctctgggtactcattgcgccagttattctcactgttctcgtcatcttcatcgtcgtaaatgtcctctggttcttgatcatcattcacctacacatctcaacacaaacatgagtccaagtcaaaacctctaaggttatgctctgggggaagttgttagcataccagcttgaagagatatcatgtaaaagtgccctgtgaaaaaactgcagactagtagtttgactccattgcacaagaggctatgagagggagataatagcccccttccactcagagcccagctccacaatgataggacatgctggaccccatgagaagggaacacagggaaaagaggagtgatggctctgagcgattccttcaaattccaaaggtcaaaaccaaaacccaagcgtaagaggtgcggaaaggcaggaggaagggccatgcagtggtccaaggtgggtacctgactgcaaatctgtcctaatgcaggtgcaggatgcagtgcttcttgattatagtctgagcatgaccattaggtgccaccttaagttttcttgttaagcattttagaatttgagaataggctgggcgcggtggctcacgcctgtaatcccagcactttgggaggccgaggtgggtggatcacttgaggtcagaagtttgagaccagcctgggcaacatggtaaaaccttgtctctactaaaaatacaaaaattagccaggcatggtggcatgcacctgtagtcccagctacttgggaggctgaggcaggagaatcgcttgaacccaggaggcggaggttgcaatgagccaagattgcaccattgcactccagcctgggtgacagagcgagactccatc

SEQ ID NO: 83701 - DNA, 1064 bp, Homo sapiens
ggaattcatggggataagaatcttgaccacaacactatggaactgtagctgagcaaggtggctcacacctgtaatcccagcactttgggaggctggggcgggcagattacttgaggtcaggagatcaaaaccatcctggctaacacagtgaaaccccatctctactaagaatacaaaaaattagccaggcatggtggcacgcacctgtagtcccagctacttgggaggctgaggtaggagaaacgcttgaacctgggaggcggaggttgcagtgagccaagaccacgccactgcactccagcctgggcgacagagtgagactccgtctcaaaaaaaactgtagggagccttccttcacccaactcataggttcctcctcttggaacatcatgttttgggtcatgcgtgtgtgtgtaatctgtggtttctttacagacatctgacccagatgtgatcctctgcaattctgtagagttgatccgtgagcgattgactgtgtctgaggatggaccaggagtcaggcgccaggaagaacaaaaacacgatgactatgtgtatgacatttactacttggagacggccactccaggctggattgagaacatcctctccgtgcagccctacagccaagaatgggagctggtaagggggcccatgagcagacggggcatgaggcatcctaagctcttaatctaatcagaatgctttgcttccctgggctccactcccgaacaacattgtccttagttcttttcctcctgaaaaggaagaaattattctaagtgccttttaggaacctgactttatagtacagggaatttggggaaagatcatcttagattgatcatttttacattaatgaatattttacaaggtttgcaacatcacctttattgtttatagctatccattcttaggggggaaatatgtatatggggcttatgataagataaagacgataaaatcagaaattcttaacatgagtgacaacaaaatctattttttaattcgtaccttagaagtagagaaacctcggatgaagaaagctaacgtcctgacattat

SEQ ID NO: 83702 - DNA, 1047 bp, Homo sapiens
aaaaaaaaaagaaaaagaatgctaatatcgtgaacatttatgttcccaccacccaatttaagaaaaagaacaatacttttgaagtccactgcgtacccctccttgatcccatctctttcccttctcttttaggagttaactatcctgattccttgctatgctttttagtgtgatccctgaagaacgtatcactccattttgcatagctataaatttcatagaaatggaatcgtattgcatgtgttgtgtgatttgctgtttttgctcatcattatattcctgggattatccatttttaggtttatgtgtgactgtaatttattgtttagatgaaagttttcctggtttgacttgctctatcttcatatttttccttaagctaagggttcagcatacgaaggcagtattggtggcacttctttaacagtaccccatctcttctcctagccttgagggctgcacctagatgaacttgtgaggctcatttgaaccttttggaagcaccgaagcctgctgaagtttccagacatctgtatgaatctgttgtagttttttaatgttatatgctgaatataaaaccaagtaactcctgctggaaacatttacaatatcgattaacaaatactatcagtggctttgacatttttgtcagtttcttgatttttttccccgcttttgtctccccttcccccctccacattttggggcattgtgctgttaatagattttttttctgttcgtttgtttatatacctcctgtttccttctgatgttaatagatttctgacagtcagacttgtccacaagaactcaactggcaaggctgcttttctgtgctaaaactggggagctagtgggcaccatgaagatcttctgcagtcgggccaatccgaccacggggtctgtggagtggctggaggaggatgaacactatgattaccaccaggagattgcaaggtactgggttggtttacagcaggctgcagctgggtggggcacttgatctcaaagcagatgccttgggctccagtctgagcgtgggctagg

SEQ ID NO: 83703 - DNA, 1039 bp, Homo sapiens
cagaacaactttgatgttatcataaatacatacttaccgtaaatcctgcccttcgtcaaattccctgtggtatgtaagccctgcgtctgagccataacagtgtgggggcccagtttctcactgcccgagacaaggcttctgtttgtatgtctctataaagtgtgtctttctgagaagctggatttgccagtctttcctcagcctctcagctcccgtggcctgttggggtaggtttgcatagagctgcccaccatggaacagtatgtatgtatagcaaaaaaaaaaaaaaaaaaaaaatggtatacataagggtcagtactgtctgaggtttcaagcatccaccaagggtcttaaaatgtatcccccatggacaagaggcactgctgcaccataagaaaatagaggctgtgttctgccaacagtggggatttgggacaattttgagcccagaggatgacctacttactcacacctacagtctgctctcctctggagggcacagcacgcctcccaggttcgtgaggcaagtccctttcctggctttttggcgtcctcttgtgcggtactgacacctactgctcttactaagtagtgcagcctcctcaggatccccggcatccccgctgtgcctggcacggaatgagagtccctaatcacaagttaaagccagctgaatctcagccctttttcatgatgcacatttggagaataaagtatttaagttacatatcttaggaccagaatcaaggaatagcttgctcaccttaaaggtcagactactgtttaatttattgctcatttttccttgggtttcggctctattttctaggttttcaagcctatggctgatgctgctgtgaagattgtggagaaaaatggctttagtgataagattaaggttatcaacaagcattccaccgaggtgactgtaggtccaggtgagatttacacaccctgtgttgaaagctttgcttgctcttgtgtgagagaggaaaagggttattccagttacctggaacaaatccaggtcatagcatag

SEQ ID NO: 83704 - DNA, 1044 bp, Homo sapiens
gccagtggtgtcctggtggtgaaagccatgtgggtagcagctgtgagtgtgctcttgccgggtccctattgcctggtgcatggaggacgtggagtggatgcaagaggtaggaggagagccggacaaggagccggagccggagccacagccctaggggctgagtgtgcagcagtgcccagcggcgctagagggctgggcagctgagggggcaccgtggtccacagggctttgccacaaggaggctcttgttttggtgctgggcaggagcggcactgaagggacactgagcccagagccaggatcaccacccagcagcaggacgtgaagcatttaagagtgccaggtagccaggaacttagctgacagaagtcattttaggcacagtgtgtgttctttttgaaatgtagtaccctttttttcccttttccaagggcatagggctgaaaacagttcactattctaatagtataaggtgttgggcattactgaaccaacctaatgttaaggaataaacctcttttgatcaatgggaattactgtgggtctaagcatctgatttttgtttggttttgtttttaatataaacttaggaaaattgtgaggccgtgccccacagagccaccgtctatgcacagctggtggagtccgggaggatgtggtcgtggaacaagctatttcccatccacgtgcagaccagcctcggagagcaggtcatcgtccctcccgttgacgtggagagctgccctggcgcaccctctgtctgtgacattcagctgaaccaggtgtcaccagccgactttacagtcctcagcgatgtgctgcccatgttcaggtaccaaggagccaccataggtgatggcgctttgagacatttgatggaagttgggtattaggaggttctttttgagtgggaaggaaatctagctgctgtcacctgcctcgaaggcaagagtcctttgcagccaaatgtcattgccagtgaagtcactgtaaaagcttaaaaaatggagtgtgtgaggttaaactctgcttacattcttgaat

SEQ ID NO: 83705 - DNA, 1722 bp, Homo sapiens
actcaaaatagctccctttgtttggtctctctccaaacgcgtgggtgtcatcggtgctcatctctgttccgggccccgtggccttcagcagcagcgtttaagatgtctgtccgtattctgcacgagggtttatatcccgttctgagtgctggccatttgggtgggttccagtttttgctggtataaataattctgtgatttgcatttttatgtgaatataacttttttttttcttttggggttttcttaggatagaaacctgtatgtggggtttgtagtaaggactagcacagcttattaaaaattgaccgtggatcattgtcaaccatgtttcacaatttagaatattcagttatttaaatacttcaatttaattcaaagaataagccaaaacctttttgtattttcccacctttttattttgaaaaattatatatccacagaataagtgaaaatgaacactgatggtcgctttattaatttaaatttaccagttgttaacgtttgccacatctgctttatctttgtctttctgcctcccttcctgcatctctacacacacacacacacacacacacgggcatgcacattttttttttttattgctaaatcatttgaaagtaagttgcagacatctgacactttacttttaaatacttcaacacttatctcccaagaatgaaaacagtctgcaacataaatgaaacacatgatcacacctaagaaaaacagtggttccatagtatcgtctaacatatggttcaaaataaaatttgtctccagaagtccttgatagcttttgtttcctcagtctacgatccagttaggtttagtgcattgagtctgactgttttgtaaattccgagtacgttaaagcctttggaatgcgtgccatggactgttctgaaaaggttccccttaaaccactaggtttaaaccaatttttttccttcaaaggaaacattcagcacagctctacgtgttgaagagagagctttggtgctactctgatggggtggggactggagcctgcacttgtcccctcccctgagccactctggcagattgctgctcttggccacattgtgtcttcctaaagccagcagggttcccgcaaacttttgggccactggcctctgagtttagagtttatttatctccttggccacaatagccagctgtagtctacattgtggacgtcctgaaaactggcagttctctggcatttggctcctggattagaagcattgctcatactgcagctcgttgacagctgactctgttctccgtttcagtggcgggaccactggatgcagtgtgtgtacttcctgccacaagaggagcctgtggtgcagggctcagcgctctatctggtagcccaccacgatgactactgcgtatggtacagcctgcagaggaccaggtacgtcgagcctcgtgggggtggaggatgagcctctgagacttgtatgtaaattccccatttacagatcctctggaggtgccagtgggttgatttgtgtctggacagaataacataagaacaaagatttgtgaccagtgtgtcagtgcccattcgtgtgtacccaggagaggctgtcatgggttgctggaatctgtttagagcagatgcgtaggaaaagtctggaattagcgggtgctctaagccctcatgcctactggagaccagtgtccagattcatgccctctggagacctgtgg

SEQ ID NO: 83706 - DNA, 1034 bp, Homo sapiens
gggccttgctgtctcccggcctcactcttgcccctgctgcccctccctcggccgttcaggctcctcgctgtgcacgtgttcatttactcacaaatgttcacagaacatctggtcacggcactggcccactgctgggggatgctgggccaccagtccctgctcttgtggtgctcagagcctggggagggagacggagacaagccccggtaagtcctgagataaagcgtccagtgggggttgacaggatgccactctggaagccccgtctggcacgtttatttctgggctccctccatgacccccttccttgcttttttctatcacatggggtcagccccactttgtctgcttccctcttctgctctgctctcctgagcacgggactcatgtctggttgtaatctttacagcctccagggcaggtacagagcaccttgctgccttgcttgtttgttgactgagggagggagggactgatgagggagggagggaatgagtgagtgactgagtgagggagggagagggagggagtgagggagtgacttgagtgactgagtggcctgttgcttccgtgttcctgttaacactcctggaccgagccctactgacacctgggccctgcttctcgcccattcaccaggtctctctcctcctgggcgagccgttcttcactaccagcctgctgccgtggcacaacctctacttctggtacgtgcggaccgctgtggaccagcacctggggccaggtgccatggtgatgccccaggcagcctcgctgcacgctgtggttgtggagttcagggtaggccacccaggggatgttggagaaaaaagcagaggaggcgggtggggaaccttgttttcttgcaggaaccttgggtgcctgtagagcggctcaggccttgatgatttgagcttgtgttttctttctgtgtcagcacactgtggggttgaatagaagatgcttgccttttaaaaaatgcgataatttgacatacgaaatggaaatggctgagtgttgtcattttacaattg

SEQ ID NO: 83707 - DNA, 1133 bp, Homo sapiens
cgtttatgctgtgagtcccttcttcctgtaaaaaaaaaagtggatactctcttctcggatccccgtttatggctccactgcccagatgggaggctcccggaggaggcccagggtgccagagcctgccagactctgttgtgcctgagctggggaagggaccctgtctcgggaagagcaaagttctatgagtgacttacagaccctgtgaagtgagggttggttttgtgattaacctttttctgtttttctttttaaaatgtaattgcccttgaatgcgagaccctgggaagagccctgggctggctggtagagatgcagccctcggaccctgcaggagccggcccacactggaggcgggagagctggtggccgtgcccaggaagtgcttctttggctggttctgattgtgtttggagtttggccttgggtgaggcccgagcaaggggtctgtggctacagcgtggcacgtggcatgcgggcagcgtgcatgcgagggtgcaggcatgcgagacgacattggcagcagacaaaaataaagaaccctggacgaagcttaagaggagatacagagagtacacgaacccggtcctcatactaacccacgggttacaaactcggttgtgctgtagatttgtagaaaatcgtgttgtgaaagaatggcactggttaggcagctggaggctcctggggcgggcctgactcctctgtccacagtgaggcccagaggcgcagagcagcgcagcttccaggttcccgggcactgactgtggctccctccctgtccctgccctcctcccccaagcaccgggcactcgatggaggggacatggcccagggatgggctgcagctgcaagggctggcagaggccccgctgctccggacggtctatgcctcctcctcccccgaagacaccatcagtcgcatggctactggcaggtggtccgtcaggccggacagctgggtgataaaactgaattcttccacctcctggggtgagtgggagaggggagaaacagcctggtcagattccaagggcatcttgcagggagcggcctggggatccccaaagtgaggccccggggctggggtgggctgggaccttcctgcagtcagagggatggggcctggagga

SEQ ID NO: 83708 - DNA, 1011 bp, Homo sapiens
cagtttgagacccaggaggtagaggaagatgaaaagaactttcaggacagaacctgggaggaggggctgtcccaggcagacactgttgagctcagtgggaacagtgagggtgccccacagaggagggaggtggggacaggatgtgtggattgatctgtgcagaagtgggctggggtagggggcgggggagggcccggcctctgagccacctgtagtagggtgggagtgaggggtgggagtaaggggcacatcctcccaccctggacctggcaacacatccccttcctccccagaaagtcactctagctgtcgagacaaaaatatatccagggaacagaacaccaacggaccatatgccaaaatgggaaggttggatctatctgtcaggagttgcttcaatttcagcatcccttgctgtgaatgaagagcagaggacccaaactctgggcctggcagagccacacaagagccatggacgaaccagaagtgggggccagggcccttgctgcctgccctggctcccatagggcttgaagacaagctctgccactcatggcaggcgccaggttgcgcaccagtgtttccctgggcaggcggagtgtggttgcttctgaaggcgaactgggaagtgaggaaacctgccctaggcaggcctctgaaccgcagccctccctgcaaagccaccactttttcatgtctcaccctaaagggacagaacccacatctgaaacagctgctgcctctcagggcagaaagccctgtgctgcatccactggccaaatgacacttcagaaaaccgtggaagcaccatgagcggcttttggatagagaacaaaagtcgacactctgagcatctcaggcgcagtagaagataatgtgtaatgaccaaattaccacagcctaaaaactcctccaatcgaatccaaattagcagaaataattatgattcactttaattagtgactatggaagcgaaaccatggctggtgggcagacagcctggcagggcag

SEQ ID NO: 83709 - DNA, 1023 bp, Homo sapiens
cctggagacctgagggtcccgtctgcttgcctgatgcgcttggtctgggctggtctctctgcctcgttatgaaccgacagggcccctacctcctgttcttcctcactttatcactgccaccatctccacggctaccaccgccactcttgcgccagctcggaacccttcccaggccttactgctctgttccactcccaccctctctccactttacagttggggaaatggtggctcagagatctgaggaacgggcccagatcacccagatgggtctgtctgagcccagagcctcggtgctcatccctgcattggtcttgaccctgtccccgagccagggccctgctgtttggctccaggaaagaccgcgtctgcctcccactccaacctcccactccagcccccatgacgatgaggactccccgctgcagcccccctgcctacatggctctaggaccagctggcacgtggtcctcaggctgggccgaggtctcctaccttgagaaacagagctcccttagaggccagggcatcgtcgttacacttgttggggtaacagtgataggccacgtccatgatggggtagcggctggcaaagaggaggccgctgttgagacacttgaagctgcagcagccctggcagccgtagaccccgacgtcgtacaggatgtactcgaagtagccgtgcagctgctctttcaatttggtggctgctcgcttgtcaaacacctcctgcaggcacaggaagtccaggttggcggggaagaaggcggagacctcatggtcgaaggcctcgtcggggtgccgcctcctgcgtgcagccgccttcttcaccaccgaggccttgtacaggagcttgctgttggcacctggctccccgctggcactggtgtctggcccagctcgccccttcaccagggactcccgggaggccgaggggctgcccaggctccctgaatccccgtcctgctgattatggttgggcgtctggccccttgggcccccgccagctccgttcctggcctg

SEQ ID NO: 83710 - DNA, 1049 bp, Homo sapiens
agctgcctcaggtggaggaggttccccatcttcatcctgaagcaagactttgcccctggcctcctctctgtcttgggctcagcctccatgagggcataggactggcgggagccctgcgggcttctgcccttgcaaactctggcagataagtctggttgtcaggctggtttgtgagcagaacacaggaatgagaggaggtgctgcctggtgtggctcagacgtgggtctaggtgccagcctccatccagccttctccttgctggcaccctttgtggtcactaatagatgactttggagtgacaggtggtagagagtgggcagtcaggtcttcaaactcagctgtccccctaggatggggcccatgcctccagggcaactgcccatgtcaccgtggcacaagggcctggacccaggggtcctgctgtttgaaacatcacgttggctcttgcacctctaggacgtgcaccactcacctggcttgagatttgctttccagtcacgcccgagttggcttcatctgggctttctgacttcgccagggaaatgccgaggctggctggttgaaggagtgccccagagctgctcacagcctgttcctattctcagaaatcacacggtgcagtaatacctcctgtgaaaagtttctttttgaaaattgtatggcccctttgcctgcacctggcttctgcagaagcctgtgccttgggctcgcacaagcagcccacaacagatggctctgataacctcctgcgaggagacggaggccctgacgtcgtcccctgcactgtcctcgccatgcacctgggagagcagagaaccctctttgtaaggcaaaccagcctcaagaggaggagactttgaaggctccggctgtatcttcaggactttgcagcaagggaattaacagtgatagcaaaatgataaaaataagcgtcctagagatgaggcaggcaccacactcggtgctgcacgtgcaccatctgcaactaccctgagagacggttattaccaaggcttaacatgtgaggaaactaaggcacagtcagttg

SEQ ID NO: 83711 - DNA, 1040 bp, Homo sapiens
ggatgtggtcttgaaggagagacccaggaacctgcgggcggggccggagggagaggggaggacgcccccaatgggcagactcctgggcggggtccgggtcaccattggctccggcggcgcgagggaggcggggtcagaggaatgaagcgcggagctgttcgccgctccaggtgctgagtctgagggaggctccggacccgagagccgcgagagccgccgccgctgcggccgccgccagatctgcggccgggagcccgggctgtgaggagccgggaggagcggggtgcgctgccgggcgctgaccgccctcccgcccgccgtcagaggtcagtgctgctgaattcgcttttgttttcttggggagcgggcgaaccgaggcgtgaggggctggggagttgacgggacgtgttctcgttgctctcaggaccgcgggtcccggacagccgccgactgactaggggcctcccgtggccgggcgccggaggtcggagcagcttgggttagttttcgttttatcatggagaaggctcttgggtatgaggggcgagggctgggggtcacccccaccccccatctctcctgggagagcgaggaggcttggaccctccctcccgctgtgcctggcgacggggctgctcggattactcaggacgggaggatgaggtgttgtgggatgaagggactcgaggcagggggacccctccccgcaacacttcggctgctcgaggttacaaaggagtctggtggtgatggatgagatcgcggaccgctcccctagcccagaccctcccaggggtattcaggaagggctgcttgggatgcagggaagacccttgcccaggccccttcctccacactcgcccccctccctattcccccctcctcccttggccctagggttttgtaaagaggaggatcgaggatgtggaagagacagaggactcttacccctcccacttggaccctcctaggttactggtgaagggtggaattggaatgtggcagggaaacgctgggagacccctccccatccttctcgg

SEQ ID NO: 83712 - DNA, 1124 bp, Homo sapiens
gaaaattgccttttgaagaagatgtaaatgccccaccctctgacgctgtctcactcccttcctgtgtcactcttaccgctgaagtcaggacctgacattatcttgttgacatgtttgcgtttttatcgtcagcctcgtcgaaaggggcgtacgattgctccccgaaaccagggtctttcccggccgattccccagctagcaacaagccccttgcaaagaggaggcggacagtgactggaatacagggacacgcacactcgagccacactggccgcctccctcggccctcgcaagggtccctaacgcgccttcggaagccgcctaggcggggcctgcgcgcgcgggcctctgggaagtgtagttcgcgcgcccggcgtggacccggggttgcaggagcgaggctccgagtgcgcaggcgcacttccagttctgccccaccgctgcggccattgtccgaccccggtgcggctgaggcccctttgggcagcccctccgcagatcagaattggagataaccgaggcttcggcgggggcgggaggagctgcccgaggctctgggtgggccggaggtcgcgaaatccggagccccccagaggcggtgattctgagtgcgcgggtctgggcgggacccctcctgggtttggcgggtgtcagccgggcctcgcccaccaccctgcgaaggggactgggcgtggccggaggggggtgtccgggaggccgctgagcctttcatttcggggatggggagcggcaggcccgggctggttccacggtcctcgccaccatctcccctggagatgtggtttaggggcggaggtggggcggggcggggcggggtggggtcggtgttgcagcggggtgagtgggccctgtcctttctccccagctcctgccccggagccgggccctggcgaggcaggaatggccccgaggcctccgaccgccgcgccccaggtgagcaacgcgttcctaacctcctgggcatcccatccatctatccatcccatctcccaagggtgtttggagcagtcattgttctctgcctggcgactcccttacttgcttggctcgatcggagcctcctggccatggaaaaccccaggctttggggagctggattccca

SEQ ID NO: 83713 - DNA, 1151 bp, Homo sapiens
ttgttggttttaatcagtgggtacctgtgatacaggtgtactgtggagtactatgaagcagttcaataaggtgcaattattccactatgcaaagatctctaggatacatagctaaatcaaaaagtaagttgtagaacaatatgtatggtatttcataaaacaagattctgtgttggggtgtgagtatggttaagtgggtgggtggggtgttaataaacatgaacaagggactttgtgtatacaccaaactattaagagtggttatttctgaaagtaaagtgggattggttatggtggtgaaagaaggtcatcactttttactacccactgtatttggattttgtaacaaagaaagtgaataggcagcaatgacttggtgattgtataaaaaggcttggctttgaaagaaaccaagaagatagctaggtagcaatacaggtctgcaggacaaattgcccctcataactttcctgcctgacatactagatcctttacaaaattatgtaaacaataagtttatgtaacccaacattgcctcctcaatctaacaaatgtgtgatcaccacttctgatagctcctgcagtatgttcccagcattgccttagaacatttgtggggttgatccccagttgaacaggaatgtgattttacaggaatcagtgacattcaaagatgtgtctgtggacttcacccaggaagaatggtaccatgtcgaccctgctcagaggagcttatacagggatgtgatgctggagaactatagccacctggtttctcttggtaaggaccacttctctgagtgtctttcctgctgatgggcctttccttccttggttgctatagtggtggtgcccagagcttaggtaactgtgaccagggtgctcaggggtcagagcttgttaatctcattgggacccagttttatggggttttgagcctgctctttaggtaaaaggtctttattttgcaaaactggaaataggcaatttgattgcatgactccttaagttgcaccttttttttccttcagagttcctgaggatcaaggactagtactgacttgtccttaggagggttctttgtccacttgcacaaacaaccaaatcttgtgtatttacccatgagcaggatatcaagtttccaagccaga

SEQ ID NO: 83714 - DNA, 1064 bp, Homo sapiens
ctccgagccgtgccgggcggtcttcagggaggctgaagtgaccttggaggcgggaggcgcggagcaggagcccggccaggcgctggggaaaggtaagatcctcagggtggaaccgcagggtaggggccgcacgtgaccattttggtgtggaccgcgcgaggggtgttcgggccggggcaagggactcctggcgccacctcagttcccggggaggcgcagaacgcgcctcgggggctgggattgggggtggtggctgacggagaaggctgggcagcagagcgcctatgacatccagccccttgtccggtagccactgcttaccttgaccccctcctccgagatgccggatggctgagcccctcacccagtctcgacgtgggaagttctcccccgctggccccagcagaggaatgcgccggccacattcttcccccaacccgcgcgcaggtgtggggatgagccgtgccccgggcagcccccttcgcccctctcgggccccctttgtgaaccgtgctttgtgtctccgacagacagaccgggtctgtttcttttctccgagcttccctaccccgccccccttcttcctcggcagctggaatgcactcttaaccctgctcttcccggagggcctgcgcccttgtagcctgcctggaaactgggccctggcacacctgggctggggccatcacgtacgggaaccaccccgcccccagcgtctggggcctgggatgctaggtcactggggggagtttgagggggacagtgtcccaagctggcaggcctggggctatgggggcgatggacgggagatcaaagcacatttttgatccctcagttactcctaccccccccctccccgccccaagttcaaaaacctgagggggtgggcggtgcaacgttagtgaggagaaccagtgtgttatgagacccaggcggttggttgctggctagtggagggctttctccctctaggttaagaggacaatggatgggggctccagcaagggttgaaacctagttcttaaacgggtataaccctggatccttgggtcgggtttcagagg

SEQ ID NO: 83715 - DNA, 1038 bp, Homo sapiens
gggaggattgcttgaacccaggagttcgagaccagcctgggcaacatggtgagaccccggtttctacaaaaaatacaaaaattagccaggcatggtggtgcatgcctgtagtcccatctactctactcaggtggctggggcaggagaatcgcttgaacctgggagatggaggttgcagtgagccaagatcatacgactgcactgcactccagcctgggcaacagagtgagatgctgtctcaaaaaaaaaaaaaaggatcttttgagcccgggaggcagaggttgcagtgagccaagatcacaccactgtactgtagcctgggtaacagagcaagaccctgtcttcaaaaaaaaccaaaaaataaataaagagaaaaagaaataaacacgtgaaatttcttccccagttctactctcttaagggcaagcacacagttactgattttataagaatccttgtagaccctttttttttttttttgcacaaaaaacttatgtatgcatacaggaattttaaaaacaagaattggactatatcatgcatacaaatgttactctgcagctcgctttttaacttagaatcacaggcatctttccagactgttaaatacacatctatcttgtttttaatagcgccgtagtcttttacatggtgaatgtaccatgatttatttagccagtcttctacttttatcttttacagatgtggtgtagggaagagttaacatcaaaattgtgaagtgtttggatttttagcaatctaactatcagtaattgccttattaggaaagactgctgtagaaagatgatcgagtgaactgttcatcttaacatcatccagataaattgagctttcatgtttaaacaatacctttaatacagactctgctgtaaacttaaggttactataccatttaaaaatagttttcatactaacttttgttttatgactatctaaataatagtcaatagtttcaaaagcatatgaattcaccaaaaatcaaaaacttttaaattgcatgactcagaagtaaactac

SEQ ID NO: 83716 - DNA, 1131 bp, Homo sapiens
gtaaacaccgagtttcccttgcaataggctcatctaggtctcctcacccttaacttttttttttttttaatttaacttagggtctcgctatcttgcccaggctgctctggaactcctgggctcaagtgaccctcccaaagtactgggattataggcgtgagctaccatgcccagccacccttttaactcttataggtgagaggatgttgagcatgtcccagctatttgcacatctgggttaaggagtttctctccttgcaggaaagaaggtcactgaaggaaaggaatccattgaagatcttcccatccaaacgtatcttacgaagacacaagagagattgggtggttgctccaatatctgtccctgaaaatggcaagggtcccttcccccagagactgaatcaggtacgactgtgccttctcctgggaagcattggtggctccagggacccccatccaaaggcctgcatgagatttcttgctactgaatgtgggggctgagacagaaaaacctctcctgttcagtgagcagattctcctatggcagtgcccctcttcacagaggactctttgtcacagtcatgggatatttgttactttgtcagctgccattttcttttccctccagctcaagtctaataaagatagagacaccaagattttctacagcatcacggggccgggggcagacagcccccctgagggtgtcttcgctgtagagaaggagacaggctggttgttgttgaataagccactggaccgggaggagattgccaagtatgaggcaagtagcctttagtgtctactgtaaatgtcccctcagaagtgggatcctaggcctggtgaggtgggtggcaccgggctgaccccagagctgtgtaccccacagctctttggccacgctgtgtcagagaatggtgcctcagtggaggaccccatgaacatctccatcatcgtgaccgaccagaatgaccacaagcccaagtttacccaggacaccttccgagggagtgtcttagagggagtcctaccaggtaagaggactgggaaggggactgctacggggctgggcccacacccttaaatgctaaaagatcccaccatacctgatttccttggctgtgtatcaga

SEQ ID NO: 83717 - DNA, 1068 bp, Homo sapiens
gcagtgggtgaggggtggtcaaggagtcagcgttatgatagggagagatcctcctctccatccacacacccatgagccagtgcttcctggaggtcaggggagggacccttcagattaaactcacaatgggcttcccctctcctttctccccagaaagtccctgagtacacactgaccatccaggccacagacatggatggggacggctccaccaccacggcagtggcagtagtggagatccttgatgccaatgacaatgctcccatgtttgacccccagaaggtaatgccccttcctcactcagtccctcatcagataatgaaggaccaaagtttgcctttctcaggaaactggaaccagtctatattgcttcaaatgccagtctcagcactatggctgtgtgaccttaggaaaactacctaacctctctgtgccccatttcctaatctgtgaaaaggagataatgataatacctgctgcattgttctgagtttcaaatgaaataatctatgtacgtttcctaacacgatgccctaaaagaagtgcttgatatgaaaatctttgttgatttgaaaacatattttccttgtacctacacctgcccatcttttcccagtgaatgcttgtgtacctccaaggcagaggactcagtgccaatcaaggtgccaattacatcctcccccttccatctttagacaactctgaacgttaattaggtctgaataaaaatttgtaatgacgccaggggcggtggctcacacctgtaatcccagcactttgggaggccaaggcgggcagaacacttttgaggccaggagttcaagacgaacctggccaatatggcgaaaccccgtctctactaaaaatacaaaaattaaccaggtgcagtggcatacacctgtagtcccagctacttgggaagctgagacatgaggatcgcttgagcttgggaggtggaggttgcagtgagccgagatcacaccactgcactccagcctgagcggcagactgagactgtctaaaaaaataaaataaaaataaataaataaattttttgttccgagcaac

SEQ ID NO: 83718 - DNA, 1048 bp, Homo sapiens
acactgtctctactaaaaacataaaaaattagctgagtgtgccgcctcccagttcccgcatcagtggcctgcacagggcccttggggcgaattgcagcacgcctcggggcgagcggcaagggctggggtgagtgcacctgcacccaggcggtcttttcacgtgtcgccagggtcagaccgcatgtctctccttgcggcgctacacaagagcagagtacgagtctgaggtggagggagtcatggcaggacaagcatttagaaagtttcttccactctttgaccgagtattggttgaaaggagcgccgctgaaactgtaaccaaaggaggcattatgggtccagaaaaatctcaaggaaaagtattgcagcaacagtagttgctgttggatcggattctaaaggaaagggtggagggattcaaccagttagcgtgaaagttggagataaagttcttcttccagaatatggaggcaccaaagtagttctagatgacaaggattatctcctatttagggatggtgacattcttggaaagtacgtagactgaaataagtcactattggaatggcatcaacgtgaagctgcccattccactgaagttctgaaacctttcatcatgtaaataatttccatatttctctcttataataaactaatgataactaatgaccaaaaaaaataagctgggtgtggtggcacacgcctgtagtcccagctactcaggaggctgaggcacgagaatcaccttaacccaggaggtggtggttgcagtgagccgaaattgtgccactgcactccagcctgggcaacagagtaagactctcaaataagtaaataaaacatcagcattaggaaagtcccttcagccttagtttttggttcactgggtcctgaattggcctgtcagttttcccttgtgattgattgataggggctgactggaaagtgccatgacagattagtgatgccacaccataacagatgggaggttatgacgtagttgtcacctctggttgacatgtaatgaaccaggacctgcaggcaggtg

SEQ ID NO: 83719 - DNA, 1018 bp, Homo sapiens
atggtctcgatctcttgacctcgtgatctgcccacttcggcctctcaaagtgccgggattgcaggcataagccactgcgcccagccctcctttactttcttaataaagttgcttttactttaaaaaaaaaatgggttagctatcttttaggaagaatattctttttgaagcaaaaaaacagtgtagcagccaatgatgcaaagaagttattggtcctgcatgacatggcttttaaaacttcatgttataaaaatactgtgattattgatttttttaaaagtaaaatgacaaattaatttttctatcccaataatccttttcattatggtgaattttgctttagccaaagatcagcttttactgctattttccaaagtgtgcttgtggagtatttctctgcattgcccacatgtggaagccgtattctcaaactttcttcatggtgtactcagatccccgcactgatggttcccacagctaatcaatgatctgttcactccaggtgacacagtggtcttgtccctgaagaagttcctgaagcaggatacatatgacgtgcacctttctctgtctgaccatggcaacaaagagcagctgacggtgatcagggccactgtgtgcgactgccatggccatgtcgaaacctgccctggaccctggaagggaggtttcatcctccctgtgctgggggctgtcctggctctgctgtgtgagtaccaggcccccaccccctccctgaggatgggggagttgaaagactggattctaccttgagctttaactcctggaactaagaggccaccaacattgcccgtccactccttaaacattttttttaagacagggtctcactctgtcacccaggctggaatgcagtggcatgatctcggctcattgcaacttctgcctcccaggctcaaatgatcttcccagctcagcctcccaagttcctgggactacaggtgtgggccaccacgcccagctcatttttgtattttttgtaaaaatggggcctcac

SEQ ID NO: 83720 - DNA, 1815 bp, Homo sapiens
attagataatgatagctattgttgcgaggtgctattctaataactgctttacaggtatttactcatttactcattcatctgttcctttaaaactatacggaggcacatgtcctcagtacctcccgaggctgtgtcacaggcatgcatcctttaaaaaaggaagaaaaaaactattgtcattttacagacaaggaaacaggcatagagtggttaagggactcgcccaaggccacaaagctagtgtgtggtgtgagttctggcccgggctgtctgatttcagtccttgcccttaccccctggcctgtgttgcactgagcacttgctgtctgctggtccctgagtgaatgaattctgcatgaataacgcattctttcatttctacctccaaaacctttaggggaggggagagaggggctcacagagaggaaatggaggcttgcagctggcaagaggcaggacccgccgctcctaactacctgttctctgttgccgcagaacctgaaggcggctaacacagaccccacagccccgccctacgacaccctcttggtgttcgactatgagggcagcggctccgacgccgcgtccctgagctccctcacctcctccgcctccgaccaagaccaagattacgattatctgaacgagtggggcagccgcttcaagaagctggcagacatgtacggtggcggggaggacgactaggcggcctgcctgcagggctggggaccaaacgtcaggccacagagcatctccaaggggtctcagttcccccttcagctgaggacttcggagcttgtcaggaagtggccgtagcaacttggcggagacaggctatgagtctgacgttagagtggtggcttccttagcctttcaggatggaggaatgtgggcagtttgacttcagcactgaaaacctctccacctgggccagggttgcctcagaggccaagtttccagaagcctcttacctgccgtaaaatgctcaaccctgtgtcctgggcctgggcctgctgtgactgacctacagtggactttctctctggaatggaaccttcttaggcctcctggtgcaacttaatttttttttttaatgctatcttcaaaacgttagagaaagttcttcaaaagtgcagcccagagctgctgggcccactggccgtcctgcatttctggtttccagaccccaatgcctcccattcggatggatctctgcgtttttatactgagtgtgcctaggttgccccttattttttattttccctgttgcgttgctatagatgaagggtgaggacaatcgtgtatatgtactagaacttttttattaaagaaacttttcccagaggtgcctggggagtgaactgttttctaaatagaaggtttattggcatctaactcacataccataccattcacttgtttaacgtttacaattcaatggtttttagaattttcagagttctgcaaaaagagtgggctctgtttaccctgctggcttcacccaagcttcctctcaatggcaggggatactcagggtcagcttccatgcctaagtgggctcagggaggggagacttgccctcctttgcaaagtcagttgctccatgagagagaaccattaacctcttaccccaaggctgagcccctccacagccccagcaaggtctcttctggaacagcggctgccctccctgcaggacagtgtgtgacgacttcctcttctatgctggaggggtccctgttgaaaggcaggggttggggaacagccagctctgctacttgctagcacatttttttttttttttttgagacggag

SEQ ID NO: 83721 - DNA, 2593 bp, Homo sapiens
cacctgtactcccagctactagagaggctggggccagaggaccgcttgagcccaggagttcgaggctgcagtgagctgtgatcgcaccactgcactccagcttgggtgaaagagtgagaccccatctccaaaacgaacaaacaaaaaatcccaaaaaacaaaagaactcagccaagtgtaaaagccctttctgatcccaggtcttagtgagccaccggcggggctgggattcgaacccagtggaatcagaaccgtgcaggtcccataacccacctagaccctagcaactccaggctagagggtcaccgcgtctatgcgaggccgggtgggcgggccgtcagctccgccctggggaggggtccgcgctgctgattggctgtggccggcaggtgaaccctcagccaatcagcggtacggggggcggtgcctccggggctcacctggctgcagccacgcaccccctctcagtggcgtcggaactgcaaagcacctgtgagcttgcggaagtcagttcagactccagcccgctccagcccggcccgacccgaccgcacccggcgcctgccctcgctcggcgtccccggccagccatgggcccttggagccgcagcctctcggcgctgctgctgctgctgcaggtaccccggatcccctgacttgcgagggacgcattcgggccgcaagctccgcgccccagccctgcgccccttcctctcccgtcgtcaccgcttcccttcttccaagaaagttcgggtcctgaggagcggagcggcctggaagcctcgcgcgctccggaccccccagtgatgggagtggggggtgggtggtgaggggcgagcgcggctttcctgccccctccagcgcagaccgaggcgggggcgtctggccgcggagtccgcggggtgggctcgcgcgggcggtgggggcgtgaagcggggtgtagggggtggggtgtggagaaggggtgccctggtgcaagtcgagggggagccaggagtcgtggggacgatcttcgagggaaggagaggggcatccgtagaaataaaggcacctgccatgccaagaaaggtcgtaaataggagtgagggtcccggggataagaaagtgaggtcggaggaggtgggagcgcccctcgctctgaggagtggtgcattcccggtctaaggaaagtggggtactggagaataaagacatctccaataaaatgagaaaggagactgaaagggaacggtgggctaggtcttgagggggtgactcggcggccccctcccgggagttcctgggggctcggcggccgtaggtttcggggtgggggagggtgacgtcgctgcccgcccgtcccggggctgcgggctggggtcctcccccaatcccgacgccgggagcgagggaggggcggcgctgttggtttcggtgagcaggagggaaccctccgagtcacccggttccatctacctttcccccaccccaggtctcctcttggctctgccaggagccggagccctgccaccctggctttgacgccgagagctacacgttcacggtgccccggcgccacctggagagaggccgcgtcctgggcagaggtgagggcgcgctgccggtgtccctgggcggagtagggaggggttggaaaggggccgagaaattgcactcccacacccctgggttgcaatgggcaagctccctccttggctcaaacgacaccccttggaatttacgcagatttggggatccaaacgtttacgactgaacactgtggtggagggggtaaccctgcctggttgttgactatgttataaagaagaggaggttgagggcacttactagaagccttcgtatttctcttattgccctcagcactgtagagacagtctctcatttcagactgcaaaaacctggtgggtgggaaggcctggcaggagtattcccgttttacagttgagcaaaccgaggctaagagagtgacgtccacttgctcagggtcagcagagcagatatctgaactgggatctgactcccaggccccattaagcaccatctctgggatgactgaagagcagccctctcttggttactgggctgtggcttttgtttacagatataaaagcttttttttttttttttttttttttttttaaagacagggtcttgctctgttgcccaagctggagtgcagtggcacaatcatagcttactgcagcctccatcctctgggctcaagtgatccttcccatctcagcctccctagtagctggttatcatgggcatgtgccaccacacctggataattttaacttttttttaggctgggcgcagtggctaacgcctgtaatcccagcactttgggaggccgaggtgggcggatcacaaggtcaggagttcgagaccagcctggccaacatggtgaaaccccatctctactaaataaaaatataaaaattagccgggcatggtggcgtgtgcctgtaatcctagctactcaggaggctgaggcaggagaattgcttaaacccaggaggcagaggttgcagtgagctgagatagtgccaccgcactccaacctgggtgacagagcaagactccgtctcaa

SEQ ID NO: 83722 - DNA, 1032 bp, Homo sapiens
agtgctgggattgcaggcctgagagactgtgcctggaccaaaacatcttgatacaggtactgtttcccccaaggaataatgatttttttttttttttttttttttgagatggagttttactcttgttgcccaggctggagtgtaatggcgtgatctcggctcactgccacctctggctcccaggttcaagtgattctcctgcctcagcctcctgagtagctgggattacaggtgccaccaccatgcccagctaattttttgtagttttagcagagaaggggtttcaccatgttggccaggctggtctggatctcctgacctcaggtgacccacctgcctcaatctcccaaagtgctgggattacaggcatgagccagcacgcctggccaggaataatgatctttttttaaaaaaagcatggtagttctgactcaggatgaaaatgcatacacccaatgtacttctaggccttatcgttgtgacaatctagagtttgctttgttccacttgactgttgtccagggagcaagggaaggggctagtttctcttctggtttcactgaatcccaagtgcttcctttatatcaaaccactttctcctctctcatgattttacttgattgggtatcacaataagaggcattttttttttaagagaaatcacccacaattcccctgagggaacacctccactgtgtcattcttccagtctttgaccacatgaatctttagcaatcacgctgttgtctttacattttttttttgaactttggaagtcattcgaagttttttacagagaaactacagctcgactgatgaagtatatttgctctgtgtgctctagagctttctattggatcagaagttatctctaactcctgggctcaagtgattcacccgccttggcctcccagagtgctggggattggatattttgatgtcagtgggcattgaggagtggcttctcggggaaggcaaacttgatccagtcttggagagcaaggcaggggctagaaacaagcttgtatctga

SEQ ID NO: 83723 - DNA, 1086 bp, Homo sapiens
agacccgggggaggtggcgggggaccctgggactggtgatttagtgggaagaggcagccttcacacagaatccgcaggcctctggtgtggttggtttcagttccctttatgttcacagacccccacccccacacaacagatttcctgacatttaatatttgttttggcttttttggactgtggggtctccttgtatcagtccaatgtggagtcgccccaggatggaagtgcccttctggtaaaatcacacgttcaatctgaggaactggcttgtgattttaaaaggccgctaggacttgggatgtggcctgactctctttggacagtgcacggaagtgaagggatggatgtaacattggcaccaggtttagacattggcttcatggagaatttactccatgggaattttgaaacttgaaacctgtcactttttgtgcacaggcagctgtagggtcttaactcaggggactttggagtgtttgctagggtcattcctctgccccatgctgtggctgaccccatgatctcaaccttgtatttattccattggtttatctccagcttctagaatgaagacctttacaaaaaaaaaaaaaaccaaactcaactgtaataaaccagtttttgttttgagacggagttttgctcttgccgcccagcctggagtgcagaggtgcgatctcggctcactgcaacctctgcttcctcagttcaagcaattctcctgtctcagcctcctgagcagctgggattgcaggcacatgccaccatgcctttgtatttttagtagagacaggatttcatcatattggtcaggctggtctcaaactcctgacctcaggtgatccgcctgccttggcctcccaaagtgttgggattacatgtgtgagtcaccatgcctggctaataacccagtcctttagagttgctgcttattttccttcttcatagcacacaccggtctgagaaacccaggctattagacagtttgggatctctgaagtattagcctagtaaccacagctgtaagttgactcaggcgcggaaaaaagaaaagctggcaggctttcccagtgattgttttct

SEQ ID NO: 83724 - DNA, 1050 bp, Homo sapiens
gtgattctcctgcctcagcctccctagtagctgggactacaggtgtgtgcctccatgcctggctaatttttgtatttttagtagagacagggtttcgactacggccataccaccctgaacgcgcccgatctcgtctgatctcggaagctaagcagggtcgggcctggttagtactagtacttggatgggagacagggtttcaccatgttggttaggctggtctacaatctggagttttgctcttgttgcccaggctgggcaaactcctggcctcaggtgatccgcccaccttggcctcccaaagtgctgggattacaggcgtgagccactgtgcccggccatttcccctcctttctgaaggatgtgctgaacgtttcagaaaacagtatgcagcctccctaatacaattagacttttaaaaagcaaacccagaaaccagctttgggatcaccttacatcatcagatccccaccccctacccctcaaactcataaaagtcacttccccaattactcatgtctgtgacaaaggttgatctgagcttactgggaaagaagaccagtgggccgccctcctggccttgcctttgtgtctctggaggtgcggaggtggaaagtcttgggcccggcaaggccatgtaaagaaggcaggctgctgcttcctcccagtggggccctgcctgcccctctctgccaggtggttatggaaatccctgtttgctctccagggctttttattgggtgaggcttttcttccaaaatgctcaccttgtgtctgttacacattcccttccaaggtagccccagatacgccagaggctgaagctctcgtatctcccagaagctgcccaaaccctaaaatccccgagaggcacctgtcccaatccaatccttgctgggtctctttctttctttctttctttctttctttctttctttctttctttctttctttctttctttctttctttctttctttctttcttttcttttctttcttttgagacggagtgtcactctgtcgctcaggctggagtgtagagaggtagga

SEQ ID NO: 83725 - DNA, 1008 bp, Homo sapiens
attttttttttaagaaacagagtcttgctctgctgcccaggctggagtgcagtggtttgaactcctgggctcaagcaatcctcccatcttggcctctcgaagtgctgggattacaggtgtgagccaccaggcctggcctgcctctcactaattttgattgtgatgctagaattcagcttttttttttgcctttggaaggcctcttttgtcttttgcttatgggcagtttcagccggtttccctcttgaccttcacttccaaataaatgctagctgaacagcgcttctcttcctttcggtctctttcaactctctgggtcccagaaaatccacttatattggccttcaagacttgggagtgtagggacagggaaaccgccttaaagaaactcttgttccaaatgagacctactcaagccgcttggccaggcaggcatctggggcatggctcttgctgctgaaagagggaaagttactactgggacctaatggggcctgcctagaagggttgaacctgttccacatgagcaagatcataaacggtggccagctcaggaccccgtgggataattggccaagttctagataataattagctggctttgtaattaggagagcttgtaacaagccaaaagcctttcaaatttatttgacctgggcaagttcaagaagaagaagagcacctgattctgtggtttggcattcaggtacgcctgtacaccttctttctccttggttttttttttttttttttaagacagggtctctgtcgctcaggctggagtacagtgaagccatcttggctcacttcagcctcgacctcccgggctcaagcaatcctcccacctcagcctcccaagtagctgggatacagacacacatcaccatgcccggctaatttttaaaattttctttggaaaagggatctcgctatattgcccagactggtctggaactcctgggctcaagggatcttcccaccttggcctcccaaagtgctggatttaca

SEQ ID NO: 83726 - DNA, 1051 bp, Homo sapiens
tttttttgagacagagtcttgctcttgttgcccaggctagagtgcagtggcctgatctcggctcattgcaacctctgcctcccgggttcaagcgattctcccacctcagcctccggtgtagctgggattacaggcatgtgccaccacacctggctactttttgtatttttcgtagagacggggtttcaccatgttggccaggctggtctccaactcctgaccttaggtgataagccctcctcggcctcccaaagtgctgggattacaggcatgaatgagccactgtgcctagccgagttttctaaagattcttcctgcagagggatgatattttctaaacaggcatcatttagggcatattttttttttttttttgtgcatgtatacgagtgttcctaggacctggtacttactttggaatctcaccttcagtacgaggcttcctccccaacaaattcttcaccacaactatgtgggagtgtttgaaaaagggaacaagatgaccaacttgttggtggggagagttgtggctttcctattggaaaacatcatcccttgaataagcagtgaggcaaacacctgggcacttactttatgaacaggtggggtggggccctgagtcaccgacattgagaggcctctcctggtaaggtttttcaatatcaggttgaatcagcggtgacatcaccctctatagtgacaggtactctaggtgccggctcttactcataagtcccaggagatactagccctagatctcgtctctgttagcttcgtgctaaaaggttttggagaaataacagctgcttggtgacgttcatgtggctggtttcattaccacctaactcccaggcttgtaatcatgactaaattttctggagaaaatagaatttgtggttgtatttcttgtaacttttgccttcttgtctcaagtctgcatttaaaaagaggccgggtgcggtagctcatgcctgtaatccagcacttcgggaggccaaagtgggaggattgcttgagcccagaagttggagaccagattgggcaacaaagg

SEQ ID NO: 83727 - DNA, 1110 bp, Homo sapiens
taccagtctaaaatgggagctggccaggcatggtggctcacgcctgtaatcccagcactttgggaggccaaggcgggtggatcacctgcggtcaggagtttgagaccagcctggccaacatggcgaatccccatctctactaaaaatacaaaaattagccaggtatggtgctgtgcacctgtagtccaagctacttgggaggctgagacaggagaatcgcttgaactgggaggcagaggctgcagcgaactgagatcacgccactgcactccagcctgggcgatagagtgagactccatctcaaaataaaataaaataacatagagccaatctcagggtctatcaagacaggtgaagggaaatgaagttaaggcctgcaaactccctgtgtgttcttggagaaggaaagcaagcaaaatatgcaaggtgtgtaacaagcaccagcaactcagtggtggaggagggattccagtgtatttggagaggagaccttaggtggccagggagccccttccttctgtctgtctgttcatctgttcacccatcattcactcttccattcaggtagtccttggccacctgctgtatccaagatctctggctcctagtgcggtgacggtagactggataatgcagactagtggatgatttgacaagttaacttacatggttttggaaagaggcatcacttttatgactctgcaaacccaactcccttatttctaacttgcccagcccaatattaaaatgcatcaccaaaccctcctgctgtctgcggagaagccagcatgaaactcaagctgagcagaaaacagatccagcatggagataaggcagctgcagtttcacttttaggttgggccaactgagaattttggggactttccttgctgtgaatgtggaattaaattgcttttttatttttattttttatttttcgagatggagtctcgctctgtcgccaggtacagtggcgtgatctcggctcactgcaacctctgcctcctgggttcaagcgatttgcctgcctcagcctcctgagtagctgggactacaggcaactgccaccacacctggctaatttttgtatttttggtagagacagggttt

SEQ ID NO: 83728 - DNA, 1014 bp, Homo sapiens
ggtgtgtgctctggggagctctgcctcctgtcctaaaactgtcaccttcctgactgggcctgtcttccacaagacatcgcctggctagaccccctctgactacatcttttcctgtgcctggaaggacctcagaggtaagtatttgggtctcttgtgtcccatccccactcccggagcccaaagctcagtccgcagcacatagagggcccttaggggatgttcatggacagctgaatgactctgcctctgccttcaggtgggtaccagccagttgacatccagattcattcagagcctgctgtgggccaggcaccagcctcgcaccttcagggaacgtggcaataaataaggatttcagagggcagcacattctagaaggatgtaaagcagtgaaacggggtagggagtgcctggggtagtggtgcagggcccctttagctgaggagtggatcaggcaggaggatgtttgtgtggtacctagtggtagaaaggaggacaccatgaagagagcagtaggaagagaattccaagcagaggaacagcaagggctgagagcctgagacaggaaggagcgcagtgtgtggagtgggcaagaggcccagtgtggcagggcctggtgggtagatgggctcacaggcgggagataagctgggaggggaaggcagaggctagagctggtctctagttttttagaccttatcttctgaaggacagataagtgcctctgcctccatcagcttccaccgagacgaagtgatgcaaaccagaccgtgcagccaactcctgcgtcaggttccataggaatcctttccccgccagtggaggaggctctcccgtcttttggaaatgatgtgcaggagacagagctgattctcatttcttccatggacacggctaagtgcgggctggtgtgtgagaaagggttcggggcgcgtggttggtggaagttagctcctggctgttctgccttgcagtcccaggcaactcagaccttccctggctgctactcacacc

SEQ ID NO: 83729 - DNA, 1047 bp, Homo sapiens
gcacctgtggtcccagctactcagaaggctgaggtgggaggaatgcttgagcctgggaggtccagggtgcaatgagctatgattgcaccattgcactccagcctgggtgatagggcaaggccctgtctcaaaaaaaaaaaaaaaagaaaaaagaacaccctcattttacaattaacattgtcatatttgccttctctgtgtgtgcctcttaagtgtgtgcgtccgagcatgcactttatgagccatttgaaagtacgctgcaggcatgtttcacccctaaatactttagtctgcatctcctgaaccacaatgccattatcacaactaagaaaacgtataatgtcatctaacatccaactctgatggcaaatattcccaaccatgccaagaatgtcttgtgtttattacaaactctcacatgcaagtcatttcaaacatcacctcccgagatccttgtgtacccagaagggaacatgagaagagaaggtggtgttcttgcctttggtttgcctaaggccccctttttgttctcccactttggattcggttggattctaggagcagttacacatttctgtttttgtgtttaaaagcatgtaggtttcatgtaagctatatgcatgcacacactagccacacatgggactcaagtttgtaatttaaaaagacatttccttcccctataataaagcatagctggcatttctacatctgaagcgtctaagataaagctgatggtatcagcatgttgctctccaaagaaacaaaaggttatgatttgatagaccctgaaattagacatcaaggtcaagaaagtgtaaacttaggtgtggtcgttttccaaagctgtcactcagatgtttagcaaaatgtccccctttacatttcccctgtcttccacaggtctcccccatccacccaaaaggaggaaagttaggagggaagattgtcaaaagtcctcaaatatggctattttagatttctttttttcttttggtgagacagagtctcagtttatcacccagactggagtgcagtggtgcaatc

SEQ ID NO: 83730 - DNA, 1021 bp, Homo sapiens
ctgctttctttttttttttttctttttttttttttttttttggtattcaggaggatgcagcatgggttgtaggcttcatttctcaggagcctgagccaaggcacacatatagtctgagcagttacctttccaggcagccagagtagattcagcaaatgctcttggaagcagctgcctttcccatcaatgcttatttgttcttgataatgaaaaatgatgctagcatccattaaaagagaaaaggcatcctcttgtgagctctattggacaagtgagcacttgttgtacagtcatctgcaagcacatgtgacctggagactgtgggaaatgcctcacttcgcagtgttggctcccagctgttctcttgggctgtttgagttttgttccaaaggtcagaggcagagggtccgagcctttccagcacagcccacatttgaaagtagtgcaagcctcacattcattctttgtagaaggtttccagatcttgttcttgagttattgaatgattcaaaggttctgaattccacaacggctttcctgtgtttttgcagccagattcagcacattttggtgtcagccagtgcttggaaaatgtggccctagattgatgcgtgtttatatctgggttgtgttttttatagagaataaatctgtggttacttttacccatcccacattgctgttaactacccctggaatttctctccctccgcaagcctagtgctgaagaacagaagctttggtgctggctggttctggggcgaatgttccttcagaggctgacctgctctgtgaccttgacaaggccctgaccttgagcaaatgacttaagcctttcgcctcagttgctcatcagcattaagggggttaaaaacccctacctgcctcacagcaacataggagtcaatgtaaagttcacagtgcccacacgtaatgactgtcatagtgaatatttactctcaaaaagattttttgttttcagtttttagttgttgattttttttttttttaaatagagatg

SEQ ID NO: 83731 - DNA, 1026 bp, Homo sapiens
aaaatacaaaagattagccgggcgtggtggcaggcacctgtaatcccagctactcgggaggctggggcaggagaatggcttgaacccgggaggtggaggttgcagtgagttgagatcctgccatggcactccagcccgggtgacagtgcgagactctgtctttaaaaacaaaaaaaaaagaattgctaaatgcagtattctttggtgttcgctgtgggaaatgtgttctgatgagagggaggcaatccataatgtgcccctttgtatgcagggtgggcaaaacactgcttccaactagttacgtctaagatactaggttatcccactggttaccaaacaactcaactatggtttgctgccttccatagctggccctgtccttaaatcccaacatcgtctgaaaataatatagaagcttttgagactgtcttgtttctacccactcacattccagttatgggaccaggcgggcgtgggagaagaaacgggatcgtcaaagtgggactgttccgtgtggcatgatggcaatttcaagcaaggaatgttgctgaatgctcagagcctgccccaggaccaaaagcttttcatgaacttgggtttcatttgtatttgaacatcagtcatctctcttggggtcctctcttgaaagctacttttgcccagtaggctagaaagtggggcaccgtaggtttaatagcagcatgcagggatgacagagtattaaaaacactttttaaaagtcattcttactagtttttgtcatgaaaaaaaaaagaattcattctaattgtaacaggccaagtaatacaaggatatataaggaaaatatgttgttgttgttttcaaactgcctcctggccaggcacaatacttgtatctgtaatcccagcactttgggaggctgaggttggtggatcgcttgaggccaggagttcaagaccagcctgggcaacgtggcaaaaccccatctagtcctgtaaacataaaattacattttttgctgaaatacaaaaaatacaaaaatta

SEQ ID NO: 83732 - DNA, 1605 bp, Homo sapiens
ctctgttgcccaggctggagtgcagtggcgcaatctcagctcactgcaacctccaccttacaggttcaagagattctcctgcctcagcctcccaagtggctgcaattacaggcgcctgccactaaacctggctaatttttttttgtatttttagtagagacagggtttcatcatgttggccaggctggtctcaagctcctgacctcaagtgatctgcccaccttggcctcccaaaatgctggggttacaggcatgagacactgtgcccagtcgagaagttactttctagacaagataatattttcaattgacaagaagatgagaaagaaatcagagcacaaggaagtcatcctgtagttgtgaagaacattatggtgatagctttgttgttctgtcaccagattatggtttgttttggttgtgtttggttttgtgggagtcttcccacaagttcgctctttggagaaggaatgctcttgtctttaatctgtccaatttcctaatctctgtgatttctgccctgcagtgaattttgaagattgcaccggtcgacaaaggacagcctatttttccctcgacacccgattcaaagtgggcacagatggtgtgattacagtcaaaaggcctctacggtttcataacccacagatccatttcttggtctacgcctgggactccacctacagaaagttttccaccaaagtcacgctgaatacagtggggcaccaccaccgccccccgccccatcaggtatgttggcatttttctgagaagttcgctgttgttttagtgcgctgtctaatccaggtttctcagccttggtaccgttgacattttgggctggatgattttgtgttgtaggggttgtcctgtgcactgtgtaggatgtttagcaagcatccctggccttaactggttagacaccagtagcacttccaccagttatgacaacccaaagtatctccacatgttgcccatggcccctggggggacaaatcagcccaagttgagggctcttggcctaactgaataattcttgctggagtttttggggtgtggggatcgggtagtgtagaagagtggtaaaggcctgaacaccgtctgggactgaatctcagccgtgctatttactacttgggtaatgttggaggaattacgtcacctgtctatgcttgagcttccttatctgtaaaatggagataacagtgaggatggaattaattaatacatgtgaaatgctaaaaatacgcaaggcatacttagtcattgttagctgtctttaccactcccctcttgggggaagaagaatgaatgagagctggattcttctctctctctctcttttttttttaagacgtagtctcactctgtggctcaggctggagtgcagtggcgtgactcacagcaacctccacctccccagttcaagtgatcctcctgcctccacctcctgagtagctgggattacaggcgcccgccaccatacccggctaatttttgtatttttagtagaggcagggtttcaccatgttggccaggctggtctcgaattcctgacctcaaatgatctgcctgcctcagcctcccaaagtgctggaattacag

SEQ ID NO: 83733 - DNA, 1029 bp, Homo sapiens
ttttgttttgattggtcattttggtggatatatataatttgtcattgataagagaatgtgtcattaaattcaaactgtacactgcccacagaaggctggggacgctgtctggctaggttggactgttagacctgaagtatccgtcttgaattgtcttatcttgttcctcatcttctttccttttaggcctccgtttctggaatccaagcagaattgctcacatttcccaactcctctcctggcctcagaagacagaagagagactgggttattcctcccatcagctgcccagaaaatgaaaaaggcccatttcctaaaaacctggttcaggtagagaaagaagttctctgtttctctgggagggatttggcagagaagtaccaaggagagaaagggaaaagacccagtgttgggatccttctttactaattctttttctttcattttgtcttcagatcaaatccaacaaagacaaagaaggcaaggttttctacagcatcactggccaaggagctgacacaccccctgttggtgtctttattattgaaagagaaacaggatggctgaaggtgacagagcctctggatagagaacgcattgccacatacactgtaagtatctcttagaagcttgttgacaccggggtaacatccacccaggattttttggtcaacccatgctggatccgcagatcagaggctctgaacacatgaggagcttaacttgacacctcttgacctgttgctaaggagaagtgatgggagaacgtgggacagtttggggttgttaatttttctccttgtcaggaagaaaggaaggagaatccgcatgcatcctcatacaaccaggacaaatttagacccaagatgtcaacctgttcttggggctggaagtccctgacctaaaggaacaggacagtgatgatataagggagcaaaacccatttcttgggcttggcagcagcaagagcttaggaaaaccaagaggtcttttttttttttttttgagatagggtttcactctgtcacc

SEQ ID NO: 83734 - DNA, 1135 bp, Homo sapiens
gtagaaacaagatcttgctatgttgcccaggctggtcttgaaatcttgagctcaagcaatctgcccacctcggcctcccaaagtgctgagattacatgaaccactatgcctggccaggaagtcatatattgatgccaaattcagaaatatctgggggaaatgctagactaaaaggaccagagcaagtttcacccggcatggaataagagtttttcaggcccgcatcttcatctctaggcctgatgccctggtcctcgtgtgggaaatgggaggtctgagccgtggggggtgttctccagcccatggctcttaccttgttataatctcactgaagcagcagcagcacatgtgtgagaaaagtcacccactgggggtctcagagcctaggaaggtgtggcagccaggggggcgcactctgctctggctgggccccttctcccatgttttcttcctcatcagagctcaagtcaccctcacttggttctttcagctcttctctcacgctgtgtcatccaacgggaatgcagttgaggatccaatggagattttgatcacggtaaccgatcagaatgacaacaagcccgaattcacccaggaggtctttaaggggtctgtcatggaaggtgctcttccaggtatatccactaatgagaatctgaatactcagaaagactcttaggttctttggaccccaaagtgttgtccaagcccaaaggttgtgtaactaaagctgatccttcctacggacagaacttcttggcaagccattgttgtgttatatgcatgtgtgtaacagtctacctgtggaaacatataaaatagggagagtttaagaacaatcttcccttttttattattaattttttttttttttaggctgggcatggtggctcatgcctgtaatcccagcactttgggaggccaaggtggatgggtcacctgtgctcaggagttcaagaccagcctgaccaacatggtgaaacctcgtctctattaaaaatacaaaaaaattagccggtcgtggtggcgggggcctgtaatcccagctacttgggaggctgaggcaggagaattgcttgaacccgggaggcgggggttgcagtaagctgagatcacgccactgcactccagcctg

SEQ ID NO: 83735 - DNA, 1170 bp, Homo sapiens
ggtcaggagtttgagaccagcctgaccaacatggagaaaccctgtctctactaaaaatagaaaattagctgggcgtggcgacgcatgcctataattccagatacttgggaggctgaagcaggagaattgcttgaacccgggagacagagattgtggtgagccgaatcacgccattgcattccagcctgggcaacaggagcaaaactccgtctcaaaaaaaaaaaaaaaaaaaaagataaccacaccctgacttttgtggtaatcattccctttcttttctttattaccatttgtgtatttatacctggataataagttgatagtttgagctttctttctcccctagcactttggtaagaattctaggaattagggaactctgacacggtaccacccccatgtcccctcctttatccctcagggcagaattggattaagcagtattgacccagtcccaaagtgcagcttgtctaaaccttcatctccttgaactcttccaggaacctctgtgatggaggtcacagccacagacgcggacgatgatgtgaacacctacaatgccgccatcgcttacaccatcctcagccaagatcctgagctccctgacaaaaatatgttcaccattaacaggaacacaggagtcatcagtgtggtcaccactgggctggaccgagaggtcaggggtcaggaggatccagagggtgtggaggacaaatgtgtattagctcaatcccgtggacaaagcaaaatcctgctaggccagttgtcagttaatacagtgatggtctaagctttgcatctaagcttgtgcccagaggttccgtgcctagaagacaggcaggctggcatgaagcacatggttaaatattctggttccatgtgttgggctgggctaggccaaaggtggctagtgttcctggtcctgacttggttgtgtcgatctctctgcagagtttccctacgtataccctggtggttcaagctgctgaccttcaaggtgaggggttaagcacaacagcaacagctgtgatcacagtcactgacaccaacgataatcctccgatcttcaatcccaccacggtaattctataactccttagagggtttccaaagaaaggtcttttgttgttcatgaactaagtgtcaccactgctcatgggcgaagtcttt

SEQ ID NO: 83736 - DNA, 1217 bp, Homo sapiens
tggtgaaacgtcgtctctactaaaaatacaaaaaattagccaggtgtggtggcgggctcctgtaatcccagctactagggaggctgaggcaggagaattgcttgaacccaggaggtggaggttgcagtgagccattgcattccagcctgggtgacaagagcaaaaattctgtctcagaaaaaaataaaataaggaaagaaacttgaaaactaagaatttgagtgaattgcttgttgaagtgactggatccctagaatagccccagctttgccttcctcttgagtaggtgagcagatttgagaagccatggtaagtaattgtggtttctgccattgaaagtcatggcagaaaccacagttacttttgcaccaacctaatatattaccaaaagcaacagttaaggatttaattttatttttactaacacaaaatgtttcgttttgtttttaacttcattgtttctgctctctagggcttggattttgaggccaagcagcagtacattctacacgtagcagtgacgaatgtggtaccttttgaggtctctctcaccacctccacagccaccgtcaccgtggatgtgctggatgtgaatgaagcccccatctttgtgcctcctgaaaagagagtggaagtgtccgaggactttggcgtgggccaggaaatcacatcctacactgcccaggagccagacacatttatggaacagaaaataacgtaagtgtgaggatttttcaactgacttgcagcaactggttattttatatcattttatatgtaaatcaataatatgtacttcatggcattttgtcatttgtctgtacaagaccattctcttaatttattttttattccctttatctgtgctcctttcacctgttcccttcccttcacagacagccgttcttggtctgatgtgctgcctctctttgagctcttgtagtatggtagaaatgcaattttactttgcatacatactattgtgtttttttgagtttggagtctcactttgtcgcccaggctagcgtgcagtggcgtgatctctgcctactgcagcctctgtctcttgggttcaagcaattttcatgcctcagccttccatgtagccaggattacaggtgcctgccaccacgcccggctaatttttgtatttttagtagagacaaggcttcaccacattggccaggctggtctcgaacttctgacctcaagtgatc

SEQ ID NO: 83737 - DNA, 1123 bp, Homo sapiens
gtggagcttgcagcgagccgacatcgcgccactgcactccagcttgggctacagagcaagactccgtctcaaaaaaaaaaaaaaaaaaaaagaaagaaagggtttcacttttgttgcccaggctggagtgcagtggtgcaatctcggctcactgcaacctccatctcccaggttcaaacgattctcctgcctcaccctccccagtagctgggattacaggcgtgtgccaccacacccagctaatttttgtatttttagtagagacagggtttcaccatgttgaccaggctggtctcaaacccctgacctcaggtgatctgcccacctcagcctcccaaagtgttgggattacaggcatgagccaccgcgaccggcctattgttggttttcaaaataaaaacgttggaagtaaccatataactgaagaagcgcttaagccgttttcagctacatgttgtttgctggtcctattctaaaagccagagcttgtccccgttcagatatcggatttggagagacactgccaactggctggagattaatccggacactggtgccatttccactcgggctgagctggacagggaggattttgagcacgtgaagaacagcacgtacacagccctaatcatagctacagacaatggtaagggggcctcatctgagcctttgctgcctcgacctcctagctagttcagttccttgcccctcccttcttttggagggaagagttcattctttttcttttatcctttttgtttgctggattgatttgtataaatgtatggagtacaagggtaattttgttacatgcatagatgtgtagtggtaaagtcagggcttttagggtatccgtcacccaaataacatgcattgtacccattaagtaattgttcatcatctaccccctcccaccccttggacccttcccagctgccattgtctatcattccacaatctacatccatgtgtacacattatcgaactccgacttctaagtgagaacatgcagtatttctccttatatgtctgattcgtttcacttgagacaatggcctccagtttcatccatgttgctgcaaaagatttctcttttattcttaaacaaaggcattcttattat

SEQ ID NO: 83738 - DNA, 1174 bp, Homo sapiens
ccaatttgcagagacttcaaaagacccaactcatcccctttgattttaagcttctagtcaggcttaaaattaaaataaataaaaagactcaatgctttgttaatgacctcaaatggcaggaaagtgcagaaaaaggagaactagggaaacaacaggcaggcaataggacttcttggagtagttaaaattcagtgaatgaataacgatatgtgaagaaggaggagtgtgttcttggtgtgaggaataacttgaataattgttatcaaggtgggaataagttgtctgtgtaaaacggccagagacctgcccacctgggagtggaggtcctttgggattggtgggacaggaggttctgcgggtggagtggggcctggtgagggaccactgaagagccaggacaagatctagacttggtctggtggaaggcaatggggattcattactgttgccaagctgccacattttctgtgtattttctcttaggttctccagttgctactggaacagggacacttctgctgatcctgtctgatgtgaatgacaacgcccccataccagaacctcgaactatattcttctgtgagaggaatccaaagcctcaggtcataaacatcattgatgcagaccttcctcccaatacatctcccttcacagcagaactaacacacggggcgagtgccaactggaccattcagtacaacgacccaagtgggtacctgagttttattttggcaactttgctccaactgccatgcttcccttcccccagatccccacctttcaatttcccttctcaacttctagatgtcaccccttccattgatacttgcttccttgtcccttctgtctttgaggccttgctccaaaggtctttttcctttcctggtatctaactttgtagcatgctacccagtaatctaaaacccaagcagggctccctctcccagcctctagccaccctccactcccctctccacttgcaaccaggaccatcttctctgctacctcctgctcctgggaccaaacaacaccatttttgtggttagctccttcttgccaaccaatcgtgagctcccagattcatcagaactattctaccgaggtggaggcagctgtcaactgcctggtcaatttgcatatatgggcttcctacacctacttctctctgggcttc

SEQ ID NO: 83739 - DNA, 1203 bp, Homo sapiens
ttcatgccttgggttccacctgcacagacccccatatctgtgacttcctggagagccacttcctagatgaaaaagtaaaactcatcaagaagataggtgaccacctgaccaaccttcacaggccagccggcctccaggccgggctgggcaaaaaggttcaccctcaggcacacgggagcctaccgaacccagcgacatctgaagagccccgctctgcctaagcctctccctccagccactaggcagcttttttaaaccaactctagagccctctcccaagccttagaccaaatggaaataaagctttttacagcaaaaaaaaaaaaaaaaaagtacatacctaaataaaacccaagcagctctgctctcttcactcggcttgcgggtgtctttagttcactagcaattttattctggaatgagctttttattttcctcccctggtctcatcatttctttttattgctttctccagcccaagaatctatcattttgaagccaaagatggccttagaggtgggtgactacaaaatcaatctcaagctcatggataaccagaataaagaccaagtgaccaccttagaggtcagcgtgtgtgactgtgaaggggccgctggcgtctgtaggaaggcacagcctgtcgaagcaggattgcaaattcctgccattctggggattcttggaggaattcttgctttgctaagtaagtccagctggcaagtgactcagcctttgacttaaaaaaatggaggaggtttatttcctggaaatgatttttgttcttatattaataaggatataggttagctgatgtgggaaagagactcccaagttatgccagcctccataaaatagaagtttgtctcttactgaacatttcagaggtaaatggtctaagatgggaaggccatgaagtcaacaggggacccaggtttcttctaccttgtctcttttcattcttcaagacagtgcatcccaagcttgagagcatacaaatcatctgggcctctttttgaactgggaaatctgatccaggaggtctggcatagggccacagattctgcatttcttttttttttttttttttttttgagatggagtttcgctcttgttgccgaggctggagtgcaatggtgtgatctcagctcactgcaccctctgcttaacaggttcaagcgattctcccgcctcagcctcctgagt

SEQ ID NO: 83740 - DNA, 1133 bp, Homo sapiens
aaccttcaatggctccaactcagaatcaaagccaaagtcctcacagtggcccatatgtccctcccgccctgcttgcccctctgagctcttctccatgtctcttcccctcatgcaccctgctacagccatgctggcctcctcaccttccctccatcacaccaaacatgctcctcctgcctcaggacctctgtccttactgtttcctctgcctggaacactttcccccagatttgggaaaatgacagtgattgagtttaaaacccatctgaaagttaaggaccatgcttgagttcacatatcactgtctactatgttgtactgtacataccgacttcagggatgtgagtgtcacgtggattgacatcttcaagtgtattgaaggcagctagtggctgtctaactgccccctgtctggtatgaggggtgctctgtgatagctgctgcttctggccttctttatctttggctctcaacacttgctctgtctcccccaccatcccagttctgattctgctgctcttgctgtttcttcggaggagagcggtggtcaaagagcccttactgcccccagaggatgacacccgggacaacgtttattactatgatgaagaaggaggcggagaagaggaccaggtgggttttgaaaaccttggtagctcagtggtgatctctttattcggaagaagcaatgattagtaagaggtaggcatttgaaacagctctgaatcactttggatattatctttttaaggccttacccaagaaagtagacattgtcattgaccatcatcatcatcacatcatcaccaacacagctaacatttattgatcgcatactgttctgcacctcagtgagcgagctgaggcacagagaagctcagtaacttggctaaggtcacacagctaggaagcgacagggctaaatggtctgtctcagagcctgccttcctcattgccattctctggacgtgaacttcagccagattctctttgacatagaacaactggtctgctttgtttcttttgagtttttagctagaccaaactccttttctgtcatggttataccttcagtccctctgtatttcctgattttggagatgatcttaacatcttaccctggagttgtccag

SEQ ID NO: 83741 - DNA, 1104 bp, Homo sapiens
gatttaggcagagtttagctgaatggctctaacctgtgaattgtgtccaggtctgttccatgcaagtctcatctttgtaccagaagctggtgcctttcagacctttgcctgtgtcatatgttactgtcccattggctaagcaagtcacacaacaaagccccagatcgatggatgtatacttttctcacaagctggggttgggagggagtgaatatttgccaaacagtgatctaatcatcatgtcctatgaaaattagtaaggcacacagcctatatctggatccacacatgctactcacaatcctttgggccatgtttttttccagtgctatttgggagacttttagcttgaaaactgtcattttgcattaaactggtaaagatcatacagttggcagtgaaggcatcatccaaccataatctataaactgaacatagccctgtgtgtatgactatttctttcctactcttcattgtacttcaaccttttttctccaaaggactttgacttgagccagctgcacaggggcctggacgctcggcctgaagtgactcgtaacgacgttgcaccaaccctcatgagtgtcccccggtatcttccccgccctgccaatcccgatgaaattggaaattttattgatgaagtaagtaatccacgtggaaagccaaagcatggctcatctctaagctcaggaggagttgtgtcaaaaatgagaaaaagagtctttagattctttcctttactatgttttcagcttgcctgagccctggagccctgttttcctttttctttttttttctttttctttttttttttttttgagacgaagtttcactcttgttgcccaggctggagtgcaatggcgcaatctttgctcaccacaacctctgcccgggttcaagcgattctcctgcctcagcctcccaagtagctgggattacaggcatgcaccaccacactcagctaattttgtatttttaatagaggcagggtttctccatgttggtcaggctggtctctaactcctgactcaggtgatccacctgccttggcctcccaaagtgctgggattacaggtgtgagccaccgcacctggcagcctg

SEQ ID NO: 83742 - DNA, 1796 bp, Homo sapiens
ggaggtggaggatgcagtgagccgagatcatgccattgcactctagccttggtgacagagcaagactctgagactccatctcaaaataaataaatatactttatttatttcataaaatgaaaatatataaagaaaaggccgggtgcagtggctcacgcctgtaatcccagcactttgggaggccgaggcaggtggatcacctgagatcaggagttagagaccagcctggccaacatggtgaaaccccgtttttactaaaaatacaaaaattagccgggcatggtggcgcatgcctgtagacccagctacttgggaggctgaggcaggagaatcgcttgaacctgggaggcagatgttgcagtgagccaaaatcacaccattgcactccagcctgtgtgacaagagtgaaaccctgtctctaaaaaaaaagaaaaagaaaaaaaatacaagtccttccttagttcccacacccccactccccagatttaactgttaagcatttggcatttatccttccaggcctttctgggtggaaatgcagcctgcatgcaccagtatgcaaagcttccagctctgcccatcccagctggtggtgtggcagccccactctgatctatggggactccatcctgactggttggtgcttgcatctctcctgcctacatataactcaccatttcactttctctttccatcaacaacatatcctgtgcttctgcatccttccatgacagtgtgtataaatgtacgttgttggtgttcactgctccgtggtgtgccacaagtctgggtgcattgtcgtaccttacatattgctagacttcttgccccagatgacaggtgtgcccttcctttcactaaaagatgcttttgtcccttcttctttagaatctgaaagcggctgatactgaccccacagccccgccttatgattctctgctcgtgtttgactatgaaggaagcggttccgaagctgctagtctgagctccctgaactcctcagagtcagacaaagaccaggactatgactacttgaacgaatggggcaatcgcttcaagaagctggctgacatgtacggaggcggcgaggacgactaggggactcgagagaggcgggccccagacccatgtgctgggaaatgcagaaatcacgttgctggtggtttttcagctcccttcccttgagatgagtttctggggaaaaaaaagagactggttagtgatgcagttagtatagctttatactctctccactttatagctctaataagtttgtgttagaaaagtttcgacttatttcttaaagcttttttttttttcccatcactctttacatggtggtgatgtccaaaagatacccaaattttaatattccagaagaacaactttagcatcagaaggttcacccagcaccttgcagattttcttaaggaattttgtctcacttttaaaaagaaggggagaagtcagctactctagttctgttgttttgtgtatataattttttaaaaaaaatttgtgtgcttctgctcattactacactggtgtgtccctctgccttttttttttttttaagacagggtctcattctatcggccaggctggagtgcagtggtgcaatcacagctcactgcagccttgtcctcccaggctcaagctatccttgcacctcagcctcccaagtagctgggaccacaggcatgcaccactacgcatgactaattttttaaatatttgagacggggtctccctgtgttacccaggctggtctcaaactcctgggctcaagtgatcct

SEQ ID NO: 83743 - DNA, 1732 bp, Homo sapiens
tcatagctcactgtaacctcaaactctggggctcaagcagttctcccaccagcctcctttttatttttttgtacagatggggtcttgctatgttgcccaagctggtcttaaactcctggcctcaagcaatccttctgccttggccccccaaagtgctgggattgtgggcatgagctgctgtgcccagcctccatgttttaatatcaactctcactcctgaattcagttgctttgcccaagataggagttctctgatgcagaaattattgggctcttttagggtaagaagtttgtgtctttgtctggccacatcttgactaggtattgtctactctgaagacctttaatggcttccctctttcatctcctgagtatgtaacttgcaatgggcagctatccagtgacttgttctgagtaagtgtgttcattaatgtttatttagctctgaagcaagagtgatatactccaggacttagaatagtgcctaaagtgctgcagccaaagacagagcggaactatgaaaagtgggcttggagatggcaggagagcttgtcattgagcctggcaatttagcaaactgatgctgaggatgattgaggtgggtctacctcatctctgaaaattctggaaggaatggaggagtctcaacatgtgtttctgacacaagatccgtggtttgtactcaaagcccagaatccccaagtgcctgcttttgatgatgtctacagaaaatgctggctgagctgaacacatttgcccaattccaggtgtgcacagaaaaccgagaatattcaaaattccaaatttttttcttaggagcaagaagaaaatgtggccctaaagggggttagttgaggggtagggggtagtgaggatcttgatttggatctctttttatttaaatgtgaatttcaacttttgacaatcaaagaaaagacttttgttgaaatagctttactgtttctcaagtgttttggagaaaaaaatcaaccctgcaatcactttttggaattgtcttgatttttcggcagttcaagctatatcgaatatagttctgtgtagagaatgtcactgtagttttgagtgtatacatgtgtgggtgctgataattgtgtattttctttgggggtggaaaaggaaaacaattcaagctgagaaaagtattctcaaagatgcatttttataaattttattaaacaattttgttaaaccattgtcaaatttgttttatttgattccaccacatttccagtcaagagaaaagatgcatggagatggcctcagtcaaaacgtggagaaagaggccgggcgcggtggctcatgcctgtaatctcagcacttcgggaggccgaggcaggtagatcacttgagctcaggagtttgagaccagcctgggcaacgtagtgaaaccctgtctccacaaaaacacaaaaattagctgggcgtggtggcgcgcgcctgtagtcccagctactcgagaggctgagacatgagaatcacttgaactcaggaggcagaggttgcagtgagccgaggttgcgccactgcacttcagcctaggtgacagaggagactccatctcaaaaaaataaaaaaatttttaaaaaacttcatgctgaagtgacttctccagaagtttctatcattctactggatgaacatgggagaaactacattcacatggtaactttatttgaacagtatccatccatgtggcatgtgatgaaaccaa

SEQ ID NO: 83744 - DNA, 1113 bp, Homo sapiens
acaggttggtctcaaactcctgaccttgtgatctgcccgcctcggcctcccagagtgctgcgattacaggtgtgagccaccgcgcccagcctgaatattgtttttcttatccatacttcactgtaagcagatggaagcatctgtctgcttcattatgtctgccagtgttgagtacctgagtattttcatattgaaatatagctttaatgatacattacttctctcttccttctttacatagcggttaatcatattgagcttctgaaattgtgcgcgtgggcagattagccatttttgggttccctcttaccccccggactaagccgggacggaaaaaaaatgtgaagggggcgttcccgatcgatttggccccgccccatagtgtgcccagagccttctgccacacttaacatggcggcggcggcgccctgccgaggcgcctgagcgggtcgcgagcgtggtgttacactccagtcatggcggcccgacaggccgtgggcagcggggctcaggagacatgcggtctggatcggattttggaggcattgaagctgctgctgagcccgggaggtgagaggacgcatctccgcgccgggctggacccgggactctcagggccgcccggcttccggggctgccctgccttccgcagcgtgcgccccttaggcccgcctcgggaccctccgcccgctgctgggggctttgagcattgtctatgcccgtcctcattacgttcttgaggaaactgaggctcaaggagggcgcgggatccgttgactgctgatattagccaacatctcttgagcatttgccttgtgctgggctctgtcaggcggggccgttatttcattcagtgcttactgcagcgctcttgggagggggatatggacccagctccagagagggtagggcgcccgcgacgtagaaatgtgaggtcctagccgcgtgagggcgcaggggccagcatggacccttgagatttgtacgaaatgccaagaagtccagacatcggaagcagtgacgtttgaaatgggtttggggagagtatttaggggttaccaggcgcttttaatctttgtggtgcgtggacagtttcttcccagtctaaaatct

SEQ ID NO: 83745 - DNA, 1028 bp, Homo sapiens
tggtacccctgggggaggctttccagagccagtgacagtggcgcccggcctgcgaggatgaactggagtaggcagggcattccacagggggaagtgcagcttgttttctatgtgtataaactctcctttttttcttcttcaaaaggctcgggctcaagttcactacaggtcacaaaacatgatgtcttgttggctactttaaaatctaacctgtctgctttggaggacaagtttctgaaggatcctcagtggaagaatctgaaactcctaagagatgaaattgctgataaggcagaatggccacaaaactctgtggatgtcacttggagttttacctctcaaaccttgttgttgcttttgtgcttgaaggaaaccatgatccgccttgcagctaatttcaatccaggtaaacccaaccctaggactccggaagttgctcctgccctgagccccgatgcacttagtatctcacaacagaagactgtccagttcgttttgcagtttgtagttaccttgggtatctgcccctatctcatgcctggtgttggagtccctttgagatatagaactgaatttggtgccgtcgttcaagacgtggtgtgttttgatgctgcccccgatgcaactcgaagactgtacaccagctgcaaggcccttctgaatgttgctcagcacacatctctggggagcttgatcttctgccaccactttggggatatcgcagcaggtctgtgccaactgggattctgcccaaccaaaagaaaactgctaacacctgcagaagaggtaaatatacattgagaaagagagagggagagattgtgtgtgtatgaatgtgtgtatatatttgtggatagttgttataaaaggcaactcttagttcttcagaactggatatgccaaagcatatccaatggataaatgaatcttttgggggtgggcgcaagtttcatttattgggttctcgtcctttgcacacctgtagagtccatttcacctgtcccttgtcattttgggaaacagctata

SEQ ID NO: 83746 - DNA, 1030 bp, Homo sapiens
ccgtctcaaaaaataataataataaataaataagaaataaaaaacataaaaaggaaagtatagaagggtagattatcttatagaaaaaaataaactattttcaatagaaaagataaatgcattttaccttaaattttaagacaaatttgttacatgggaccttctgtggggaattgctgtgagctgctaacatctctctccattgtgccagcgggagcagctggtggaagtgatgctgaggtgacggctgctgactggaagaagtgtgacctgatcgcaaagattttggcctcttgtccccagcagtctctttcaccagagaattactacagggacatctgcccccaggtaaatctttttgtttctattgatcatttgaggattatctgcttatttacagaaagaggacttttaatgttcctctagtattgagataaaagcagtataatatttaagtttattgtttagtgaggagccttcttaataaatgaataaaaaccggtggaagagactgacctaattgttcagtttaagaatgacgaggccaggcgcagtggctcacgcttgtaatctcagcactttgggaggccgaggcaggcggatcacctgaggtcgggagttcgagattagcctgaccaacatggagaaaccccgtctctactaaaaaaaatacaaaattagctgggtgtggtggcgcatgcctgtaatcccagctacttgggaggctgaggcaggagaacggattgaacccgggaggcggaggttgccgtgagccgagattgagccattacactccagcctgggcaacaagagtgaaactccgtctcaaaaaaaaaaaaaaagaatgcctcaccactactaaatgatttgcccagcttgctctcagagctagaatacgaaactcaagtttcatcttgttcgttatcttttctctccatgtgtttttagttagtttttaaaggcagatattaaataaacaaggtaaattaacatggcaaacaatttaaaaagcataaaagagtaaaccgaa

SEQ ID NO: 83747 - DNA, 1067 bp, Homo sapiens
ttatctgagacataaaggggatacacggctcaaaacacttttagtccagtggttctccattctctccttctgctctgaatgcctggggcccaatccctagaatgcttaaattctttgccctccctggtatgagaaggattaatagtgtattctttgcctagagaggtgaagggaggcctaggttgcacagagactggttctgggtaggacaatgtaagagagttataatgcctttttatttggacattttttgctcgtaagaggattggctagattctgaaatggggaaaacgtttccttttagtatacttcacattacttgcctgacactcttcctaaaagcagaagaaatgttagggtaggaaaaactgggaggcacttaagtagtttatttcctccattctcatttccattttatctctctgtttccagattcagggaattttgcctttaattatccaagtcttttctccatctaatcttaatgaatttctaattacagctattctgtcagattggatatttgactcctctttctgaatttttaattagatttgcagagtaaattagaataatagaatcttagaactggaaggaacttcagaaataagtgtaacctctcactttttaaatagactttatttattattattattttttgagccggagtttcgctctgtcgcccaggctggagtgcagtggcgcaatctcagcttattgcagcctctgcctcctaggttcaagtggttctcctgcctcagcctctgagtagctgggattacacctgggattacaggcatgtgccaccatgcccggctaatttttgtatttttagcagaagtaggtcttcgctatgttggctgggttgttctcgaactcctgacctcaagtgatccacccgcctcagcctcccaaagtgctgggattacaggcgtgagccaccacgcccaccaatagactttattttttaagagcagttttaggttcacagaaaaattaagtggaaagtacagggagttcccatatatctatctccagacagcctggtatatttgttacaattgatg

SEQ ID NO: 83748 - DNA, 1050 bp, Homo sapiens
cccaggccagtctgggccctagtagctgatctagcaacttgagaaactggaaatctagatgtctgcatgtggagaagccaagaagcacactactatacctcaataaaattattaattttttttttttttttttttttgagacagagtctcactctgtcgcccaggctggagtgcagcagcgcaatctcggcttactgcaacctctgcctcccgggttgaagcgattcttgtgcctcagcctcccgagtagctaggattataggcacctgacaccatgcctggctaatttttgtatttttagtagagatggggtttcaccatgttggccaggctggtctcaaactcctgacctcaggtgatccacccaccttggcctcccaaagtgctgggattagagacgtaagccactgtgcccagcctaaattttttttttgaaaagaaaaataagaaaaaaaggagcaggctcctttttactgcagaaccctggatggacaggaagcaccagataagctctaaaaatggagttgaatttagagcttaaaacagtttgaaaggctgtataggattcagtaaatcccttcattcgtttcttccctttgtacaaccacctccacttcccagcgaaagactggaggtttactcttaagagatgttgagcccaagggactctgaactgggtgggagaggagaactgaaaaataggaggtataaattgaagtctgcatcctcaacaatgaggcctccaccccttccactcaggtgtcagagtcttggcagcaggtttagacgcccccataggactactgtgaggattaaatgtgttaatacctgtaacatgttcagaattgtgcttggtaaatagtgaatgtttaatattattattatttttgagacagagttttgctcttgttgcccaggctgcagtgcaatggcgtgatctcggcttaccgcaacctctgcctccctggttcaagcgattttcctgcctcagcctccagagtagctgggattacaggtgcctgcaaccatgcccggctaatttttgtattt

SEQ ID NO: 83749 - DNA, 1186 bp, Homo sapiens
gagtttgagaccagcctggtcaacatggtgaaaccccgtctctactaaaaatatttaaaaaaaattagctgggcgtggtggcgggtgcctgtaatcccagctactcgggaggctgaggcaggaaaattgcttgaacccaggagccggaggttgcagtgagccgaaatcgtgccattgcactccagcctgggtgacaagagctaaactccatctcaaaaaaaattaaacaaacaaaacctacatattgcatacttgtgtgccacacatactaagctagggtgctgggaatacagcaggggacagggcagaccgtcatgaaacttgcagtccagtaaggaagtcagacactaaatgactgttcagaaatgtacttagaattgaatgaagggtctcaaaagagaagtggcgggtaccaagagcacataacatctaacctaggctgggaagatttccactgaggaagtgtaagcgtaagctaagatttgaaggaaactcttccaagtaaggaaaacatcacgtacaaaggcttagaagcagcaaagagcttggtatacttgagacactgatggaaggctggtgttagtgaattgtagagaccaaggggaagagcatgcctgcaaggacaaaagatagtcaagggctagaccatgcatgtgtgtgtgactggctgattacataccgagttaggtgaggagtctgcaggaaagcagaataggcttagtgtgagtcttatgaaatctaccctgcagccagcctgctcataacccttagcaatgagtaggataccctctgggaatggatttttgagcttgaggattcaaatctgattctgattctcgatgtattagaatatacctttcactagcctgtctaaaaggaaagggaattttatctgggcctgttattagtgtgaagcccatttctttagatttacttagcacttctaattatatattttccatattgttttaaaaaaaaagcttttggttcagtttctagagccatagtatacccttgctgttagaactgtcaaggtttgggaggccgaggtgggcggatcaggaggtcaggagatcgagaccatcctggctaacacagtgaaactccgtctctactaaaaatacaaaaaaaaggtggcgggtgcctgtagtcccagctactcgggaggctgaggcaggagaatggc

SEQ ID NO: 83750 - DNA, 1076 bp, Homo sapiens
tcttctctcccttcatcgtggtgaaatagctgttttttgttttgttttgttttgtttttttgagacagggtctcgctccgtcgcccaggctggagtgcagtggtgcgatctcagctcactgcaatttccacctcctgggttcaagtgattcttctgcctcagcctcccaagtagctgggattacaggtgcccaccaacacacccagctaatttttgtacgtttagttgagatgaggtttcaccatgttagccaagctggtgttgaactcctcacatcaagtgattcacctgcctcggcctcccaaagtgctgggattacaggcatgagccaccgcgcctggccttaaatatccttttatacacctatttgaaggtgaattcaatgaacatcttggaattttttttagcttaattaaaccttcttctgctgtacataattggtcaccaagtcctgtcaattcttttttcaaagaagtctttcaaatgtatcttatcctctttatttccatggccattaccctaaattaagcttcccttgcttactccataaaagattccctaccttcaaaactggccgtcttcctaactggggtaattttaggctctccgtacatacttcacatgtagagaccagcagcatcaagttgatgtcaagaattactgtgccaacgaagaacacagcattatatatggagcagacacttccgtcttcctttctctggctctcatgttggggcctaaacctaacatatcatgtaatatcttccagataagctgtactcactgtagttgatacccctgataggttcctaaattgtaagatattttgagagtaatttgttactaatatcaattaaagtgctgaaatttacaagattttcaaaaataaattagaacagattcaaagttatctcaataataacatctctatctcacttgcacttccatatgctttgtgagtacaagagaaaaggatcaaattgcagcaaatgtgccatccattgcacataaccccaaaccttgtctcttgtgtgtcacaccccgtagtctgtcatgccatatgtgagaatgttatt

SEQ ID NO: 83751 - DNA, 1149 bp, Homo sapiens
aagagaaaaaaataaaaaaaaaaaaccacctgggctctgggccaaccatgggaggtgaaagcatgccagtgtgtagagtgaagagatctagccatcttgacatgcccaaacaaatcacacaagctcttccaccctcttcctttcagagaagagctttcatttctggcaaaagagctgagtggagggaaggcaaaagcccggaagggggaaggtagatacaagatgaaattgttttcacagagtttcaaattgagcaggattacaagtcttaacttgtcagggcctgaatctctatctcattctcagatttctacctcaaataaaataagttgagaaaccactaactgaaaataattctgtcccttgaaggatcatctaattggacctggcatggaaatttggaatgcagtcctgcgaagtttatcatctccatttatgtcctggaaaagggaagatttcttttacatcctgacctggtttctgtaccacttacttaacaaataagcatttagagaatgtctctcatatatggtctctcagtaaattctctaagtagttctgggaagtagacattatctccatttttaaaacttcttatttgagatgtaatttacatacctaaaattcacccaattaaaacatgcaagtcagtggtttctagtgtctttaaagagttgtgcaaccatcaccactatctaattttaaaacatttttatcatttcatacccatcaaaagtcacttccccttgctcactcccccaacccctggcaaccactgatctattttttaatctctatggatttgcctatgctggacatttcatataaatggaattatacaatatgcggtcttttttgtctggctcctttcactttagcataatgtttttgaggtttgaggtttcctttttatgacttcattcctttttatgactgaataatattccatggtattgcttagccatgttttatttatccagctcattaattggtggacaactggtttgtttccactttttggctattatgacgagatcaggcgcattcggggtggtatccccgtagacttggctattatgaatagtgttgttaggaacatttgtgtacaagttttgtgtgaacgtatgttttcatttcccctgggtatat

SEQ ID NO: 83752 - DNA, 1142 bp, Homo sapiens
cctgtaatcccagctacttgggaggctgaggcaggagaatcgcttgaacccgggaagcagaggttgcagtgagccgagattgcaccattgcactttagcttgggagatgagcgaaactctgtctcaaagaaaaaaaaaaaaagcttactttaaaataatacaaattatgaggatgtgaagaaatgttgccggtagaaatgtaaaatggtacagttgctttgaaaaatagtctggccattttcaaaaggttaaacatggttatcatgtgacctatcagttccactcctaggtatatacccatgagaaatgaaaacatatgtccacacaaaagtttatatttatatatatatataggcattatttataatagctgaaaaattgaaacaacatacatattaatatctaccgcctgatgaatggattcataacatctgatgtatgtacacagtggaatattatttggcagtaaaaaggaatgaactattgattcatactgcaacatgaatgaatttgaaaatatggtaaggaaaagaagccagacacaaaaggccatgtgttgtatgattcctatatgaatgaaatgtccaaaacagacaaatgtataaattcagaaagtagagtaatagttgtcagaggatgtgggggatggaggagtaaggagtgactgataatggatatgaggtttctttgtgaggagatgaaaatgttttggaattagatagtggggattattgcacagcctggtaaatataccaaaactaactgaattgtacacttaaaaaaattaaaggccacacgtggtggctcatgcctgtaatcccaacactttgggaggccgaggcaagcagatcacctgaggtcaggagtttgaaaccagcctggtcctacatggtgaaaccccatctctacgaaaaatacgaaattagctgggcatagtatgggttcctataatcccagctactctggaggctgaggcaggagaatcgcttgaacctgggaggcggaggttgcagtgagccgagatcgagccactgtattccagcctgggcgacagagcgagactctgttttaaaaaaaaaatttaggatgggcgcggtggctcacacctgtagtcccagcactttgggaggctgaggtgggtc

SEQ ID NO: 83753 - DNA, 1033 bp, Homo sapiens
ctagctgtcacaaaggcaggattcatgaccaagaaggcaacatgagatacctccaggtaaagagtcagttgcttaaatgtccactttacaagctattaaggaggtctaagtaccttccctgcagaacagcgatttaaattttgccctggagccaccctttctctagtaaagttggaatttgaaggcaagttaaggaggatggagtagtgagagagcttgtaagtaaaacagcaagtccctcttcagacttccccttaaatacagcatcccacactctctaagtaatccatggtttttactggagctttattgcagtatcagctagaggtgcaccctgcttttgtgtttccctccccaactaaagagcaagcagcctatgtcacccttcatctcaaatacaaattaaaattcctaatctcaccagatgtgattaagatgatacttgaagctgttcacacacttagtaagcccaattatattttttattaacactgacatagttccttttgttggtgaatcataactttacaatttttaactgaatgaagcatcaattaccccctctcaggtcacgttgagaacttggcagtggtggaaggtaaacttaaatggtgtctgtacagtttgggcaacacatttttagatttttacattaggcttttgtgcttcctgaccttgtggtatctctcctgccccagaggaggattgaaggttgggaatgaattgagcctcagggaatgaatcacaaccccttgagctgccaaagacctcattaggtcatctctctgtccacctgctgggacatgattgctaaggtgtttcttaggagaaagctgttttagaatcacttttgtactttgtgttcaacttttgttttccactattgataacctttaaatagggacaaaaagagaattgtaaaatattttctttggcaattagggttttctttttgttgttgttgttaatggcttaaaatgttcattcactcaacaggtattttttattattattattattattattattatta

SEQ ID NO: 83754 - DNA, 1045 bp, Homo sapiens
agcttgcagtgagccgagatcgcgccactgtactccagcctgggcgacagcaagactccgtctcaaaaaaaaaaaaaaaagcttgtccttgtgctttttttttttttgaaacagagtctcactctgtcacctcacccaggatacagtgcagtgatgcaatctcagctcactgcaacctccacctctcaggttcaagcgatcctcccacctcagcctccatagtagctgggattacagatgtgggctaccacgcctggctaatttgtgtatgtttagtaggatttcaccatattagccaggctggtcttgaactcctgaccctaaagtgatccgcccacctcggcctcccaaagtgctgggattacaggtgtgaaccaccatgcccagccccttgccctactttttacaccctagttccaatccccagagattgccatcttcatacccctcctttttaaagtagtttcttctagtaattatttctctgtttataaataaagtgcttacacagacctctcttgatttaaaaaattttggacatgacctactcactttctacatgttagatgtggacctagtgcacacacataggtgcacacgcataggtacacacatgctcaaacaacttctgccatttcccatcacaacttttggctaaatcattgggcactgtttactgctgaccatgtggatgttattcagtgctgagcctagtgcagtcgtcagccttccctgcacatttgcttccttttctgcgtacatactgatatattttccaaagatccagcaactctatcatgcacatatcataattttgctctagttttgttctatttacccagacttcagcctttgacacctatcccattgtctttttccttggttgtggattcataccttttttacaccttgtcactttagtgagatttcaggagaaagaggatgcaaatgtttgtggtcattctgctgtgttagttgcaaattctttttactttcaaagtagaacagctgactagctgttctactttgaaagacaaaatttgtt

SEQ ID NO: 83755 - DNA, 1017 bp, Homo sapiens
agttactgagcacctgacatgtgctaggactcttctaggcattggggatacagcagggaacaaaagaaaatccttgactttattatagagttcacattccaaggaggagagcagacaataaggaaatacacaacctgtcaggtgatattaagtgctaagacaaatgaagcagggtgagaggagtaaagagtggcaggggaaggagggtgccgttttatatgtgacaaatgtgatctgtgagcagagacatgatagggtttgggagcaagctgtgaggccaccaggaggagcagcagcagatgcagaggggaagtgaggccgactcctccgagccaggatcacttggcctactggagaatagcaaggaggccaggaagcaagggagagtgttaaaagatgagatcagagagagaacaaaggaaggcgggggatggggactgctcatattcagggaagaagggaaaccactgaggggtctgggcagaagcatgaaggggccagacttatgattcaaaccaaatagctccatctgcaatggatgaaaaaggtagaagcagggagaccaatgaggggattattggagaaacccaaagcagagttgatgggccagggtgcttggggtagaagtgggttctcatcctggaacccctatttctacttattccttctttactttttttctttttcgtcactgttctttatagtgtgtaatctttttcctgttctctgctaaagactaatgagagaaaataggaataaacaacagtatagacatgaatggtagaatttgtagttatatagttttgaggccaaccaggggttttgttctggatctgtctggtcatctctcacctccctgccacccctaaaaaggttgctgagtatggggctgggctcagattatgataacactgttccaggctacacatttagaaggcgctgctgtggataggagagaggatcagcaagtcctacgaaggggggactcagggtcagggtcttccctatttctgttga

SEQ ID NO: 83756 - DNA, 1012 bp, Homo sapiens
acatgaagttatagtctcaatccacaggcttcctgatttgtgtttgtcaatattacgaggctaaccaactcttggtcatgctttaatgagtttgaacttttatatatctaattaaattaattaaatcactggaatagttttaatactttcatgattacagaattgtaaagacagtctccgtcatttaaaatatctaggatttttttcttctttcagtttttaaaataagttaccacaaacctagaatttttccttcctgattattacatttctggactttgttttaatttcacccttcaaggaagtttctggaggcacttactgtctggagcacacttttcaggagaaccaatctgtttgtcttgttggtaacacactagggtagagtcagttattgtagattttcctcatagggtaactttgtgtaaactgaaagcttatgcactgattaagccaatcttggagttcaatgagctgttgagatggaatgagtaatctagttaatacgtaactatagaagtcctggcatctcctgtttcaaattgtctatgtttctgtgttattttagttcattgagttgccaaaaatccagtaatacaaagcatttcctgtacattgttttactctgaaagatatttatttatggattttatttgcacatcactctgttttctgaagaaacagaaagaaaacatccttttgcaagtctaagtgtaaagtagggcctctgtgccttttttcagtgcccctcacttacctctttttttcttcccctctcccatttaaaacttccctctacaggtccttacccaggtttgaccatctctagaaagtaatcaaatttcagacattgccctaccttcaaatctttctcttattctttcccagcctataagaagcaggtagcagatatactaatatttgctaagaggtgatggcagcctcctattgtgtggccattcctgggatttttttttttttttaaagactggttcttgctctgttacccagg

SEQ ID NO: 83757 - DNA, 1088 bp, Homo sapiens
ttgcaaggaccttgaaatgtcagagatgtggggcaatcagttggctgcattttagtcctttgttttaggacttaaaagggatgagccccttctaaattttactttcttatttgtgatacagggttaataatattttgttctacctatctcagattcttgtgaggttcaaacaagataatagacatataagtattttgcagataaagaggcttacaaatgcacacagcattgttttatcccacagcattttatgtctgggctgcactgtagctgcgtacattatattgactaagatccctcttctgttcataaagggctatgtgaggagggaaactgaagtcagaacagagatgatttccccagagctgcaggggaaattcaaggctgaaaagtaactgttgttaatagatcaaaatttacctacgaattttttaatgatgaatttcatcaaaaattaattgcatttaaattatttaattctctaaatggcttttggagaggaaatcctgcctgtcaggatctgccatgtcaatctaatttcctttggaccttgacagaaattgtaaactgtgtcgactctggctcacatgtggcaataaattgtattcatgaaatgttacaagaaaccagtgattcttctattgtatttcttaacagtagtgaggtagagttctaggccctgaaatgcagggaaaaaagagtagatgttagcgagcacaaaaaaggggcacatgaacagagtcagatctatattttgtctcctgtttcctcattgactggatcaacaagatgtttctgctgagggcatgtggctctccagggtgtcatccctagagatccatatactttagtacccaagtaaatggcatccaagacaggaggaaaagtagtttttctggatcccttttttcagtaactgatttaaggaggtcaaatatgtattgcatcctttgaccattttatgcttttaccttttttctccccaaaatatttaatatcaaaccgaaagtacacagagtacagtcctggagaaaggaagagcatacttcaactagttagattacagggaggatttaaacactctaatt

SEQ ID NO: 83758 - DNA, 1033 bp, Homo sapiens
aatgaaattgaacaaaccagccaccgtagtcccttctaaagcgacgtggtctgcgggcatcagtgcccttcctctctggctatagctcttcggcatctgaagaaagttatcctaactattgggtgatccagatttgggcactgtctgctatgatgatgccagctggtcgggaaggaatataaagtataggctcaacccttccacagtcactgtactgggaattcaggcttttcctctctgttgatgtcaagaattaacctgtagataacattcttttttttttcttttttttttttttcaatttttccttgttcttgtcaaaggctgtgtcgcttaaaaccaaatcttgatagattcttcatctttatcactctctatgagaagtaaatatgatttaagtgaaccacagtgagaggcctgtcctcactacagcaaataagatgtgtcccaggtgacaagtccagtctccttttaacatggtgcccagaattccacatacctgagctttgggggctgatacaaagccactgcctctgatcccacggaatgacctgaatttactatcagttttgccacaatcagtgcagtttgaggatacgtagacccctgagatgaggcctgagatagatgttctgggaaaccccaaggaagctaaagtacctgccatggtttctttcatggcaggttgagtaagccaagctcctgagaatgattggtcacattgtctttgctgttaaggtttcttggtttacagatggtgaagttgcagacaagttagcaaaccaactgaattttaataaaggaagctttaggaaaatggatgaagatgcagttggaaaattaaagtcatgcttccttgatacatacctcaattctggcaacttctcacttggaattttccaaagtcagtttttggtaatcttgccatttgtattatctttatttatatagttctggttatgcttggtgtgtgccagctgttttgggagtgatgtttttccttatttctcttggctcctgttaagtgttaaat

SEQ ID NO: 83759 - DNA, 1084 bp, Homo sapiens
gctggacacggtggctcatacctgtaatcctagcaccttgggaggccaaggcaggaggattgcataagcccaggggttcaagaccagctgggcaacatggtaaaaccctcatctctacaaaaaataatcaaattagccaggcatggtggcgcacacctgtagtcctagctacttgggaggctgaggtgggagggtcacttgtgcccaggaggtcaaggctgcagtgagccctgattgcaccactgcactccagcctgggtgacagagtgagaccctgtctcaaacaaaacaaaacaaaacagaaaaaatacgtaaagtaattgagcacagaaagtcctattccatattcaggaagtctctgaaagtgacccctgctgactcacatccggtgtacactacatttgtaggactggaatatctggacatgctgaagaagatcagttagaatatttctgtaactctttattccctaggctgaaactttcatcaatggtacattcacattcatgccaggctgtgaactctgaagtctccttagctaaatccccatgatcctcagtctctagaagcagctatggttgggaccatcttttttcctttgatttgatgttcttaaagggggacaattaacagttctcacttttgtggaaatattagcatttgaccttaccttttacaaaatgcatataatatacagtacacatattccttcccactctctaatctcgttcttgaattccaaactggattttgccctctaccagaaaagtcagactgcatcaagatctctcccactagatctcaccctctttgttgaggattaagcaactatccagccctctctaagccagattgctcttgatgaatgtgtagtaagtggaacacagttgaaaggttataggtaattgtgcaactctgattcttatcaacttcatcttccttcatcctcctaggtaacagcttgcctgattgctgtggccaaaacagatggtgaagttcaagtacgcagagctgccatacatgtggttgtgctgctgcttcggggactcagccagaaagctactgaggtcagtccgtctctcgc

SEQ ID NO: 83760 - DNA, 1062 bp, Homo sapiens
aaattagccgggagtggtggtgggcgtctgtaatcccagctacttgggaggctgaggcaggagaattgcttgaacccaggaggcggaggttgcagtgagccgagatcatgccattgcactccaccctgggcaacaagagcaagactccatctcaaaaaaaaaagaaaaagaaaaaagaaaattaaagctgaaaagatgaggactcagtaccttgctgggattgctaagttataaatgttcaacctttgctagtgatgacataagggacagtgtagaaactctaacatttaaaactattccctttctgcctcttctgcaaaatcatttacatagatctacatgtgttagaatttggtttgttttcctcttctgcatcagatttacaatattttattttctgtaggctagcttttgctttactcttctgattgttatttaaaatggccaaaagtttctcatttaaacatttaatgtcacagaattttaggatgttagaagtggaagaggatttagaatatttaatttatatttcacagaaatgtccctggcacactaacttcatgagctgctcctttgaaataaggtcttcctggtcaaataagcttagaaaatgctgtatacaactagacattctcctcttggagactcagtacatgttagcctattaagaagtctgcgaagtcctgcagcaaaaaaaaaaaaacccacaatttcctaaattcatttaccaagaacccttttttcatcataagcaggccaagttccttgaaagatactttgggaaataatgcaaccgtcttattttatgaattaggtaactaaagctcatgaagagacaatagtttataattttccaaagttaatgccaggaagaattagcactcattagcaatgcaagttaccagttacagtaaccccgagtatctggggttacaggcgcctgccaccacgcccaactaatttttttgtattttttgtagagacggggtttcaccgtgttagccaggatggtctcgatctcctgacctcttgatccgcctgcccaggcctcccaaagtgctg

SEQ ID NO: 83761 - DNA, 1121 bp, Homo sapiens
gaggttgcagtgagccaagattgcgccactgcactccagcatgcgtgacagagcaagactctgtctcaaaaaataaaaataaaaataaaataaaatacagaaacgtatatttaacttagtcaactctacgcaaagactttgtaaggccatttaacaatggaaacatctagatcttgcctttaaaaggcttctggtctagtggggatgaataagaagatagtcacgtaaagacagacaatacagaatagaacatggtaaaggtcacagggagcagagagagagtgatgagacatcagagaaaagagaggccacattttaggaataggaaagttcactggagatggcgaatggaaatgatgggaaatagttaattcagcgggtaacaagcacatggtctgggcccagagtcccctgagcattccaccaagtagactgtgtctagcaccacgtgtcttggacttgctataagaagagagcaagagcctttccatctttcgatattcctgatcagcatggacactggggagtgaaggcaggaagtcaggggaaagggctacatagaacaagctccccaggccgacccttccccacagcgggcctccctctggccgcctgtgctccagctgtgccggccttctttcttttcttgcctgaacaaagctcctctcaaggcctttgcatatgctagtccctcagcctgggaggctattaatattttgcttcctcttcctaggactcttatacccttggcctccgggattctttccctaacccccgcacctaggtaagtcttcctgcccttcccggagttctgtttgtagcccctatcaggactgtaatgtaaatatttgttgtggggcaggctggtggtataaaaaataaacaaataaaaaataaaataaatatttattgtgtactttaaaaggttttcctctctagatggtaagtactattgacactgaggccatgttttgcctttttttcttttttcttttttgagaaagagtctcgctctgttgcccaggcttgagtgcagtggctctatctcagctcactgccaacctccgcctcctgggttcaagcgattcttgtgcctcagcctcccgagtagctgggattac

SEQ ID NO: 83762 - DNA, 1035 bp, Homo sapiens
tggtgtgtggtccagtgaaggtgtgtgtgtgtggtgggggtggctctagagactctgggagtgcagagcaggctgctttgttctccccagcgccaggtggctacctgtgtgtgtgataatacattagaaaaaccccacccaggagctctcctgagctgcctcctgctcttaaggtagacagtaaagacgaaatctgacatcatttaataaaccacttaaaggcccagtagctttcctagttccccagaagaggtgctcctgtgctccggcaccacacccactctgcaaaccactctctcctgaaatcagcagctcctgccctcagcctcctgcagctctgtgctggagttaggggctggccaactgactgattttttatttgcaataattgacctctctggaccttatttttcccttcttcaaagagggccattaacccagcttctttttcctctctcaaggaatggtatgggaatagagctattaatgtatttatgctttgagcttcttgcaaggaataactgttaaaaatgatacactgtaggccgggcgcagtggcttatgcctgtaatcctagcactttgggaggctgaggtgggcggatcacctgaggtcgggagttcgagaccagcctgaccaacatggagaaaccccgtctctactaaaaatacaaaattagccgggtgtggtggcacatgtctgtaatcccagctactcgggaggcagaggcaggagaaatgcctgaacccgggaggtggaggttgcggtgagccgagatcatgtcattgcactccagcctggacaacaagagtggaactccgtctcaaaaaaaaaaaaaaaaaaaaaaaagatacactgtaggctgggctcagtggctcatgcctataatcccagtactttgggaggtcaaggtgaactgatctcttgaggtcggaagttcaagaccagcctggccaacatggtgaaaccccatctctactaaaaaatacaaaaagtagctgtgtgtggtggcatgcgcctgtaatcccagctact

SEQ ID NO: 83763 - DNA, 1099 bp, Homo sapiens
cagtgacagcaagttcaaggatcagtgtttgaataaaagaaaactgcctggccgggtgtggtggctcacacctgtaatcccagcactttgggaggctgaggcgggtggatcacctgaggtcgggagtttgagaccagcctggccaacatggtgaaaccctgtctctactaaaaatacaaaaaattatccaggtgtggtggcaggcgcctgtaatcccagctacccaggaggctgaggcaggagaatcacttgaacccaggaagcagaggttgcagtgagccgagatcgtgccactgcattccagcctaggcaacaagagggcaactccatctcaaaagaaagaaagaaagaaaaatgtcttgtctctcttgcattatgaaccctggagccctgggctacctcctgcacacccagaggcatcacagacccctggagttgctgcagatgaggatatctctgatccttcctccttcccagatttgcaatctgcaacatcagagaaaataagcaggggcttggcaagggcaaaaatgagtgcatcagcctggtggagagcaaacgctccgtttagaggctcatctccctgtggagggagggcctcatgtggccaggtgctctgttgtcaagagaagccagaaatccagattttgtatgtgaaatctcctaatttttttaagcattggtaattcaaatgttgaaggaaacacacacacacacacacacacacacacacacacacacatgcacactccacaggccagacataatgtgtctgagtcatatccagccaactggctgcttgtaagtgacctgtttagaagcccaaggaatggagaagccagtttggaaggatcccttccgtcctcactcagcagcaacatgacttctctgggtgcaagtttgtctccctggggctgggccaggaccatctcatgcctagttagtttcttagactccaactgtgtcccaaggcttattgcccttctcacgccgccagctccacggagttttccaggtggtggggctggttcagcacaacctcacgagtccatgaaaacctccttaaccaacagtgggtccagatagaacctcatgagga

SEQ ID NO: 83764 - DNA, 1052 bp, Homo sapiens
gtgccgctttcccacgacccaaccgggaaggaacggaaaacccaagggatcccagtcggaccaggccctgctcttcctggtaccccagctaccttggcaaagtgtgcctgtagacaaaggcgcatccccggtgtagccggccctctccttccctgggcgggacccctcccccgcaggaattagaggcattacccaggttactacccccacccccaaatagaggcccccaaaatgtccctcagccagataccccacgtgcaatcaggcgctggtgcaggctgtggtcgaggttctcctgcccagacctggggcggggggctgtgtcaccccaagccggcagaggctgtggggtgatcctacagcctggaccgccgcctcctcatgcccttcgctcatccacgggagcccagcccaggcaaactaacgcgcactcggctttcaagggcacaaggttgggggcgctctcaagtccggctcccaggactacggaaggagaacccccagtcaaggacgcacgcttctccatcaagcctccgaaactttgaggggctgctggtgtgcagcgtctctcccgctgacaggtgcgccccgcggcagggccacacgcagcggcatggaaacttgtgcgcccaacggggctcctcctcttgtgcccggccgccctccgggcccctccaggccggccaggggaggggagcccactcccccggacacgtgctgccgcggcccggctaacccgcaggaacgtgggcgcctggtaccttggtgcccggacaggtgcaaacccccgggaggtcgtagaaggtgcgggggaggggtaccccagccagcctggagccccgcaccggcgtccgcctcctaattcattcacaaaacaggagccgccggggaggagggaggcgaggctggaagaggagaggatgcaggaagaaagggaggaggggtcagtggggagggggctgcaggaacggccgccgggaagcccggggctgccgccgcccccaacccgcctccccgcgccggacgcggcgcccgcagggctgggagctggc

SEQ ID NO: 83765 - DNA, 1055 bp, Homo sapiens
gcccatctcctaagagcaagggctgctcaaggatctgactttggagctacttgctgtaccaccggccaaaaaggaagtaccttctaggatgtatggcctcaaaatactgtgcccctcctgcagtatagactctgctccatacctgtttaagtgacttcccctcatgtggaagaagagcaagaaaggggttgggcagtgaggggggcgagctctttggtgtcagtgaaaactgccagcgaggaacctccccccaatactaggaagtcaagacacccatttcccaggcatatccaattggattaggaaaaagagtccagacccctccccacagatatccctggtctcatcttacctggacatctcccccgactccccctacttggggatcctcctccaggactcgaagcatctcgatggtgcaggctggatccagcacagtgtcagagtcgcacacctgcagagggagtgcgtcgtcagcccattctgacctcagacctgcacaccctgtcccccaccccactgccaggctgctcactgcctgagagacatgaccccttcacacatgactcacttccagcctctagctaagagatctgcgctaccagaaggtgccagaggtaaaatgaaagctagtaaaagtgtacagctaccagacttgacagccactaggctgagagggagaaaccctgaagacagtaggtgccaggcgtggagagagacatgcttagcactggacgcaaaaaattgctctggggtccttcggcagaagggaaacgtcactgaaatcagatggcaggcacagtagggtagcccaggactaacaggctgcatatggccttaagtgaccccacagaattaaccacaggggtccccgtgtcagcctctgaccccttggacaacctgcagcccactggtggttaccagactacctacttgcaggcacctctatgagaccagtaataaggctgctggcctctgcgccctcaacagactcccttggccgagcctctcggaccagggcacggtatggctgagggctccccctggaggctgct

SEQ ID NO: 83766 - DNA, 1240 bp, Homo sapiens
tcacacctcagcaaaagccaagctgtactgctccggcttcttcccacatcgccgggcgatgatggccagatatagcatgaggagggccacccagtagcagccatacagtatagccccagagacaaggaaggctagctctgtctcactgaacaggtcctggcaataagctgtgtaggccagccctcccaggagaactgccacccagatggacacaggaatgaggccaatgaagttcaccacaatggtttttcggccagaggtgccccagccagatttgttgatggtagcaatggcaaagatcttggccggcagaaggctggacatatagaggagggagtagagggacatgaagatcatctctgcattgccccgaaggaagcaggcgtaggtggccttgataatgcccaccagctgcaccgtcagcaggaagaggagaatgttccagatgcggccccggtagaaaagctgtataaccgtggcaatgaggaagaaggggaagaaacccgtgaccactgactcgtaggtcatccagaggtggtgcttatggaaccacagagagttgtagagccactcccggaagtaagacttgctccagcgggtttgctggttgagccaccggaggtacttagtgggggtctctgtgaggcacttggagcgcgcggtatacttagttcggtagccaaggctcaggactcggttggtgaggtgccggtcatccccgaagctgcacttgctgcctaggaacttctgatggtaccagtcctccaggaactgctggaggaggctgttgcggtacatgcccaagggcccactaatacactgcacacagccaaagtaggactggcaggcccgctccacgttgaaggccatccagtaccgcacgctgctcaggaaggaaatccatgagtcgtacttgttgaggatctgcaagggaatagagatgctgggcctcctaaggttgcacgtccggaggacagacatcagagaccacgaggcctccttaccatggcttctgtggcccgctgcttagattcctggccatcggttcctttggagctgggaaacctgaggctcagaggagccaaccacacacaatccctgtccccagcaccagctctacctccctactgtgtcatcttatctgcagagattttccccactaagtggctctagcagtcaaagccaccttcggtctcaggaggcagcctgtggtggtggcagagaagggggcttgggaaga

SEQ ID NO: 83767 - DNA, 1864 bp, Homo sapiens
tgccttttctcagtcttctggcacattggcatcaaacccagctaccttccaaaggtccgctggcctccagggctcaaatccaaccattttcccaagagcctctgggccacttggccccaacccagctaacttcccaagggccactggcctgcagggtccaagtccaactaccttcccaaggtctactggcccattaggccctggtcaagttactttccccaggccagctgccgggcatctgggcccttctccagctggccctgtgggtatcaacccagctcctttcacaaggccaactgggaccctgggtctcaacccagcttcctttccaaggatgaatggccctgcaggcaagagtttcgtcccatttcctagagtggggagcctccctggcacaaacccagctgctttccccagaccagggggtccaatggctgcaatgtacccaaatggaatgttgcccccttaaacaccattttccctccaggaccaccttggtttctaggcactgtggttcttggcaggggctgtcttaggtaaaagggtagttgtggagctacagtctgaagaacatagcttgggctcaagttcaaatgagccatctttttcctttgcgtttttcttgactgaaggtgagatgttatttgtggcatgtgaactgtggcaggtgggaataatcctgcccttgagagaaaggatctccagcctcccagaagcctgctgtgctttcgtcccacagctttctgcccattgtttcttactagtttcttgaattgttcttgtggacttttcctcagggatacattggcctgcaggtcccagttcacatgtagtcccctgctcaccattggagaatcagctcactgctctctagaaacgtggcgttggtgaacggaccatgcttccgtagctctgacctgggcagcttggacctggtcatcctctactgccatacctttccctgggggcttgaacacagaacagggagatggacaaccacttcaaagaaagacccaccgaatgcagtttctgcttgactgactgggcctgcagctcccttctcctgggacttagaggtggccagatttaaggcccctctactcatccaactccctcttcactggtactcccaatcaatcaaagaacctcaaaatttaaactgatgtggatgggaatatgggaattagggtgggggtgggggatgaagggaagaaatcactgtgctttgttcggcctggtgtgcaaggatggttggtggttttcctgcattgtatcttttcttactgtttctttaataaatgggatgagagggctgctggtgtcactgtgttttgttacctgtttcatagggaaggaagtttcctctgcttttcattgtttcagcttggctacagtcttacatcatgtcggctaaaatgcttttgctccaagaggaagcaagctttggtttttagtcttagcaagggcccattcatctgccagttagttatttcaccaaagaccctctacactaaaagttaagcccccatgggtgtagttaccaggatggacatattgcccaggtcttgagtcccacctgactaaactttctattttaagtccctctttggaaactggaataaagagctagctttcattaaatacaaagtagtagtttcgagataaccggcatatgtgagaatctttattttgacaaataagtgcagtataaaaaacttgacctgaaaattaaaaaaaaaaaaaaaagcaggtaaaaataaatatgtttacaaattattgtagaaacaatacaaaagaggatttgaattctcaatgaggaaaaaccaaaatgcgtccaattgtataaaggctcttcccttgcaag

SEQ ID NO: 83768 - DNA, 1368 bp, Homo sapiens
atgggtgctgatggagctacagggggagatcgaggctcgctacagcactggattagctggaaacctcctgggagacctacattacaccactgaggtgagggggcttttctttccctgcctaatgcctcaggaaagcaagctacaccaaggtggtgctcccaggacccagagtgaggactgcctcaggtttgttattcaaggcctagctaatctgcgatgctctctgcttgttctccccctacctctgcagtagcagggaaatttaattttggggaatctggaaagctcacatttctgaaagtggaaattctcctatgtggggctagaaagtaaaaagggcacatgggtgggtggtccagtgtggctgctcaacaatggcagagccagaccagggattggaggtgccagcatagcctgccaagagcagctttaggaggcgcctgagtgttatggccttgccccggaacctcaggaatctcgttcttgttctgccaaagggaatccctgtgctgatcgtggggcatcatatcctgtatgggaaaatcatccacctggagaaaccttttgcagtccttgtcaaacacactcctggggatcaggactgtgatgagcttggccgcgagactggcacccggtacctggtgacagcactcatcaaagacaagatccttttcaaaacccgccccaagcccattatcaccagcgtccccaagaaagtatgaaagaacctcggattttccctagagagcggccaactccttggactcgtgctccgctgccacctcgaggacggctcgacggttccctgggaccacaggggggtcctgttctgaacacaggccacccactgggtgtgaactcggatcccttccttatggcggccggttctcttggtggaaatctgaccccatttccaaggaacccatctccttttccagcttcatcaggctcattggcttcaaatccagcacctttcccggctggtgctcgtgacccaagtatggcttcttttccaagagggatgaatcccactggcacaggtgcagtttctttcccaaggcctggtggcctcttggggccaggcccaggcccaggccccaccctaaaccctaggacaggggctctgccaggcccagggcctctgtctaaccccaggttagggggtctcccaggaccaggtcctatgtccaacccaagggcaggtggtctcctgggagcaggtcctgaccccagaggtggtggtcccatgggccctggatctggacctaacctgagagccggtgttctgttaacctctgggaatggtcctcccaatcctaggccagttggcctgggcccaggaccaaaccccaatctgagatcaggctt

SEQ ID NO: 83769 - DNA, 1577 bp, Homo sapiens
tgggccacagaactatttgcaggagcattgctagatgtctggtaatgccatagatgtacacaggcagagcctcctgcatcagtgtgtaaaggtgtgcattgttattgaggcatgggggattggtatgcaagtacagctgtgccatcccagcaaccaaatgtgttttcgacaccattgttctgaattcctgttcagaacaggagactgtccaggaaatggagaatgcactgaaaatatttcggcatttttctcaagcacatggtcacagtgcttaacgattgattttggttgtcaggaagtaggctctgtctccttccctgccttgatcttcctagaatataccgtgtacctatgtgaacaccttattgcttctctaaaaccacctgtattttactgtcacttgtacccatccaggaaaatatactacatcatcttcaaaagcatatttgcaagagccccttctctgtgtgcattattgagcctttttttgattcgtggctaaaatgtaccattccttaaattgtcaaaattatgggtcagaatgctgattttcttatctcactgtctcaaaaaacttagttcatctcaatagaacttggggtctttaaagcacctcagcagatgttatatttggtctttgcaatagtttcataggacataatctaggtgtcatagtcacaaagtgacttgttcttgactacacagtaaagaggtccacacttacaggcaggagagctaaatttaggccttctgattttaaattgttatccttcttcaagaaaccttataaaaggatttttaaagtgcttttagttctgttgagagtagtggtggggcctcttttggaaatgtttgggttctgagcttgggtattaccccttttccagtggtcccacaatctgtgctggtgcagaaggtctgactcaattcaaggatgctctcttgattccatattgcccttctgaccagctattgcatatactccatgcctgcctgatgccttgattctttttcgttctcattaatactttttttcctttgggaaggcagaattgtgtagtgattatgagtgtagatagtcagatggcccagatttctactctgtcacatagcagctgtgtgtgtccaacatacaagcaagtgacttcatctgtgtgtgcctcagtagcctgatctgcaaaataggaataaatacctatatcatagacttgtgatgatggttgaatgagaaaccaccaatatatatgcacagtaaaaattccacagtaaaaattcaaaacatgttagctgctacttatatttgaatttaaaaagtctagtgagttggccgggcgcaatgactcaagcctgtaatctcagtacttttggagggcaacgcgggcgtatcacctgaggttgggagttcgagaccagcctgaccaacatggagaagccccgtctctattaaaaatacaaaattagccgggcatggtggcacatgcctataatcctagctactcgggaggctgaggcatgagaattgcttgaattcgggaggtggaggttgcggtgagccgagatcgcgccattgcactcca

SEQ ID NO: 83770 - DNA, 1032 bp, Homo sapiens
aacagcctttcaaaataggtgtttatgcccagtgtattgttaggaaaacacgtgaggttaaactacccactgtcacatatgggataggtggcaaaatcacagaatccaggtctgtatgacaagtgagtgcttcactatattcgtaaacaaagtatccaccctgggatcaaaaaacaaaagctcaataaatgccaactgttggcctagcaaaaaatagaaaattgtgaatatttacactctgaaataattgatttcaccccagtttagaaaagaatgtttaagggttgagaatttaaaggcttggtttcctgtttgaaaaaaaaacaaaatttctaaaacgttgtttagctttattaaaatttagttatttgtattgaggttaaaccgttgagtcaaagcctcttttttgctataagccatatgttcggtttaattggatacatatcacactttcttctgccacattttattttgaaggattatgaggatcattgctcaggctgttctgttctctgtaagacagtaatcttttaacaatttaatatttaacaattcagagaccagagggtaagaattaaattctgtggaagattaaaatgaatacttgacaaagaatgtcctctattctcttgactttcacattcaggagcagagggtaaagctttgcgtcctagaggtggcattgagtagatttttctaaaagtttcaaaaactgaaacatctcaattgggtatgataaaaagcaagctgcttctttgtttttagctgcctaccccacagatataatactttggtggcaagttacaaggtctttccataggttactttgccattttgtaagagatgctgtgagaacgaggctaatatttgtaaagcaagggaagttatcatacagaggtgctttacaggagggggctgtgtgaggagaactgcaagaggggccagattgtggaggggttagggttcatatcccagctctccacttaagtagctgtgtgaccagttaacatttagctcctctaagcctgtttc

SEQ ID NO: 83771 - DNA, 1092 bp, Homo sapiens
ttatacctacttagttcctttttcgtcaagcaggtctaagcataaaatgccttgatagctacgaaaacttttgggttgggtgcagtggctcacgcctataatcccaggactttgggaggccaaggctcactgcagcctccgcctcccaggctcaaacaatcctcccccgtcagcctccgtagtagctgggactataagtgtgtgccaccacacccggctactttttatattttttgtagagacagtgtctcactctgtcgtccaggctggaatgcagttcaaaccttttctgctgaaaatgttttgccgaactagtcctagtaaaagaaacaaatttaactgtataaaagtaattagaatttgagctgaaaaaatgaaaatgtcattaggcatgatctgatagcacaaaaccccacactagttatttatggggaagttgtttttaccatgttgcctgtgaccactcagtaccggtacctgatgaatttgtggtaatgttgagaagttatggtgtttctgcagtttttcccaggtcatgagtctcgggctacagaagctttgtgctgggcagaaggacagcgactctttagtgctgggctcaatggcgagattatggagtatgatttacaggcgttaaacatcaagtatgctatggatgcctttggaggacctatttggagcatggctgccagccccagtggctctcaacttttggttagtaagcaactattggtaattcaaaccaaaatttctctcgtgcctgctcagactttcttccctgtgctcataggagagtaacgatatattatggcatgtggcaaccccaactataagattggaattgatagtgaagattttaaaaatccccagcattctttttgctactagtctggaccttgttgattcatttatgaaatgagaggattacatcagttcaacatttcccaaactgtgttctgtggaatttggagatgtagaggtttttttgttttggtttgttttgtgttttatggtaaatttcatttcacaaatacagcatatttaatcctgctgtaaattcacaatgcacatcggtacatgaagagttctgag

SEQ ID NO: 83772 - DNA, 2475 bp, Homo sapiens
tctctatcggataggatctcccatttctgtgttattcactttcttggtttaccctttggtggatcctgagtaagagtgcatgagaaagaattctaggttggaaattcttttcccttagaattctgaagccctggctccgctgtcttccagctcctcgtattattagcaagtaagctgccattctgagagttatccctttgtgtaggacctgttttatttttttttcccccaggagcttttaggatgttttatccttactgttatgaaatgtaataattaggtttcttggtatgtggatcaattaattgttctggacacctggtaggttcttctaatccaatacccacgtccttcagttctggggggaaattcttttactcttatttttcatttctttgtctttttactatgctttctgggagagtttgtcttttttatctttgaatcctctattgagtttttcatttttgacatttccagagttcttttttttcgtgaatcttcttttttacagcattctctttatgtttcattatacagaaactcttctctttctttttttattttattttattttattattattatactttaagttttagggtacatgtgcacaatgtgcaggttagttacatatgtatacatgtgccatgctggtgtgctgcacccattaactcgtcatttagcgttaggtatatctcctaatgctatccctcccccctcccctcaccccgaaactcttctctaaggctattaataattgtcaagtgtttttcactctgcctgtttcttccctgttattcatttatttgtttctgttagtccgtttggcctctgcctttcatgttaaaggctttcctcatgtctggtgatcatctcatcactgcatcatgtggcttactgagcttgggtttcactgaagaatgatctggctggactgcttatttggggtagccctgaagccagaatcttcagatcttttcttttgtgtcagttatgttcctcagaaatggtttttcattctcctgcctggtgagtattggcctggctatcagcattctaaggggaaaaaaaagaatggtgttctcaacattcagtgagaaatgttcacttaatcctggttttcatatactgcttctgcctgatagccctcctcagacaacgtctccagtattctgctgacgtgcattttgggagcttcccaccttcttagtcagggcatggctatctgaggggtctaccagctgttaacggatccctctttgaagccccacttactccttttctagaatatctggggtccccaattcctgagtccaaggattccatagtataaatcaggtggcttcttggctttcctctctgccgacctgggacttagtttcagggctctgctaagtcagtgccactacttgtctgctttccagttccccaaattttgtcactgatctctccctttcctgtgggattttggaaaagagcagagtgtaatgtgtgtgtgcagttgaccagctttaagtgaatgtcccaaatgtctctttccatttcaccccaccaaaggggtttctgttctcattctcttccctcccttcctccctcccttgcaccttctatccctttcctgttaggctctcccaacaccccttctcttcaggtaaccattttggagttccgagatcaggttcaccagaactaccatttataggctgactgttcagtcagctcacctaccatatcatgcttaccgcaggcgggtttgttatgttgtttcgtagagatgaggtctcacttcgttgcctaggctggccttaaactccagggctcaagcagtccttccactttggccgcaggcagattttgaagacagagaaataagtaccatttgaaggtgtgcttttctgatttttcaggcagcgctgttcataagatgattgtggacaggcagtatatgggcgtgtctaagcggaagtgcatcgtgtggggtgtcgccttcttgtccgatggcactatcataagtgtggactctgctgggaaggtgcagttctgggactcagccactgggacgcttgtgaagagccatctcatcgctaatgctgacgtgcagtccattgctgtagctgacgtgagtacagtccctgtttagagtggttgatgtacacccttgtggggtgagttgagaaagcagccttagtgacgtgccatgaacactggttcctgatcctgatgttgtactggaggaagatgagtttaggaaaatgcatctgaaaacccacattgtttccatagtacctaacaattggttagagaatacaggatactccaagagattagttagcagggagattttctttagacactgctcacttccagttcgtcttgtttgattgtagatagggcacagcagcctagaagaatctggagaagcgctatgtttatacctttgtatttatgcatttatttttaatttaattaaaa

SEQ ID NO: 83773 - DNA, 1621 bp, Homo sapiens
ctggtctttcccagtgaacctcatctgggcttctgtatttaccaccacacagctaggttagatgtcctgtctccttatttttcagtacatactgtgtttagccgtgttaaaattcttggcacactgaagtctaattgctgatttaattctgtgtcacccctttagaagcatgttgagagcagtagctatgttttaattcatcatcgtcttcatagatctcagggcagtgcctggcatatgggagtacttaggaaatatttatcaaggaaatggatttcagcagtaaaaaatgtgctaaggtggtgctactgtatctggtactaaggcagtagatgaccctgacttatttttttaacttcttgattcttggatatagcgatgtctcatctcctgttctaaaaagaggcagcttctcctcttccagtttgctcatcacttagaactttggcgactgggatccacagttgcaacaggtaagatgggagcacgtttttttcaataagaaaactggagagagaagccagaaatcagaattgcggttggaattctgcttatagaaaaactgaagtagacttttgtgtccattttaactaatggttttcccacccattagataaagcaaataagctgtttagagtattagaatctttagcaggatattggatcatctcttaaaagtttatggctctaggtggtgcgctgcagggtgtagtcaaggtaagggttgaagaatcgtagtttgcgctagcttaactgaggtgaaaacaggctgttgaaaaacaacaagatttaatgatgggtaatgataatcctgtagaaaaagaagatcacatggatcttattggagtgacagcctagtggcctttttgacttattaaggaaatgtttgagtcctctcatttgcagtggattaaaatcgaggccacacaaactccacctgtgtccctggctatggactagagcttcagggaattagtgatgtatcagaggatagaagcaaaagaagtactcactgctttctcttcatatacccctcaaaaattgtgagcttactcagtgagcttgtatttttctgatttcccactgatagagattccatttttccaaggagtaactttttagaagaaaaatgtacaaatactctttctttcataagaaaaatctcagggaagtttcttgtttcaggcaagaatggggatactcttccactctctaaaaatgcagatcatttactgcacctaaagacaaaggtaaggaagtttgtttaggctctgaattctagagcctgaattctaggctcataattcccattctgaattttgaggttacttagtttgcatcataaattgtataaattctaaaactatttgaatgaaggactgtgtcaccaggactgggtttcctgtgattataagtaggacgttgaggatttattagatggatgtatacaggaaataggtttctcttcttttgatattattatgaaaataatgtgcttttatttatttatttatttatttatttatttatttatttttgagacggagtttcactcttgttgcccaagctggagtgcaatggcaccacctcagctcaccgaaacctccgcctcctgggttca

SEQ ID NO: 83774 - DNA, 1048 bp, Homo sapiens
ctttttgtatttttagtagagatggggtttcaccacgttggccaggctgtcctgaactcctgacctcaggtgatccaccccctcagcctcccaaagtgctgggatcacaggcatgagacactgcgcccggcccacacccagcctttatttccattttgaaattttgaggtatgttcttagagggatagggtaatgccctacaggcaataaaattaaagcttttctgtttagtggtttcacgtgcgacttagttatttccttgatagagaagtgaatatttagtaaagagatgaaagggggatgtatagattactggagagaaaccagtgttctgtgccgagtcagttggcttacttagagacaggaagcattaatgtaccttaagcctagctgtgattgtttctgatgggctgtaggtctcccttctctcactggcttttattattggttcacccaaaggtttccaaaatgccagcattccttcgctctgcccttcagattttgttttctgaagattcaacaaagctctttgtagcatcaaatcaaggagctctgcatattgttcagctgtcaggaggaagcttcaagcacctgcatgctttccagcctcagtcaggtgggaatctggtaactggccatggggagacttgtcgtgtctaagatgtaacttttttgcttttaagcctccatgtcgggggttccctcatgttcctcctaccctgcagatacactcactcacatgtttgctgtttcaagtaggaggagatagctggcagatgaagactctcgatgagatctgcaatgttcttcacacctactcttttctcactgggtttttgattccttatttggggccagagaaatttcatcatccttagtttgttagcagaacaagaagaaagttaaagtcatttgcaatcctgacacccagaaatagctaccattaatattttggtattttctaatatgtatttgtatataagtattttgtgggcatgttgccttttttggttgtttgttcataaaaaggtacaatcatagatggctg

SEQ ID NO: 83775 - DNA, 1087 bp, Homo sapiens
cattcggaccagcaggtaagggagattccagtgctttctattcccttcctgctggatagtaacctagaagctggaatattgggcagttgcggggagcttttttttgaaggtgttggaggatataaggtagttttctcctgtgtgaagtaaagcttccttgccggtctgggctcatcataggccagcagtatgcattggtttgatgggatgcaatttaaatggagaagcactaagattctagagtaaagaatcacaagagggaggaggaattttgaagtactcattttcctgattgttttagaggagagatgacatgggcttgggtattaaactggatatgggatggaataagattttgagagttgaaagtgactaaaagattgtatcattcacctttacgcttgccgatgaggaaatcaagccctaataagatcaggtacctaatctcagccaaaattagaacctaatctacttttttctataccaatttgtaaggagattgtgattataaggagatctttaaaaaaaaaaaaacctgggctgcggaatatattaggaagttatcaataattatattaggaagttatcaataattcatctgtaaaattggagatgttaatatctacctcactgagctgttgggaagattaaatgtaatccaggaagcacatttaagtagagtgctaggcaaatgatgcttactgctttgatggtcagtttgtttttttttttttttttttgagacagagtctcgctctgtcgcccaggctggagtgcagtggtgcgatctccgatcactgcaagctccgccttccgggttcatgtcatcctcctgcctcagcctcccgagtagctggactacaggcgcccgccaccatgcccggctaattttttgtatttttagtagagatggagtttcaccatgttagccaggatggtctcgatctcctgaccttgtgatccgcccgcctcggcctcccaaagtgctgggattacaggcttgagccaccgcgcccggctgatggtcagtttttacactcacacatgcacacacacactgtccaaaaagtgaaatctctcagtttta

SEQ ID NO: 83776 - DNA, 1036 bp, Homo sapiens
aagtacagggcctcaaaaggagccggagtacagggctaagcgctcagtacacagggtacgaaccaatcaatgcaagaatgaacgtgccaccgggtcttgcaggcttgagaagtgtttctccaagctgattttgctttccgtgcccgggcagctcccgtgaattgcacggtagaggtcaggagtttctggggggtccgtggggagccaatggaaggatgaggagaaatgcagtcccaccgcattcgggttgcccacgtccggcgagaggcgagtgatcggacaacttctgcacctcccggaagcggctgcgccggccccgcccctccagaggcaggcgtggcctcatgaataatgaatcgtgcgggggaggggccgggcccgcccctccgggcgggaagagggaagcgccgaggctgcctgactggaatgagggtagctgcggcgactgcggcggctggagcggggccggccatggcggtgtggacgcgggccaccaaagcggggctggtggagctgctcctgagggagcgctgggtccgagtggtggccgagctgagcggggagagcctgagcctgacgggcgacgccgccgcggccgagctggagcccgctctgggacccgcggccgccgccttcaacggcctcccaaacggcggcggcgcgggcgactcgctgcccgggagcccaagccgcggcctggggcccccgagcccgccggcgccgcctcggggccccgcgggtgaggcgggcgcgtcgccgcccgtgcgccgggtgcgggtggtgaagcaagaggcgggcggcctgggcatcagcatcaagggcggccgcgagaaccggatgccgatcctcatctccaagatcttccccgggctggctgccgaccagagccgggcgctgcggctgggcgacgccatcctgtcggtgaacggcaccgacctgcgccaggccacccacgaccaggccgtgcaggcgctgaagcgcgcgggcaaggaggtgctgctggagggtgagcggggccgggcgggagggtgggcag

SEQ ID NO: 83777 - DNA, 1346 bp, Homo sapiens
gggaatttaacccatcattggctctcaacaataaccaaaggagatcatagcatttcattgaagccagaaagctgaaacagcaagtctgtgtggttaacgaaccttgtttaacagtggaggctcacgtgtttgaacatttactgccaactagagttttgccccttttgcaagtctgctgccagcttcctaccactcacaggcgcgctgcttcaagactcttggggtttttgtaagaaacttgaaatggcaaatcacaagataggtttcaataaccaggattattctttacgttaagttatatgtatgtgatctgtaagttggatctttcatgatgaatttgaactaaggcaaaaataaaattcctctcctctaaggactcatgcatgttggaggtgatagagtattgtaaattataaacgaaaagtcagctgctttcttcagaaatttttgagcggtcagctttctttcactggtgattatggctagctgtgttgaaaagaatataaaagaagatgctgtccctacttggtctctagttggagaaatgatagaaaaatgcaaaacaacttatagggaggaaaggaatgaagttggtgattacgtcgtgaaactatacttaaatgccaaaggaatgcaaagttagaaaatagttagtggagatggaattagccagggaggactttttcccgaagctgaatcttgagccaggtctccaagaagtgatggacataggcaggcagggatgagtcaggagggtattcctggcagaggaaggacagaagggaagggctgggggctgctggtgaagaaggaccaatcgtcaaaccgagaggccagaagtccaacttggcacaatggattttcactttcttataaatcagcttgtgaatatttggaaaaatactgatttaccagaaatgatttcatgtacaccagttgtgaagttccagtgtcccacctttataatatcctatttataaaccttatttatattgcatgtctaggtggggctagacattgctcggaaattagtgttaatagaaggagtaaaattatagattgtggtttgggtgtgtgtccaaaaaaaactgttactctaaacgtgtaccttgaagttggtctagctaagcatttggttataaattcttacatccagaatattgaatttagtactatttatgtagtcctcagttgtgatgggcagacagttgaaccttgtacaccatatttagaaaaaaaacacaaaaaaccttttggccaggcgtggtggctcatgcctataatcccagcactttgggaggccaaggtgggcagatcacctgaggtcaggagaacatgacgaaacc

SEQ ID NO: 83778 - DNA, 1057 bp, Homo sapiens
cttgggctcaggtgatcctcttgccttaacctctggagtagttgggattacaggcatgaactaattactgttcctggtttgcatttttttttttttttagtaagaattattttggttgcagaaacccaaaaccaactaatttaagcagaagtggaatgtattgccttatgtaactcctgagaccgggggtggatctaggtttaggttcagtgggatccaaaggctcaaattatcttggctgcaacatctcctgctgtggagggtctaattctgtatagtcagctaagatggtgcctgcagctctaggaacatattgccttaacttaataactaacccctgtaagaaaaactggagggttcttttaccactcacattatcagtttggagataggaaggactccaatagttctgctttgccagttcctcggacctatcactattaccaaaatgatggagactgcaatctagacctgtgtcacgtgcccatcccttgtgtattgaggttggcagcctcaccagactataaaatctggagtggggtggttgctaggttaacttatgtacactataacaggctatagggcttaaaataattttggccgggcatgttggctcacacctgtaatcccagcactttgggaggtccaggtggaatcacttcagcctagtagttcaagaccagcctgcacaacatggcgagaccctgtctctacaaaacatgtaaaaaattagccaggtgaggtggcgagtgcctgtggtcccagctacttgggaggctgaggtgggaggatcacttgagctcgggagattgaggctgcagtgagccatgtttgagccactatactccagcttgggcaatggagcaagaccctgtctcaaaaagagaaaaaacaaaagtggctaagttgtacatttttaaaaacaaaaggaatcaaaatagataataatgacacttatggagagcttactctgctaagctctttatgatcacaactttgtttttcttttctttttcttttttttttttttttgagatggggtttggccctgtcaccc

SEQ ID NO: 83779 - DNA, 1009 bp, Homo sapiens
acatggaataggtgtgggtggtgggaaggatggagggcatgtttagaggggaaaggcatgtctagagagcaaagactggaacaagcagtgatgttcaaacttcagcaaacagatttgatgaaatagcccattttcaaggctctgtacccctttttaaaaatagtttaaatattttattagtaatataactgacttctgaaatatcttgtaataattgtattcattatctgcaaactgttttgtaatgtaaaaattaatttttcttttgtaattattctagccaaacttttttgttactgcttttacttttgatatattactatgttattttacttttggaaaacaccagttttaacaaagtagcattctccaaagtatattcatctttacaagtaaatctttgcccaaatgaaacaaaatctgttttactgaacactaaatgtctttgatttgcctcattttgctgtaattgttggccagtaaaagtatttacattgttagctctgttttcattgcagtaagggatggcaacattttagaaaaccactagtagtgtagataatttttttgagtactatggattctgtattgtctcttcaaagattattaattacattctaggataaaaatacatattttttacaatgaacacaaagtaattgaaaaaattaaactggctctgggcaaatacaaattctgctaaaaacagcaatgaaagactaaagtgaattctggaaaccattcttcaccagagatgttttgatattgatctctgttgtcctttacaatgtaacagagttgattttttttttttttttttttggggggtaggggaacagagcctcgctctgtcgcctaggctggagtgcagtggcaatctcagctcactgcaacctccacctcgcgggttcaagcgattctcctgcctcagcctcctgagtagctgggactacagtcctacaccaccacgcccagctagttttttgtacttttggtaagacagggtttc

SEQ ID NO: 83780 - DNA, 3078 bp, Homo sapiens
aacattcaggaaagccataggaaaacagcatcctggcttaaaagttaccacctgaaataataaatattacatgtgaacagatgcttatttaatggattttgatggcttctttaccttttatttaagcaccttgtatattgctagcattgaaatagtattaatgtcactgaactagaaggactcctcattaacaccaataaatgggagagaatgcactaagccaaaaagttgccatcttataacttgtaaaactctcttaaatgtagatctgtatttaaagcagcaggccaacttatttatgtgatgttgatgtggtgctgaataggaaaaaacatagcaaaatggaaaggattagggaggcggggacataaaatcctttaatactgcttagtaaggtattttatccatttgaagaaatctaaaattctttatgaaagagatgtgtgtttaaaattgagggtgggtaacgttgctaaatcattgggtgttagccaggtttggatacagtgtacagctgaaaggaatgttaattttgttagattattgtcaacaatacttctcagaaaacaaaacaaaaagcccagagcaaaccaaaaaaccaaaaatgtttgagaaattattctcagattgtcagaaaaaagagtttgaatagttattttagatttcgtatttggagggtaataattttgagtttggttaaaacatgagaattcaatagtattattattattttttttgagtgcctctaaaattgttaattgtcctcttcttctgtgcttcatacctggatggaaaattgcttcaggatatcagtctgcatgtctggagaaacgaatgctgcttagtttaggagcagaccagtgaagcaacacaagctgatagggccctgactcattctccttgtttacacctgatgtttagctcatctgcacctataatttcagccattacctgagtgtctgtgatgtttagctgtacctttttgtccccagcctttcagttatcccttcacatttaaccgtgactgaggcaaacttctttgcagtcacttactgtttaatgaaggggctagagtttctggccctgtctcctctgttctctgacttggaggctttctcattgttcatgtgcttcctaactttcatcttaaggcttataaagaaaacaaggagtaactcctcacatgtccctagttagtaggcattactttgaacaaacatacattcttagtttataatggaaaatagtatggtagttactattcatactaaatgtaggctgtgaactttatgaactgttagaatttttttttttcttttttgagatagggtttcactctgttacccaggctggaatgcagtggcatgatcatatcttactgcagcctccatctcccaggctcaggtgatcctcccacctcagcctcctgagtagctgggattacagacacacactaccacattcagtaattttttttttattttttatttttttgagacgacgtctcgctctgtctcccaggctggagtgcagtggcatgatcttggttcactgcaacctctgcctcccgggttcaagcaattctcgtgcttcagcctcccaggtagctgagactacaggcatgtgccaccacgcctggctaatttttgtatttttagtagagatggggtttcgccatgttggccaggctggtctcgacctcctggcctcaagtgatctgcccgcctcagcctcccaaagtattgggattataggcgtgacccagcacgcctggccacatctgataaattttgtattttttgtagatacagggttttgccatgtttcccaggctcatcttgaactcctggccttaactgatcctcctaccttagcctcccaaagttctaggattaaaggtgtgagccactgtgcacagcctgttttctttttttttgagacagagtctcgctcttgttgcccaggctagagctcaggggcgcgatctcagctcactgcaacctccatctcccggattcaagcaattctcctgcctcagcctcctagtagctgggattacaggcgcccaccaccacgcctggctaatttttgtacttttagtagaaatggggttttgccgtgttggctaggctggtctcgaactcctgacctcaggtgatctgcccacctcagcctcccaaagtgctgggattacaggcgtgagccactgcgcccagcgtttttgttattgttgttttgttttgtttattttaagagacagggtctcactctgtctcctgggctggagtgcactggcatgattatagctcactgtaactagttttgacctcctgaccttaagcaatcctcctgccttagcctctcgagtagctggaattagtggtacatgtcaccatgcctggctaattttttaattgttttgcagagacaggatattgctctgttgcccaggcttgccttgaatttctggcctcaagtgatcctcctacctaagcctcccaaagtgctgggattacagactgagccactgtgtgtggttctggaatttttacagatagtattaacctttggatttttgcctttcttttccatttaaaacagtttccataaaccctccctttcccttttttattgcagtgggaatccattgcttgtttattaataataataataattcttatttttgaggcggagtttcactcttcttgcccaggctggagtgcaatggcacgatctcagctcactgcaacctccgcctcccaggttcaagcgttctcctgcctcagcctcccaattattattattatttctgagatggagtattgctctgtcgcccaggctggagcgtagtggcgcgatcccggcttactgcaacctccacctcccaggttcaagcaattctcctgcctcagcctcccaaggagctggaattacaggcacccgccaccacgcctggctaatttttgtatttttagtggagccggagtttcaccatgttggccaggctggtctcgaacttctgacctcaagcgatccaccagcctcagtttcccaaatgctgggattacaggcgtgagc

SEQ ID NO: 83781 - DNA, 1075 bp, Homo sapiens
tttgagacttgctctgtcacccaggctggagtgcagtggtgcgatctcagcttactgcaaccaccacctcctgggttcaagcaattctcctgcctcagccttccaagtagctaggactacaggcacgcgccaccacgcttggcaaatttttttttttttttttttttttaattatactctaagttttagggtacatgtgcacattgtgcagtagagacggggtttcaccacgttggccaggctggtctcaaactcttgaccttgtgattcgcccacctcagcctcccaaaatgctgggattacaggtgtgagccaccttgcccagcccaacagaattcatatttaacagatacctcttgtggccccttgtaaggcaagaataaaggtcttcagttttagtttctttccttccctctcttgtccattgatccctggatttgtgttctggcatcctgtttagtgggcatgacataatggctttttcttctattttctttcccattttctctttccttcattaggcatttccaacctgcttctttcatatttctcacatatggccccctagtgatcccagacaaagaagtctaaggttctggtaactttagatggatttgaaagaggaaaaggtggaatagataacttttcctgaaataaaacagaagtttctaataatgcttcttaaaaatacttaaatgcaaccaatgtattattaaaaataacccactgtacgttcatgaaatcctttccattgaggtcctatactcagctatgtgcttgttaggaagtgatgggaatgtaggaactctttgctcccacttttttgttgttgttgtcaaaggcaaggctgggccttgctctgtctaccctggctggagtgcagtggtgcgatcatagctcacagcatcctctaactcctgggctcaggagattttcccgccttagcctcccaagaaacgagaattacaggagcgtgccaccacttggctaattaaaaaaagtttttttagtagagacagggttctcactatgttgcctagggtggtctcgaactcttgggctcaagtgatccttc

SEQ ID NO: 83782 - DNA, 1478 bp, Homo sapiens
gccgggtacagcgggtcacgcctgtaatcccagcactttgggaggctgaggtgggcggatcccctgaggtcaggagttccagactagcatggccaatatggggaaacctcatccctactaaaaatacaaaaattagtcaggcgtggtggcgcgcttgtaatcccagctcctagggagactgaggcaggagaatcgcttgtacctgggaggcggaggttgcagtgagccgagattgcaccactccactccagcctgggccacagagcgagactccgtctcaaaaatatatatatattttgtagagacaggttcttgctgtgttgcccagggtggttttgaactcctggcctcaagcattcctttcaccttggcctcccaaaagtgtccaatttctgttaattaaaaaaattaaatttttaaaatttaatgggctgattaaaaaaaaccccaataaatataaaattgtttgaaagcaatgaaaaaaaatctattaattggaccaaagcttagggtaatattctgggacactttggagagaaacaacttctataattttaatttcatgcccagtacttttgagtgtatgtatttaaggttgttttattaaccatttcaaatgtaaatatcctaataccatttaataattctttagttactcttcaacataaacttgaatttaaaaaaggaaacaaagccaggcatggtggcatatacctgtagacccagctacttggctcaggaggctgaggtgggagaatcatttgaacccaggagtttgaggtttgagtccagcttgggcaacataatgagaccccatctcaagggaaaaaaaaaaaaaaaaagggaaagaaaagaaaaacaggcggaagtgaaaaatatttcctatgtgccttctgttgttaattggtttgtttgttttacgtggatttatatattaaagctagggccaaatttgggataacctgagcagctgtctttggaatgcacagaaaatgcctttactagagtatgtgttattacctgagggtgggactcccttagcaaacaccttatactaatgtcctggtcacagggttgtgatgtgtttgatacatgagtgagatatacgttgtgtcctttctttaagttcttcaaaaataaacccttattcattatcctctgaagtttgcagtctgtattttggtggtgatcttaagctctgctttaaggaaaaagtcttttataggttttagggtacttctttcctttgtgtacttatcttggtagctctttaaggaagaataatccctaacagccaagactacctttcatgatatcttacaacccttaactgactatcaacaacctttcaacagtaactccctgattatctatcaccttgaaccctacactctagcctttcctagctactttcatttgtctgaatgtttctttttccccttgcctctaagtctttgcctctgtgctgtaacactagc

SEQ ID NO: 83783 - DNA, 1074 bp, Homo sapiens
tgctgagaggaacatgtttctttagagtcctggcttgctttatgcgctttatctcattaaccctcacagcagttctattgcatgcatagatcagatacagaaaggctcagaggtttttcttttgtttttgatacagggtcctgatctgtcacccaggctggagtgcagtggcgtgatcacagctcactgcagcctcaaactctcaggctcaagtgatccttgcacctcagcctcctgagtagctaggaccaccggtatgcaccactgtgcctggctaattaaaaagaaaaaaatttgtagagatgagggtggggaggtcttaccatgttacccaggctggtcctgaacttctgggctcaagccgtcctctgtcctcggcctcacaaaatacagggattaacagacaggagccactgcacccagcccattatgtatataagataatacttcttggaaggaggttctaattattttgttaattcattcagtaaacacttactgagctcctgctctttaccatgtactctgtcaatttctgaaatccatgaaaatgtcaagttctgctgaattaggtaataatggtaatacctgaaatttgtatggctttcacaatttttaaaattatttttcacaagttaattcacttaatcttcataataattccctaaggataggtattatgattttatatataaagaaattgaaatcaggctgggcatggtggctcacgcctataatcccagtactttgggaggccacggtgggaggattgcatgagatcaggagttcaagaccagtctgggcaacgtgatgaaatcccacctctacaattaaaaaaaaaaaaaaattagctgagcatggtgtgcacctatagtttcagctactcaggaggctgagatgggaagatcgcttatacatgggaagtcacagctgcattgagctgtgattgcaccattgtactccagccccatgggtgacagagtgagaccctgccccccccccaaaaaaaaatagaagtaatggaattaaaccacttacatggatgtaagctctgaagggatggacatatgggaa

SEQ ID NO: 83784 - DNA, 1055 bp, Homo sapiens
aatccatctggtcctggactctttttggttggtaaactattgattattgccacaatttcagctcctgttattggtctattcagagattcaacttcttcctggtttagtcttgggagagtgtatgtgtcgaggaatttatccatttctcactcataggtgggaattgaacaatgagatcacatggacacaggaaggggaatatcacactctggggactgtggtggggtggggggaggggggagggatagcattgggagatatacctaatgctagatgacgagttagtgggtgcagcgcaccagcatggcacatgtatatatatgtaactaacctgcacaatgtgcacatgtaccctaaaacttaaagtataataaaaaaaatatatatatatattaaaaaaaaaaaagaagtcttgttaaagataaatttttaaatatctccttagatggaaattccttatactgtaggtagtatagagttagaggtctgcattatggttctggctgaatcaaccagcagtgtgactctggcaagttagcttcccttgacctcagtttcctcatttgcaaaatgagaaaattagattggataatttctgatgtccctcctagttctataatcatatgtgttctataactttgtcttcattaactcaatgaagtggcactggtagaccgaatgttaggttagagattagtggaaaaaataagatgaaaataacttgcccaaagacatagttaaggacagactttttataatgtgttttcactattatggtctcctctgatcttaatgcacagccaggtccctgatcaggatggaatggagcacagaagacaccaagaaactgaatggcctccttgggtgtttaaggctttaaagcttctgctctgtagtatattatgtggtttgctggaatgaactgagctctgcagtcagacagaccttggtttgaatcccaactaggtcacctgctcaaagtagggttctgagcaagtcccttcacttccatacaccaccatgtcatcatctttaaaaaaagggataatggtact

SEQ ID NO: 83785 - DNA, 1073 bp, Homo sapiens
cagtgagccgagattgtgccactgcactccagcctggacacaccaggtgacagagtgagattctgtctcaaaaagaaataaaaataaaataataaaataacttggagctcattggtccttaaatttatctcagctctgttaaaggaaatatccatttgtttatctgtttttttttttttttgagacggagtctcgctctgtcgcccaggctggagtgcagtggcgggatctcggctcactgcaagctccgcctcccgggttcacgccattctcctgcctcagcctcccaagtagctgcgactacaggctcccgccactacgcccggctaattttttgtatttttagtagagacggggtttcaccgttttagccgggatggtctcgatctgctgacctcgtgatctgcccgcctcggcctcccaaagtgctgggattacaggcgtgagccactgcacccggccttgtttatctgttttttattgatagtcacttgaacaatttccagtgtggagttagtattaataaagttactgaatatttttgtaatgtcctatttttttttttcttctgatttaaaggcctcagaaacattttcatttctgttgggtaaatttgtaggagtggaattgctggataggtgcatgtttagtttaaaaaaaaaaaaaaaaaaaaaaaaactaggccaggcacagtggctgacgcctgtaatcccagcactttgggaggccgaggtgggcagatcacctgaggtcaggagttcaagaccagcctgaccaacatggagaaaccccgtctctactaaaaatacaaagttagctgggcgtggtggctcatgcctgtaatcccagctactcgggaggctgagggaggagaatcgcatgaactcggtaggcagaggttgtggtgagctgagatcgtaccattacttacactccagcctgggcaacaagagtgaaactccgtctcaaaaacaacaacaaactgccaggctgggcacagtggttcatgcctgtaattccagtactttgggaggtcgaggcgggtggatcacctgaggtcaggagtttgagac

SEQ ID NO: 83786 - DNA, 1052 bp, Homo sapiens
gcagtgagccaagatcacaccactgcactccagtctgggcgacagagtgagactccgtctcaaaaacaaacaaacaaacaaaaacaaacctgagggtggtggtgtgcatctgtagtcccagctactcgggagactgagtgagttgagatcataccactgcactccagcctgggcaaccagagtgagaccctgtttcaaaaaaaaagatacacgaatgcttaccattgtgttacagctggctacagtattcagcgcagtaacatactatgtaagtttgtagcctaagagcaataggcagtaccatagagcttaggtgtatagtggggtgtgccatgtaggcttatgtaagtacactctatgatgttcattcaatcacgaaatcatcttatgatgcattatgcatttctccaaacatattcttgtcattaggtgatgcatgactgtaccataatctgttttaaagtaaaactattatttgtgccagacttaaaaatgtgctaaaatatggcagctaaaagtgataatgatagaaagaaacctggtttctctagtttactagcaaagtttttttaagcctggtatatgactcgaagtacatttataataccgtatgtacaacatgacatttttatagttcatctctctttttttttttttttttttagagtggagatctctatcacccaggctggagtccagtggcatgatccatcatagctcactgcagcagctttgagcttctatttatttatttatttatttatttatttatttatttatttaaagagacagggtctagctctgtcacccaggctggagtgcagtgacatgatccgagctcactgcagccttgaactctcctgtgtttaagtgatcctccctcaagcctcccgagtagctgggactacaggtgcccaccacagcacccagctaattaaaaaaaaaattttttttttttaagtagagatgggcctcgctttgttgcccaggctggtctcaaactcttggcctcaagagatcctcctgcctcagtttcccaaagtgctgggatt

SEQ ID NO: 83787 - DNA, 1059 bp, Homo sapiens
cagaaggagattccatctcaaaacaaacaaaaaaaagaatctctaaatctctctttttaaaattgtttagacattgctctgtcacccaggctagagtgcagtggcatgatcatagctcactgcagccttgaactcctggacgcaagtgatcctcccaccccagcctcctgagtagctgggactataggcacacaccaccatgcccagatacattttttatttttatagaaatgagatcttgccatgttacccaggctgttctctagcgcctggcctcaagtgatcctcctgcctcctgccttagcctcccagagtgctgggattgtaagcatgacccaccacacctggggcatttgccagtcttgatgaccaaaattgtttgtatcctgtcaattcagaggtgtcctttgaattgtatctttgatagcgttgactgtgacttttgctgagtatagcctttaactttgatgaacataatctttatcttcatcccaaatgccaaccaaaccatgtcacggctcctgaaaggcctctctgcctttgctcctttggttggtccttcttgcccagttcagtccttctgcctcttcctccctgcctgtccagttttaccaattcttttttttttttttttttttttttttgagacagtgtctcgctcttgtcacccaggctggagtgcagtggcgtgatttcatctcactgcaacctctgcctcccaggtgcaagcagttatcctgcctcagcctcccaagtagctgggattacaggcatgtgccaccatggctggctaatttttgtatttttagtagagacggggtttcgccatgttggccaggctagtctctaactcctgacctcaagtgatccgcccacctcgacctcccaaagtgctgggattacaggtgtgagccaccgtacccggccagtattaccaattctttagggcctatctgaaggcccatctcctccaggaaaccttttcttgactttggcctcattcactttggtgtttgctcatgttctgtacattctgccttacacaattggggatttcct

SEQ ID NO: 83788 - DNA, 1352 bp, Homo sapiens
ccaaagtgctgggattatgggcgtgagccaccgtgcctggccttagattttaaatcctctactatttagttcttcctaccaggcatggtgaaacccagtacaccaccagttgtctcctaattggggatgtgaaacctcacaccagtattatgacatggaataaccttactccatagtgcacttttgcctgtggctttaagttcctaagagtttccatagctctggcacattctttacctaccttaaatttattttgcatcttcgtttattaagttgtctgtatatggtagtgaggtagtgatgcttagtgtcctttctccacagaccatggacctgcactcttgtccgaagccgattgtatttgtgttgcacacgtttttatcggccaaagtcactcgtatgggactgcttgtatgagcaacaaaaaatcagaaaagagccttgactgtcacaagaaatatttccacctcaaaaaaaaaaaagcacaaaaagaaactctttgctctccttcagcacagtgccttcccaaggacctgcaaataactgctgaaccataaccgtgtttaaagaagagcctacctttcacagtctaccttggccagatattctagcactctaaaaggctccaaaatgaagctgttgatttattctcatttcaaaatatggtttatgagtaattaggtttatttctactgctaaaaagaatggctcattgttttctttttttttcattgttttcatttttagacataatcaaatacccaagcattgttttctttttcttctccctgtaggatttgtgttgtgcttagccttgatctcttgttcagaacaattgtcccttcccaggtgctagcttgcagcagcctgttgcttcctgagcattccagataggtcgtatgtcttggaatttactgtcctcactagctccttccaccataggaagtccttgaattgtatcaccaaagggttgttccatttgccctggatctccctctatctcagcctggccatcacttcccaccttatcccaagctttgccactgtctctaggacttagaacttgtaaatttgatttgccttgccttctacttcctttctagtggtgactgagttgaaaagcaagttggaagccactgcttttaaagaaaagttttgcttggtttaggtttttccaattttatttttgttaggagccaggggataagatttattttaaatgaaaatcctcttcctaggttaagccattttttttattgcttaccaaatgtgcctttggttagggttagtggagctttattagtcactatttgaataactggaaatcactgccatttccaggagatcaccta

SEQ ID NO: 83789 - DNA, 2096 bp, Homo sapiens
tgttggttatatgaggatgtaaaataggtggaattaaaatgtgagcaggaaaggcaaggcatgtgtgcattttcactcattttggtcaaggttaaactgacatgtatagcactgaggtctgtagggttcttaatatcttttgagtcttgctgtgaaatgaaagtgtgggaggtttcctttgtccattagcagccccaagaaccagaacccttttgctgcttttcttacatacctaacagctctccagtcatgatgaccaaggttgttcttcaatcaaatgtgtttgtgggattttcagtccgcaaatgaagtgctctctaatgaatgggacaccatgataaatatgtatttatatttagatgccaaagtatggcaaattatttccaaatgataactacaaatgggaattttcgatattctaccttttttatagaaccagctcacttttcatttctttttcattttgaattaagaaaattgttgaggatgtggtgggttccagtgtgtggaatggaaaggaaactgcagaatagtgtctgctccccattcagagggactgcttcctgtgccccccagacccggggcttcgacagcttctccacattccacacagatgcctaggagcagcgagttggtatatgaaaagtctcccaccttttctcctaaaacttctctcctttctctccataaaaagaaaaggaaaggaacaaaagaaaaacattcagtttttctttttctgaaaaaggtaagtcctttcctgaagtcatcaaatgaaacattatctggaaattagtttctaatgttgtatatgaagaaatacttaaatataagttcctgcagtatttattagatagttgtaactgtaaactcacctccctagtagataagagtttcaggttaaatactggaacatatataggcagtcaaaaatactactttaaatgtcattcacctattttaaagccatgttttagcactttttaggccaaagaaggtctgatagtgcctgtttttatgttctgtactctcacaaactttgttactcaaaattattgcatggcaggagagattggattatttatttcttatatttttataagtaaaaaaatctttctaaacaacaaatacctaacattattactgattgttttcctaatttatcctcctaagttgaatggtaacaaagcttttccagctgaatgaatgcacttagctgataaaccagaatttgttcttttttttccttcttttttttttgagacaggttctcactctgtcaccgaggttggagtgcagtggtatgatcatagctgactgcagcctcaaccttctgggctcaaatgatcctttcacctcagcctcctgagtagctgggaccacaggtgtgtgccaccacacctggctaatttttatggatttttttttcttttttttttttcgccatgttgcccaggctggtcttgaactcttggcactcaagcagtccttctgcctcagcctcccaaagtgctgggattacagatgtgagccactgcacctggccccagaaattatgcttaaaaaaaaaattaagctgtgtggaatctggacaaggctatgtttctcctagaaacaggttttgctgtaaatggttttgatgggcgaaagtgtgagaaaaggttataatagattcttttttttaattttgtgagaaattccaggtcttcttgcttaacttatatgcatgtggatatatttgttttcaaagccatggaagaatctctgttcatatattttaatgcaaattaccttgtatgctgctatgcaaattctattaaaaggcctacctgcttaagaattaaacatttttgaaactttcagggaagacctgtagactcaagcactttctctgcttttttgtatcttatcttggacacttatgctgaattatgttcttattattttcactggttataagctattccttgtacataatatttaaactatccaaatatccagcatacatttccatgtggctgccatcggctgttgatgccatgaatgaaatggctggttagaaagccaaaggtcttcttttttcaattcctaatgaataa

SEQ ID NO: 83790 - DNA, 1019 bp, Homo sapiens
taaatgtgtgatgatagttctaaaataattatgctatatatcagggttctgtatttttgagcaatatcattattcctatgctgtgatgttaaatggaatttattttacactagtaatagactgcttaagtggctgatttgaaacctttctctaaaaaaacaaaaacatctggcagatgagtgacacaaattcattctcttaaaggatagaatttcaagttaaggataaggcacaataaataggcacatagaggacatctgtttttgtttttggttttggttttgtttttttttgtctctctgactagctaaactgccaactagaagaatggttgttatgtagtaactcagaagaatcttttaataagtttcttcttttgtttcaaaacaaacttgagcttcatttcttgccacctctattctttcttcccacgttgggtgactgaactgatgcttattctagttttagaagaggatccacatttaatgtaaggcataaatatgccttttgcaaattattgcttgttctccagtgaacatttgatcatattcaacagaaatccaccatataaaccataatccttgaattgccccttttaaaatagattggttaaaaccaaaaacctataagagagaaatgatatttcattgtattgtaggtttgggaatcctggttagatttataatttctggccgggtgcggtggctcatgcctgtattcccagtactttgggagcccaaggtgggtggatcacctgaggtaaggagtttgagaccagcctggccaacatggtgaaaccccatctctactaaaaatacaaaaagttagctgggcatggtggtgcgcgcctgtggtcccagctactcgggaggctgaggtgggagaatcccttgaacccaggaggcagaagttgcagtgagctgagatcatgccattgcactccagcctgggcaacagagcgagacttcatctccaaaaaaagaaaaagaagaaaaagatttataatttctgagtcccct

SEQ ID NO: 83791 - DNA, 1050 bp, Homo sapiens
cttttaaccgtctgagcttattgtgaagatggccggctggttttcaaagccttctttgaaggcctttctagccgatgttgaaaaagtaggccaatgaaatggcccgcaagcaataaatccacaggcccagcggcatccctcgtcacgtttcatccccatgcctgtgaccccagggactttccacctctccgaggaagcactgagccatttgctttgcctttccagaaagccattgatctggtgacgaaagccacagaggaggacaaagccaagaactacgaggaggcgctgcggctgtaccagcatgcggtggagtacttcctccacgctatcaagtgtgagtcacacgaggggtcctcaggctgccgcactccagaggggagcggaggagagggggtggcgcacgagcctcacaggggcccctctgtgttccctttcacagatgaggcccacagcgacaaggccaaggagagcattcgagccaagtgcgtgcagtacctagaccgggccgagaagctgaaggattatttacgaagcaaagagaaacacggcaagaagccagtcaaagagaaccagagtgagggcaaggggtgagtgtctgcagcgtccgcccaggaacctgggccctcctcacggctccctatcattcctggcgctcatgctgccttggacttccctgtgggaatggtcctcatagtgcagggatgacagtgccagcagctgctttcagggagcatggcctggagcacttccatgttcaccgtctcattggatctgacccacaagccatggggagagggggagcttggtgcagatggtagagcctctcaggacgggaccccagctctgtcacctcccagcctagtgccaggaccccgtgtgcctaccatctccacatcttggaagtggggaggtcgtggaactcacctccgagcgttgccacagggagcagtgagatgacgtgggcagtgcccttggagcttggcacacgagagcatgcaatgagtgccagctgctgtgactgtcaaagagtcacctgcctccaacagg

SEQ ID NO: 83792 - DNA, 1093 bp, Homo sapiens
caaaacttgggcgtaaaaggaacgggcagtggggctagccggctgtctggaggtctgggtgacctggcagcacggctgcttctcccccgccaccccgccccactccttgacacttccaggtgattttatctttataaataagatgaaaatccaagcagcattaatttaggggaacaaaagatggaaaaaaaagggggggaggcagaaggagctgatgagcatccaggagaggaggaagtaggaagagcagtgtccactgtgtgccccagggcagtggagtgtctctgtggctgcaaggcccttccttctggctccctggcagacggccagacagcagagggaactctgtattgactgggacaagccctggagccctgtctggctgttgacatggggagtgcctggatttgccccaatcaacctcccaccttcaccattgcccaagtgaagcagcttttaactctcttgcccaaagtcctctgagaatttcttcactttcaggaggtcgtctgcattcaccgtgggccgggtggtggccagagaccgcagcatgtccgactgtgaaggcaacagtatgtgcctgagcaggagccaggctccaggtccccaacctcccctcagcacacaacaggcgcagctgagggtgggaagaggtttgccttcaaggccaccccagaggcctgcttgaatctgcctatggcagggaccctcttccctctcgaggcagctcagatgggcctcctcctggtctgagaatctaagctccatcatctcataactccccttacgaacttgctttctttttttttttttttttttttggagacggagtctgtcacccaggctggagtgcagtggcatgatctcggctcaccgcaacctccacctcctcggttcaagtgactctcctgcctcagcctcccaaatagctgggactacaggcacgtgccaccacacatggctgatttttgtatttttagcagagacggggtttcactatgttggccaggctgctcttgaactcctgacctcaggcgatctgcccgcctcggcctcccgaagtgctgggattacaggcgggagccacggcgcc

SEQ ID NO: 83793 - DNA, 1093 bp, Homo sapiens; identical to SEQ ID NO: 83792

SEQ ID NO: 83794 - DNA, 1156 bp, Homo sapiens
actctggtaattaggttatcgagctcactgtagagctgagatgagaaatcatctttctacggtgcgacccttccgaacactcctcccacttctgaggtacctgtgggctcccaactcctaacagaggttctgcagcttgagaccccacttgtttttctgaccatcttgaaccgacgggcttgctgtgcaggaacaatcaccccgaccccagcagagcccgcattccgcgaggcatcctgtggtaccacgggggaatggcctagccccctgggctgggtcaggctggcgggggctaacccccacttctccaactccaccgtggcggatctaactggggccgaagagcgtgtttgcctcagagagcaagggagcagaaagcagacgccaggctgtcaggtaacagcggaactaggggacctctcctcgcccctgcgtcctatctgagcgggctctaccccacaggagcttctatccgtcctgaggcctctccgctcccgcatcccacttcgctcctgcgggaggtccggcgtatgaaccgcgaccacttctgcgctctcgcggagtcgggcagaagagacgcgcgcgctgctccagcagccccggtccccgccgcccgcacctgagatctgcaccgcctggaagcggggcacgcaggccaggaagccggcgacgctctcgcagccctcgggaaaggtgaccaggcggctgtcaagcactcgcaggctggggttcacgaacacgcgcagggggaagggctccatttggcggagcgcgcgctggcggggcgggcactcccgacacagcgcctcggggagctccagcgccagcacctgccgcggcacccccagctgcggcgcgcttaggcccacgcagcgccgccgccgcatcacctggaccagccgttgcgtcagccgctgcagctcgggcccgcctagctgcgcccgctccaccggggccgccacgccgcgcagcaccgggtccccgacttggcacacgtgcgagaacggcggttcgggaggacccagcaccagacgcctcaggtggcgccaataggagcgccgcagcgccgggccctcgacgccgtccggggcggccgtggagctgcaagcccggacaccgacggctgccgccccgccccacggcacggccgcccaca

SEQ ID NO: 83795 - DNA, 1096 bp, Homo sapiens
aaaatctggccacccattaccagagaaggcccagggtagcagaaaaccaacagaatgtgctcaccttggcaagggcatcttccaaggccccagtcacatcctgcgccagggccacagggcagcagaggcgcagatcattgaaggcaaccagaatattgttgagaaagcaggcgaggggtgggaaatctaggagcaccatgggtggctgcagcgtccccggctgggtggctggcacagcagcaggcatgttactggtgcccaggatggctggagccgagatgagcatgtaggagttcatttcttcctggaatttctccactgtttcctgaattgctttctggaaagtgctgatggccacccgctggaaaacaggagccaactgaccccggaaatcagctcccacccggctgaaggacagcccaaagtacatgcactggcccagcagagagtccaggtggccgcctatgccccggtaaaggtcggtctccagcacctgcaggaattgtgagaccttctgtagcacccagccatggaagatggcactctcattcacagtgtgctcacccatggcagggggcagcagtgggtcctcgtctgagaagatggcacggtactgggtgatgatatcaaagagatggacacgggaggcctcgatggtttttgtaatatggaaatagggatcatcattaggaatggcagtcaggatggaccggagccaagcatctcgggcctgaagaaacttcaccctcaactcagcctcagtgaagacgtccatgcgccgcaggtagccaatgacacggaggcaggcaggaagctggatgttggtcctcagttgctggatcagctggctcagcatcagctgcatggactggcgcacttcgttcacgatgccctgacaatacacagagagagtcacactgcgctgggaaggatgctctctagaacccattcccctaactctgaagactgcagaccaacattcccatggctttcctgaaatgtgaagtaatttcctaaagctgatgcctgtaggttcaccaacaaagatcaggttagttaactctcttgcttaaaaagcttaaaacctggccaggtg

SEQ ID NO: 83796 - DNA, 1051 bp, Homo sapiens
ttaggtagaaactcttgcatgtttcacatcagtttctgccagccaggtatgcctgaacagaaaacattcatttattcaaaatacatattaatcatgtgccaagcactgctctatatgctggggatacagtgtgaataaagtggtcctggctctcatgcagcttacgtgctaatgggaagtctgataattgacaaagaaatgatatcatttcagatagtggtgtctgaagaaaaaaacagggaatggggtaagggagtctagggtaggtttctttaggtagggtgatcaagaaggactcttctagggaggtaacatttaagctgagacctaaatgagaaggaggtgccagcccacaaagatctggggagagagcaaaccagaaagtgtgaagaacaagtagagagggctgaagtgggcagaaattgaggtgtttaagggatacagaggcagccagggttaatggattgtagcagcgggagagcactaggaagcaggtgaagatggagagccaggtagggccaccagtgtaagtcccaacaagtggttggaattttcttgattgcagtgggaagtcactggaggattttaagcttttttttttttcttttttttttttgagacagagtctcgctctgtcccccaggctggagtgcagtggtgcgaccttggctcactgcaacctttatctcccgggttcaagtgattctcctgcctctgcctcccgagtaaccgggattacaggcctgcaccaccacacccacctgatttttatatttttagtagagacgaggtttcacatgttggccagattggtctcaaactcctgacctcaagtgacctgcctgcccacggtgctgggattacaggtttgagccactgcacctggccaggttttaagctttttaagcaagagagttaactaacctgatctttgttggtgaacctacaggcatcagctttaggaaattacttcacatttcaggaaagccatgggaatgttggtctgcagtcttcagagttaggggaatgggttctagagagcatccttccc

SEQ ID NO: 83797 - DNA, 1028 bp, Homo sapiens
tttctctttctctttcttcctgacacagtttcactctgtcgcccaggctagagtgcagtggtgcgatctcactgcagcctccactttccagtttccagtgattcttgtgcctcagtagctgggattacaggcatgtgccaccacacctggctgatttttttgtgtgtttttagtagagacagtgtttcactgtgttggccaggctggtctcgaactcctggcctcaagtgatccacctgccttggcctcccaaagtgctgggattacaagcgtgagccactgcaccgggcaacttcctgcatttctgttcaggagatagacagtttgaggaaaacatgagtctctctgtttcccttaaaattatttcagaaaattattcacagatccagcagctagcttgtctgcatggatagaaatagtaacgtttttatgtctcttggattttaattctcttatagtataaagtttggataaagcctggtgcagagcagtccttcctgtatgggaaccatgtgttgaaatctggtctgggtcgaatcactgaaaatacttctcagtaccagggcgtggtggtgtactccatggcagacatccctttggtgagtagagatggtagctgttacagaactcaagtactcttattcaagaagggtatgtcttcaatctgagtgcttgagagaataaattctcagcacgttttgaatcccagaaagaccagaactgtattttttccgtctttgttatttccagccctcaatatgggcatattgaatgacttcagtgagttagtgtctcttcttttgaatcccagggttttggggtggcagccaaatctacacaagactgcagaaaagtagaccccatggcgattgtggtatttcatcaagcagacattggggaatatgtgcggcatgaagagacgttgacttaaaacgaagccattccaaggacagacggctgtatggaaaggccgagctttgtttcctgtgtttgtgtggactccaccatcatgttgaattttgtcaaca

SEQ ID NO: 83798 - DNA, 1028 bp, Homo sapiens
gttgcaacctccatctcccgagttcaagcgattcttgtgcctcagcctcctgaatagctgggattacaggcacccgccaccacgcccagctaatttttgtatttttagtacatagggttttactatgttggccgcgctggtctcgaactcctgacctcaagtgatcctcctgcctcggcctcccagagtgctgggattacaggcattagccaccatgcctggcctaatggatgaattttaaaactttagcatttctttaagccttgcctttcactcactcagaagtgagaaagggggaattcttttgtccccagaaatgatatatgaggaaactgaaaggttaagaggaaacttccatatcatctgtttgacatagcttccaaggattaaaacattcaataaagtctgacatcagcttcttgatcaaaatagttcagcaaagtttaacattttgctacctccctctgtggatacatgctgtgctgcaattaaacagctacttacagttgagagaagcaagactttaatgaagaatgctacaagtatggacaataattagttctcaccttttaaaaaaagattacagaaaacactttactgaaattttttgctaaaaagacagtctttaagggtgtccgggagagacagcaagcacaacacagtacaaaaggagaagggaatgttgaattccagtgcaagacacgaacacagcacaattagggaatcaggaggaagcaaccatttcacaaagaatgaaattaggcatttatattcaatcggattttttttaagctttaaaagtccagcataaggaagggaattgggaaaagaggcaggggacagggggcaggggatcagggaactaatcttatctacaatcaccattttaccaaaaaacacactggttcaaccacatgagaagtggaggattaacctgcctacatagcccagcagatgttgacagcaaatgccaaggcagacaggtctagggttgatgtcacgactggctaaagagtttttaaagggaa

SEQ ID NO: 83799 - DNA, 1007 bp, Homo sapiens
acctgttaaaaccagcaatgtgagtattatttggagtaaatttgttccacgtcaagttctggccttctgatgcaaatgcaaaggaacttagtctgttatgaacccaggttgatgacagaccagtccttgtggaataagattccctttaaaaactctttagccagtcgtgacatcaaccctagacctgtctgccttggcatttgctgtcaacatctgctgggctatgtaggcaggttaatcctccacttctcatgtggttgaaccagtgtgttttttggtaaaatggtgattgtagataagattagttccctgatcccctgccccctgtcccctgcctcttttcccaattcccttccttatgctggacttttaaagcttaaaaaaaatccgattgaatataaatgcctaatttcattctttgtgaaatggttgcttcctcctgattccctaattgtgctgtgttcgtgtcttgcactggaattcaacattcccttctccttttgtactgtgttgtgcttgctgtctctcccggacacccttaaagactgtctttttagcaaaaaatttcagtaaagtgttttctgtaatctttttttaaaaggtgagaactaattattgtccatacttgtagcattcttcattaaagtcttgcttctctcaactgtaagtagctgtttaattgcagcacagcatgtatccacagagggaggtagcaaaatgttaaactttgctgaactattttgatcaagaagctgatgtcagactttattgaatgttttaatccttggaagctatgtcaaacagatgatatggaagtttcctcttaacctttcagtttcctcatatatcatttctggggacaaaagaattccccctttctcacttctgagtgagtgaaaggcaaggcttaaagaaatgctaaagttttaaaattcatccattaggccaggcatggtggctaatgcctgtaatcccagcactctgggaggccgaggcaggaggatcac

SEQ ID NO: 83800 - DNA, 1050 bp, Homo sapiens
catttattgccgggcatggtggctcatgcctgtaatcccagcactatgggaggctgatgcgggcagatcacttgaggtcaggagttcgaggccagcctggccaacatggtgaaaccccgtctctactaaaatacaaaaattaactggacatggtggtgggcgcctgtaatcccagctacttgggaggccgagatgggagaattgcttgaacccaggaggtggagattgcagtgagccgagattgcaccactgtgctgcagcctgggcgacagagcaagactccctctcaaaaaaaatgtattagttatcttaagtttgaataaaaaaagcttgatttataagtcttacaagttctctcccattttatgtccttcgttttatgcctagattggatttgtaagtgaacttgtttgcatattgagtatattcttggtgaaagaagcagagaattaatgcaattctgtggcctcttcttcctgatgacatccttcctttcccagatggccaaaaaggctttgaaatctgagtccgctgcctcaagtacagggaaggaagataaacagccagcaccagggcctgtggaaaagccacccagagaacccgcaaggtaaaaagatgctctcttgtgatcttgggtaaaacactagggtggtcgctggaagcagtctcctccttaggccaggatcagttcctctcagcactccgacctactaacgtgttacgaggttactcatacaaggcactgggggagactgcacaccctgggaagataaggaaacaggatgcctggggtccctgacaacttcctgactggccattcctcaaaggctctttcaccatttctctctccttgcctcccccgtattgactcagtacttttcttgtggacacctaatctcttaatacattcaggaagcactgctcagatctgtgagtcgaatcccaaaaccagttcctaaagcaggggtcacaagcttagatgccctttgagggccggttaggaaacctaaaggaacaaagtggacctaggctgagagcatggggctggga

SEQ ID NO: 83801 - DNA, 1090 bp, Homo sapiens
ttatatcaagactatatttgttttctcctcataactaaaggagagattgatctgttaggtttctttagagaacaaggggtagcaacacgtatagcatgtccttgaagcatttatatgttgctttttactatgcggcattgtcccctgcagctttggcaacagcagcttgatgttctttgagggccttaccccatttggggtgcttgtatatcagatacactctgttagaactttacatttgaaacaaaaatatttgttgaggctttttaaacattgctgcttcccagaacagccttgcttctttttgcatctgcttctttattcttcagttctgtgagtttggtcttcttctcttcctttgttaataaatgtgctttctggcatttcttcccaacataaacctaccttacctattttgaaaatctgtgcttggaatttcccttttatttaacttatccagagaccattgatattgcttataccctagaaaccttaacaaatacgtaagagaagaaactatacttacttctgggaactgccaagtgaaaaagcagtgattcatctttttaatttccccccccccacaggaaattaatacatagttttaaaagataagctcatagcacaacctttgaagcagacttcttcatttcaatttgaaagcattcatatttcctttcttgcttcacacattaaatatagaaggatatgtgttccaattctggagaacatagagtaaacatactctcttctgtctctccctcttaatgtaattataagtcttggacagaatgcatggagtagctatctgaggattctatctggaaataggcatatagggaaggagaccagaatttgaagttccaccaaaccagtgatgaatagtttaccattttttccttctctggtgtcacccagcccagactcaaaggcagcctgaaacctggaagtgcactccaggtgtgaacagaaagagcaccaagagaagctttctctttctggtctgaggagcaaggaaggatctctcaagggtcagagatggtgaaagaaatcccagttttttctcttttttcgcttctttcttgccctg

SEQ ID NO: 83802 - DNA, 3431 bp, Homo sapiens
ccggcacatcgggaactacggcgtctgagaagggggccgggccctccggtcctttccctcccagaagcccgcgggcggctcggaacgctgtttctatcatggccgcgggagccgggacggcgggccccgcttccggcccgggcgtcgtgcgtgacccagcggcgtcacagccgaggaagcggcccggccgggagggcggggagggcgcgcggcgatcggacacgatggcgggaggaggcgggagtagcgacggcagcgggcgggcagctggcaggcgggcgtcccgcagtagcgggcgggcccggcgggggcgccacgagccggggctggggggcccggcggagcgcggcgcgggggaggcacggctggaagaggcagtcaatcgctgggtgctcaagttctacttccacgaggcgctgcgggcctttcggggtagccggtacggggacttcagacagatccgggacatcatgcagggtgagggccgggccgggggaggggggttggagcgccggggaagggggtccgggggaccgggagtcgggactgggggtcgcccagccaacgatgtcttctctcccagctttgcttgtcaggcccttggggaaggagcacaccgtgtcccgattgctgcgggttatgcagtgtctgtcgcggattgaagaaggggaaaatttaggtatggctatttttgtgttcttctctgggcttacttgcgtagggttttgttttaaaacttatatctagaactgaaggattccaggttaaagtgcgatagtttccatcagagtggtctttttcattctacgatgggtctgttttctggctcgactggctctagttttctccggttaaggttgtcttggctgcttttctgtgttttttttaaatcttctcccacctgttaattgctcaccccaactttgctcctgtctaaagtgagttatgttcatatggacatcttttttcccccatggtagagagtttttcagagtggaagtactctgacatttttcccctctgaatttaacttgaaagctatttagctgttgtcagtttcttgccactcgtatctgaggaggatgggtatattctgaatttgagaggcaaatgcaggtatttaaaaataatttttttgcctgtcttgacaggtgttaaaaaatggtcacgttaaattcattgatttgaatttggacccttatcgtgtatgtcaacctgtagcaaatatgtcaaaaaattaaatgcaaatcttaccatatttgcatgctccatttccataaatatatatatataatttttggacataacttttttacccttagaaaagagcttaaaaatgaaaactgtgctttgtcctagactgttcctttgatatggaggctgagctcacaccactggaatcagctatcaatgtgctggagatgattaaaacggaatttacactgacagaagcagtggtcgaatccagtagaaaactggtcaaggaagctgtaaggctctatttttatatcttttttctttgaccaaaaatcaagggtctttgaggatacagcacttactctttactgtgtggggcagaggaaaacagcaatggggagagattgagcaagcaagaaagcacacacacagacgttatttcttcaggtgtctcctttcccacccaggcttgggaagtaatggcagttgctcagtttttgtgatttgggtggtcttccttgtggctttggcattgaagctctgacattttggaggttactgcaccattcgggagcactctacaagggccttaagtaactctggcctagggtttggtcacccttgtttataataaaccaaggagataaactggggccttggaaaatgtggtactgactttgagttctttctgtctgcagaaagaggggcttagagaatatcccttttgaacagatagattagaatcagaggtgctgggataatgagccagctagcaaaatagtaatggtagaagaatgatagaaatccggcacaggcagtgttcttgaattcaagaaaaaagctaatggagtgtctaggaatttgggattgtcactgtgttgtggctcaggtagcttcaaacagtagaaattattttaatttaaaacatagaagtggctgtgggaaccagttagaaaaagatttttcttcccccaaaaccaaggctggggggtgtggaagcagatgcagaggtgaagatggaaaacatcagctaagcattgccctggtggtagaaaatagggaaatggttaagaaaagagcacccctaaaaggatgggatcccaaagatgggggtggggtagaaagaaaaaccttgcttcacaaggaaaacctgtctcttggctgtgtacattgtacttgggtaccctattaaaaaacaactagtgtgcatgaggtgcacatattttatttatttaattaaggaccttgggcagatactacttttggtctggtaaagaaatgcttaaatattagtcatttccaaggaagaataatttcaagagtacatttttagtataggaaaatcaggtttaggttgaggggaggcatatgccagaatagacattatcaagggaggagaaattcatgcctactttcagaactgttaaggatcttttgaatgggtaccagtttagaataattcatttaacttctattaagtacacattgagtatcccttatccaaaatacttgggaacagaagcattttggatttcagattttggaatatttgcattaaatttagtttgagcatcccaaatccaaaaatctgaaatcccaaatgccctcaaatctgaaactttttgagtgccaacatggcactcaaaggaaatgctcattggagcatttcagatttcggattttcagatttaggatgctcaacctgtagcaactcctttagaacacaagggctatagatttgccatctggcccctcttctggaagagtctttgtgggctttcatctttcagctgcgtatttattattattatttaggctcatagagctccttatttgggtggttcattaggaaaaatctattagaaaaatctaagctctcagagtagccattttcttacgttgactctgttctccttttccagtctccaccacgtactagatcttatgcttattgttactgcagtgtaacaagttactccaagaataagcagctcaaaacagttaatattatctttcagtttccgaggatcaggagtctattagtgattctggctcagggtttctcatgaggttacagtcaagctgtcagctaggtttgcagtcatttcaagactcaactgcttccctactcacatagttgttaacaagactcactttcctactggctgttggctggacacttcagctcctggcctcttcacagataaggctgcttgcaacatggcagctttgtt

SEQ ID NO: 83803 - DNA, 1099 bp, Homo sapiens
aagtcaaaaattcagtcattccctgaaatgttgtaatctatgaaggagttttattgtccttttactctgaaaggcaacacaatagttgggttgtgtcaaaaggaaaaaatatcatccatagtttaggtgtatagaacaaattgggacataattccagaactgatgacttagttccacaacaaagaacagtttcacatataataacctgagagtttcagatataataacaagtgaatcgtggctgtcttactcttgctgtaaaatagcattcttaaatactgggatgtgagacccactcactgggtggagaccttttaggagataaaaatagaagttatccttatcctcagggagctcataggctggtgactatgactgggaagtaacacttacagtttttatacttcaattgaattaacatttatttaaaataggaatgataatttattcctgctgaaatggttgttataaaaagtaaaaagcattaatatttcaaaaatacaaattttgatatattaaataatataaattctaaatttgctaatttaagtaaatgttttttgagtatttaagtcaaggactgtgctaaatataattttacaaaatggttaattttctgagtaagtaatgctttatttggtaaaacagtttcagaggctgggcatggtggctcatacctttaatcccagcactttgggaggccgaggctggtggatcacctgagattgggagttcgagaccaacatggagaaaaaccccgtctctattaaaaatacaaaattagctgggcatggtggcgcatgcctgtaatcccagctacttgggaggctgaggcaggagaatcgcttgaacccgggtggcagaggttgcggtgagctgagattgtgccattgcacttcagcctgggcaacaagagcgaaactccatctcaaaaaaaaaaaattttttttcagaagagtatgtggtgaagtcttccttctaccctatctcccagccactaggttctttcaccattttcagagagattttatgcatgggtataaatatgcatatatatatcttcatttaaaaattgtagatggtattatattatgctctt

SEQ ID NO: 83804 - DNA, 1049 bp, Homo sapiens
caaagttacagaaaagttgcaagaatagaataaagaattgcatataccctttgcctggagtccttagtcaggtttctgcagctatctcaataatattggcaaaaggaaccaacctaggatcacccattattcccagttgtcatgaatctctagcctccttcaatctggaacagtttcttcactctttctttgactttcatgactgtggtatctttagagatcacaggccagacctgtccagaaagattttgtagaatatttctaaatttgtggttgtcccaggtgtcctcactgtaatccccatatgatgcatttttgaccacagtatcacagaagttatgctgtgttcttcccattgcatcctgtcaggcaccacacaatgtcaatttgttccattatttctattaaagggagaaaggaagaagggggtatgggaaagtaacttgttggtttgcttttcagagaaccctcggttcagtaaatatcttttccttgtagcaccctggaggagaagaggttctgctggaacaagctggtgtagatgcaagtgaaagctttgaagatgtaggacactcttctgatgccagagaaatgctaaagcagtactacattggtgatatccatccggtaagaactatcagagatgggagcccttatgcagagaaaactacttaacagctgcagaacaggatgaagaaatgaattattggctgggcgtggtggctcacacctgtcatcccagtactttgggatgccaaggcaggcggatcacttgaggtcaggagttcgagaccagcctggccaacatggtgaaaccccacctctactaaaaaatacaaaaattagctgggtgtggtggcgcacacttgtaattccagctcctcaggaggctgaggcacgagaactgcctgaacctgggaggcagaggttgaagtatgccaagattgcaccactgcactccagcctgggtgaaagagcgagactctgtctcaaaaaaaaaaaaaaaattattaaaatggaaattcattcaatctagccatcaggctaaa

SEQ ID NO: 83805 - DNA, 1932 bp, Homo sapiens
ggtttgtcttgtgtttatatttgtgtttactcaagtaggactgctttttgaaacattttttcttaacaagagaagttacaaagtatttactttttccccaagcaaaaatcctatttttctggaatttggactcagtatcatctcaggaataaaagaatagctgagtcttgaacagtaggaaacattttgctaatgcctttatacgctttttttttttaactgaaactccaaagctatgccctgtgtggttttgaaagaaattagtttatgggttcagttgtggaaaaatatcttacttttacattatgtaggacaagtgataataattgtttctgtgttggaaaaaaataattgcaaagttgttttgtttcttataggttatcttctttatctgtaatacagaggcctttctgtacttattttccaaatttaattcttttttcctgtaggctcaaacaggcccacacccttcccggttacttagtaatacagcgaaaacaaaagactaagtatttgagtgtttgaaaactttaatgtgtactacattgcataccaggaagaaaatatggaaccattttctgcctcccacatgctaggtggttcatttcccttattccctaacaattttccttaatttctgtccttcagatagctggtacacagcactctaatttaaagggacagcagtttaggtgccacctagaacataggaaagtgatgctgcctcccttccattttcctcctccttgctgcttgcttcccattcctcattgagccgaaattactgaataggtttgacacagcaattaaagttggcctagacacaagaattctattaactcaagagattgcttgcttaacagtgtctgccatctgttgccctgcaatccagagtgtttgtgtaaattaactcttccatgttgctagactgctactctgaactattgaattgtttctgaaaggggaatgaaatggttcttaaaacactttgtaacaactgttggttgtttgtcctctcctcctaacacatgtactatccattcttgaatccttaaaaaaaaaaaattaaatagttcaaaacagtattctgtaaaaagtttcttcctgtctcaagctctcagtgtcttagttccccttccctggaggtaaccagccatcattttttgttgttgcttactcttaataacttgtgttattatggtaaaatttgaacgaagcgtggccttgatttgtatattgaacatgtccagaaaataccactttcagaggtcaacatctgattcaaaggatataggagccataacacatttctgcacagcaactatgagagcatcttttatattaaaacaatagaaaaaatatgtttgcaattacaatgtctagaagtctacagattgcttcttgttgctgtttttctttcttggtagtacagttaggaccattcttaggaatgtagaacaatgttccccaaattctgttcttgtatcacctcagttggaatcccttggtatgtacatgaatatatataggaaatgtttatttcttgggcttctactcctactgctttggaatctctggagatagggtttaggaatttgcaatttaagtaatctaggtgataagtaggtagctaagcccaaactttttgctgaatgatatgcccatcttttcatttgaaaacttaggaaaatttaattctcttctgtggtaagcattgtctgccttctataggccaaaggattagagatttctcagctgaattaaaactattgagccatccaggtgcagtggctcacgcctgtaatccctacactttgggaggctgagatgggaggatggcttgagcccagcacttggagaccagcctgggcaacatggtgagaccctgtctctattttttaaaaatcataaaattagctgagcattataatg

SEQ ID NO: 83806 - DNA, 2571 bp, Homo sapiens
acattgctctttggtaaaaatgcctgctttccaatactttgattgcatattagacattcttaacagggcggcagtctagtgttgaaagttttatttttccatttttcttttaagtaaattttttttaaaaaattctgatttagggctaggtgtggtggctcaggcctgtaatcctggcactttgggaggccaaggtgggaagatcgcttgaggccaagagttcaagaccagcctgggcaacatagcgagacccctatctgtattaaaaaaaaatctgatttaattcttttatttatcataaggggtttaattcctgaagtaaaggtttgcacctattaaacttaaaactgccaaatgatttttgttcttttatgtgcgtgataaaaatacaaagaatggtgtggccacctcctccctttcaagctagggcagcaggtagctcttcccagcccctgagcccagccccttcccaagtggtgccggacaaaaaactacatggccctttcgtgtcttgggggtggaaaggtagggatgaattggggtgatagaaccctggtgaattcagagtaatctttctttagaaaactggtgttttctaaagaaacaggataggagtttagagaaggcaccaaagctttcactttggtttggcaccagtttctaaccatctgttttttctaccctagctatcttttattggtaaaatataaatgtataattatgtttgtagagctttaccaaggagtttccctccttttttgtttgttgattagcaaatttttgattctccattttccaaaagtaagagactccagcatggccttctgtttgccccgcagtaaagtaacttccatataaaatggtatttgaaagtgagagttcatgacaacagaccgttttccatttcatctgtattttatctccgtgactccaacttgtgggtttgttctgtttttccatgagaataaaatactggcggtttttttctcagatgtgtgttcattgagaagtaggttactagaattatgttactgtgtcttattggttcaatgatgatttctctggcatattagacttttattttttcccccatggaagcacttgaggaaataaatagtacactggctgttttctgccagcaactgtggtgatttttctccctgtcctttgagaattgctagtctgcttctgagccattgtcatatccagcagggagcagcttggttcaagaaggaccatagaggctgctcagcatctcctccctccctcccagcttgccagggatttgatgagacaggaaactgcccagcaaaccagggactgcccatgtaaactatttaagaaaaagttcaacccaggtcttgtatcctgtgatttagcagttgaatgaatacagaattcatcaaaataatattaaccttgtacttgcacacttggatatatttgggagtaattttaggagatttctggctgacttttattatcagggatatgggtttagtaaagcttttatctttagaaaaatgtttgtatgcattataagatgctacttttaagacaatattgaaaaaaactttggttattatttaacaaaagtggtatgacttgatgcttctctatttaaaggcaaggaaggattggtatatgattgcctgtaataaataaattgcgtgattattggagtacattggggtaaaagtaaagaacagaggagtattgaggagcttgaaagggaacattcaaactaaagccaagcctgaagataacttgaatcagttgtaaaagtgtgttggcaatgtccgaaattgaatgaaaaacatctggcttataagaaatgttaaagaactaccatcttaagtaaaattggtgtttttgttatttttaaggtaaatgccaatgcaaaaggtatgtttttctacttcacattggttttcttttcctgtttacatctgcacttgttttttgctgagagccagaggaaaagataattagactttgtctcttccacccatgaaatcccccagtacccagggcttcttctgaactactgccgatgtgatgtcactttgtatctggaaaatcactttggggtccatttactgttattttgttgcctacaaaaacagccaggtgaaagctaaatcttgtgtgagagtttgcagaggtttttctatacaataaagtagtatagcacactagccaaatccatccaaaaggaccttttttttaggaagtagacttgaattcacaaaacagtcttgacatgggtagctggtgaaaaaccctctggagagcaagtggagccagtccccattggctgacagtgccacctggagctggtctctggggtgttcggttgtttattcctgaggaagactagctgctgctgctgctgctgctgcaaactgtactgtacacatcatggctgctggacacgaaggaggaggtgagagaagtttcatgctaccgaaatagagggtgttggtaccactgcccctggcctgagagccagggtttaaacctgcctcagtagagtctagtttgaaatgacaccaaaattcctcagcccct

SEQ ID NO: 83807 - DNA, 1094 bp, Homo sapiens
cccccatggcttctttggccggagcgggcagaggccgaagggatcggggtgacggtggagggggcgggcggagcagtggcggcccctcccccgcggagccgccggccgctcggggcccagattccgtcggcccccggggctctgcggcaccggtcgcttctagccgctctcagcccgtccggccccgccaggctccgcgagccgccggccccggcctcccgggctcggggatggccccagactgggccccgcgctggggccaccgcgatcggggcgccgcgtcttctcttaccgggaccctcctccccagcaaagttgcccccaagcgggcggcgtggcctggagccggttctgagtgcagggtcaccattttcctccctttccagcttgtttttgcgccgtcgttccaccccctctccctccggcctagtccactccctccccatgttgggacagcccccctcgaccaggcgttcttcctttcctcgtcatcttcttgctggaaagggcccgatggaaagggcccgaattttcttttctttttttttctcttcccacctccgtggcattctaattacttctcccttctcctttacaaagatgggggtgccctctctggattggttttattcctctcctctcccaggaggaccagcccaggcacagacgctgtcctttgagaattttctctgcttttccgttcaagggctggttgcagggagggagctcaggcagagacttttcatttaagaactcttttggctaaggcctgcaggggattcccagcatctgaaatattagcactggagctgatccctactcaggtgaaattcctttactggacaccacaagaatgtgtcagaacaggttccctgtgcaaggggcttcaaaaccaaaatattcccactgcgctctttacgctttttaaaccaccgggagggggcaaaagacataactgggttgttaactattcatttcaccgtgtaaaaaaaaatgtaggtgtttcttctgcttttggtttgatgtatccatccatttgcttattccaccccctccaaaaaagggacttcaccttcctactagtgtatctaaat

SEQ ID NO: 83808 - DNA, 1038 bp, Homo sapiens
ctccagcctgggcaaaaagaacgaaactccgtttcaaaatgtatgtgtgtatatatatatatgtgtgtgtgtgtgtgtgtgtgtgtgtgtgtatatatatatatatatacacacacacacattgcagttatataagagatgtatgctatccttggcatttttttcctcattcagcataaaaagtacctaatgctttttgtgtttttcagattctctgaagttacacccatcacagaattttcatagagctggactattggaaggtcagcaaagtaccattttaaagcatattgtgttagtatgcaaaggctttctctgaaatggagtttaaatgggaaagtatgaaactttgcaaactcacacaatgtagttttctcctaaagagtctgatccttcttttagagcagctgaatgtttcaatgggttttgttgctgcgtttgatgtgcttgttggctgttctatctgctttgagaaacattgaaaaaaaaatcattttaaattatgtgttgagtgttctactttagaattccagaccttcattttagctttttatacacaaaatagaatgtgaaaaggcccaaacattaacatgaatataaaagagtgacaccaaacacataattagtttgaaaattcagaatttagaacatttatatgctgagcatttcaaaatatgttaattatttattgcaaaagcattgatgccattgttattgcattatacttaagggtaaggaaagccaagtaatagcgatgatgattgagctatgcttagaagaaaggggtttagaaagttctggaaatgttaatagagtctgtagattagtttaaacagcttacacttactttagaaaacttttggctttgtgtgtgtgtgtgttttaacattttaagacataaaatagtcttgtgtttttgtagattttgaagtgatttcacatatatcatctttaaatctttataattttggaattggacagcaaaggtactaatttccccattgtagagaagagaaactaaggctgaaattaagaaac

SEQ ID NO: 83809 - DNA, 1060 bp, Homo sapiens
atgggaaattcatttttcagttcaataagattatataataaaataaaaaataaaaaaattttttttttttttttgaaacagggtctcacccaggctggagtgcagtggcatgatcatggctcactgtagccttgacctcaagcagtttacccacctgagcctcccaaatagttgggactgtaggtgtgcatcaccacgcctggctgattaaaaaaaaaaaaaaaaccttttgtagagatgggggtcactgtgttgcccaaactcgtctttaattcctggcctcaagcaatcctctcaccttggcttcccaaagtcatggattacaggtgtgagccactgtgctcagctgctaatagctctttacattaattttgtgggattgtttgtgaataatacagttctcctcatgagagaaaagacatactcattttgtgcatattagattgttgactgaatctcttttaaaaattgttttctcctctctttcccctccccacagaatctgtctatgatcttctcccaaaggagttacagttacctccatctagagaaacatctgtagcatcaatgagtcagacaagcggtggtgaggcaggctcgcctcctccagctgttgttgctgctggtatgcatttcattttactttattaaagaaaactagggccaatataaatctggccaacatgaacagtgctggcaaaattcatactaaaaagagtgtgatttgagggttttaaaaagaggcattaaaatatgtacttttaaccttaaactttttcaatattattttcttaatgtaattcttatttcttaaaattttacattgtctcatctataaatgccatttcctaaaatggaccttgtcttcaaatatgggaaccagcttaaagttgtttggttgactgtgcttaaaaaggttaaataccaagctgtgaatagaaaattatatttgagtttctgtttaataattaattttaaagacttgcaccaagggaaaatattttatatgatctgaaaaatgactgaagcactcaagtgtcttttatattcatagcatgtt

SEQ ID NO: 83810 - DNA, 1044 bp, Homo sapiens
ctcatctttaaaaatgatatttaaagtttatcagagcattgttttcagtaaattattttagtttcaaaatgagaacagtaaagtgtaaggttgtggtttaaatgaggatattggtactatagtataacttcagatatatttctcatatgcattaacctatgtaccattaaccttatgtaccaatctttctcaggctgcatagtgcattgctgaagccttcctggttgaaggcaggaaaactttaaatatggcaaagaaactgatcagccctgttcactgttcatgtgttgccagacactttctaacagtttctgtggatttaattgtgaattagtgaactttttagtaatcaaattgataagatgacctggtttgctttatatccactgggttctaaaatggctctgatgatatttttctggaattttaagttttaaatctggttttaaaattgcatccaataataaaatatgacaaagataaaatattttttatgagatacttcactttaaatccacaagtagaaattgactaactgatttcttttgtatcttttgagattgttttttaaagatacgttgaatctatatagaactaaaagtctgtttcttctgtgctttttaacatctgttgacggtagatccagttccttttaaaagctgaaaaaattgttaggtttagaaaaagaacagttcttccttttagataataccaaattgaattttagaaattcttatatatataaaaatatattaaaagttcttgaatttgggtccctaatgaaatattaaccttctccccaccacagtatatttaagaaaaatctctcaagataaattacattgaaagctgtgagttgaaaaatcatgaaaataagaaatctaattaaaagaagtattttgaagtaatgcattcttattatcttgaaattattgacattgtaaagatggcaaagagagtaagaaggtaaactttctagttttgttatagtcacacacagaaagtttatatgatcattaacaagtcatttaaaatctttttcaa

SEQ ID NO: 83811 - DNA, 1378 bp, Homo sapiens
cacacacaatcgtgtgttagctgtccatggaaaatgtatagaatatttaaatttatgtaggatatgatatcacagtttggcatacttaccctagaacacacacttatgtctgactgttaaatcagttgggttttataatcattacggttttgatatttgataagatttgcaagataaaattttttacctcagagaacaagacaaggttatatcgtgcatattaaattcataataccatataacttgcttttgggttcatgattgcttttcacctgtactttccatctgtcatgaacagggatccctgagatgttcatactctgcattctcatgtgcatgatccttagatttaaaaagggtgagtgggagaaagttgctttatagaaatataagttcacagcattcatgttttgtgtgttccactgcaaatattgcatgctgcatacttgtatgctgcatacttgtatttctctgaaaatgaagaacataggctcataagtacacaaaaaattagtttcgtttttgccaatagttggaacagatgaaggaatgttagatgtaataccttttctattttttctaaaatgaattctgtagtatttttcaaaagacaaggaaaaaaattatatttaaactcaaagtggctacaaatcagctcctaaactgtcactgacagtagcatatagatttcgtagtttttacaaacttttaaaaatatttatttactaagaaaacattgcattaatgcatgatacaaaattgataagttttcctttaaattggaatgcagtttaaagtgactgaattttccaatttcagctactgcatttgagaaggatacatactggaaaatggaactggtatcatctaatttctttagactccttcacttatggtagttgggaaaaatctttccatgtggcattatatagatcatattcttgatgactaatattaattactgtgctttttagccttgacagtaatgaagaattctgggtggatatagttcattcaaataatttaggtgtattttaaatacatgttttcaattgaaaaaaacagatctttggcacttggcttttaattatgtaaacattgacattcttacattttgctctttatattataattgatgtgtatgttgcaattccaataactgcacatacagttttatcatacactttaaaacagtggcatacttggtcatagatacaaattaattttagattgaaatatatctttgtcacattacctatttttatttttgtgtgtgtatgtaatgacaacctttccatattgtgaacaagataaaatgatatctaaaatgttagtcatgacaacttccaaccttagcgatcaacgcgcctctgagttt

SEQ ID NO: 83812 - DNA, 1954 bp, Homo sapiens
tctccagagatttttatgcttaactattttctgttagatttcagccagtaaaatttaccattgttcttacattggaaaattcccttactagtcacaatcaaccaggtcctttaaaaagagaaaatggacagctctaaccaattgtcaagcatgtaatcaagtactttattaagagaaatccatccattaatcagttcttcctttgcttttcattatgtcataaaggatggatttattttagagcttatggttttgaactaccacttccagcttctggagacccaatgattaacttgcttctacaacccagaatgttccaaatcatacctttttcatcttgattctcctagattttacaacaaatcatagtgacaataccagttccattttgcctccaattcagttgattatatattttttctatttatttctcattttataattgatatctggaataatcagcagctcttttctcatttattttctcatatttttattccaggatttgcctctgaagcagggagtgtctgcattaaaaatgacctgtagttctctgcttcataggttagaaacttattttaatattttgtggctaagcacagtcccacttttcaaattctataatgaattatttaattggcattgaatgtggaccaccagcatatatttcatattggggttttctttattactttaaatgattaaaattcaatagaatgtccagctgaggcaataaaagctttatttttgctttacagcttaaaacgttaaatgagattttaaaaatctatggattgtaacataagtaaaataatgctatttgggcatttttaaaaattccatttcttaggccttatattgcttgaagcatttatattctaaaacataaccaaattctgactattcattttggggaaaaacaatcagttcacaaatcacattttcaatgggactgctagccagcataggtgaaaacatgtatagtgtatttactcttgaattgtacactgcagatgcttcttcagctccctcctcttcctccatgggcggtgcttgcagctcctttaccacctcttccagccctaccatttattctacctcagtcaccgacagcaaggctatgcaagtggagagctgctcctcagccgtgggggtaagtaacagaggggtaagtgaaaagcagttaaccagtaacacagttcagcagcatccatcaacaccgaagaggcacacagtcttgtacatctcaccaccacctgaggacttgctggataacagtcggatgtcctgccaggatgaggggtgtggattggaatctgagcagagctgcagtatgtggatggaggattccccctccaacttcagtaacatgagcaccagttcctacaatgataacactgaggtacctcgtaaatcacgaaaacgaaatccaaagcagaggccgggggtcaaacgacgagattgtgaagaatctaatatggatatatttgatgccgacagtgccaaagcacctcactatgtgctttctcagcttaccacggacaacaaaggcaactcaaaagcgggaaatgggttggtattcacattttttaaaattctatcatcattatgcaaaacaaacaaacaaaaaaaattcccaatttttcctaattgctgagctcaagtttgcatataaagcaacagtgctaattttatcattgaaatacatgaaaattttaacttaaaattaccaacttttactagatagaaaataaaataatcatagattctagcaatagatatcttattatcagtatagttaggtagtagaaaatgaaaataatctgttctgaaataaatttcaaatgaatttatattttaaaaggacttttactcagccaggtgcggtggctcacacctgtaatcccagcactttgggaggccgaggcgggcggatcacctgaggtcaggagtt

SEQ ID NO: 83813 - DNA, 1109 bp, Homo sapiens
actagtatgacttttaattcctttagtaattttattgtaatatttaattgctagacttttaaattagatttttgtatagtacattcaaaataatttgttaaaatttaactctctaggacccaggatctcctacaatttcagttttacacaaaaagtggtcaagaagctttagattgatttactacttgatgacatcactgatctttttttggttaaaaattcagttgaatattatagagaatattcttaatatatatttaacttgcccttaagcactccctcagtacattttaaaaagtaatatctaccctttaagcaataattactctacaccgcttctttacctccttaagggtgatgtagttaaatgaaaatgaatatttaaatgcttttcagttttagaaagtccagtttagtaaattacctaaaagaaaataagatatactctttcctaaaatgttgccatttaataaaatcaagaatttcagaacataatatttgtagaactattacttataaaataaggctctgaaatgtaatgaatacagcaggtaaatacttaagtaactgtgatagtaacacagatctaaaagtctcatgaatatcatttaattacatatgtgtgtttatttgtgctttagtggagaaagtctttaatataaagttccagaagataaattttcatttttatatcaaaatgaatgttgaaggttcaaatttagagcaaatagaatttttacttatggctagtaaacagtgatttgcagttgctaattaaatatcttgaccttcatttttctgcttctacttttgtatgatagctatatcttagaaatgatttgaggttacccagggaaagtataatgacattggtcaagacagactctttcatgaaataattcatggagcagaaattccatcaagcagaagaaatgtccagcttcttaggtaatgaaaaaaatatttgaaactagtatatggaaatgatggaagaattttaaaattggaatttataacaactatattgaggaaaggatgaaaccatacctaaatatatagaaaaatcggccttaaaaataatttttcagagcatgtcaagctaaaagcct

SEQ ID NO: 83814 - DNA, 1072 bp, Homo sapiens
taccttcatttggtttgtaggccattttgtatgggggtatgtagggtttttgggggtttgttttttgttttcgctaccctcacttcttttactgtgcagttaaaaaataacagtagttaatcttatagctttatataaattttggaatttatatgtggaatgcatacatggaatttttaaatcttattttgactgaagtacaatgttaaaggttatagtgacattagctattctttcctgttagtctcagtttattgcgctcaatcttcctcccttcctcctaccactcacatacgttcattttcttttctgtcaaacatactttgttttatttttgcatcatatagtaaacttttttacaaaacctttttaaagatactttgctcatgtatcttcctttaggcaatattttattttgccagcaagctgaatagttgtttttactattattgccagttctgtttcttcctttgtcttaatggctttttttttttatcaaaaaactctttttgatactttctccatgttgtgctttgatttctcagaacattggaaaaccaaaaaggaactggagtaaagaagagccctatgttgtgtggacaatatcctgttaaaagtgagggaaaggagctgaagatagttgtacaacctgagacacagcaccgagctcggtacctgactgagggcagccgtggctcagtgaaagatagaacacagcaaggctttcctacagtaaaggtatttactttatttatcatttgaattttagttaaaatgtaaaggggaatgagaatatgtcctgaaaagtaaaatattttcaaatcatgaattttcttccctcatatttgatatttgaattagattcatcccaaactttagaaagaattttttttttttttttttgagacagagtctcactctgtcacccaggctggagtgcagtggtgtgatctcagctcactgcagcctctgcctccggggtgcaagtaatcatgcctcagccacctgagtagctgggactacaggtgtgtgccaccaggcccagctaatttttgtattttagtagtgtcgc

SEQ ID NO: 83815 - DNA, 1087 bp, Homo sapiens
gttgggcatggtggcggccacctgtaatcccagctactcaggaggctgaggcaggagaatcccttgaaccccaggagacagaggttgcagtgagccgagatcacgccactgcactccagcctgggtgacagtgagactccatctcaaaaaaaaagatctcttataagccattatttatgttcagattttaaaatagtgattttattttttttactttttattattataaacaaaagattgacaggattaggaacagtggtgaatgtttagaatttacccttttgtactttttgaacttggaactttgtaactttattacatattcacagaattaatagataagcaaaattttaaaaacaaacttgttgattaagaacattatactatttatacaacaaaatgtccctttatatattttttttctgtattagggtggactgcgtagggatattgaaattgaggaatgctgatgtcgaagccagaataggaattgctggttccaagaagaaaagcactcgtgccagattggtttttcgagttaatatcatgaggaaagatggctccactttgacactgcaaacaccctcttctccaattttgtgtagtaagtaagaagatacggagatactaaacatatggagtttctttcattttctgttaatcttttagacatctctaaattttagatatttcatatgctccggcttgtgatcatgcaaaatttgaaatattttaaaagcagtagtcagattttctagaccaaactagaggtgaatacttgggatacaattcaaaagatgtggaacattttgtagtttcctattatcataatatgctgatttaaaaagtaatttggaccagacagggtggctcccagcactttgggaggccaaggtgggaggatcacttcagcccaggagtttaagaccagcctgggcaatgtagtgaaaatcctgtctctacaaaataaaaaaatatatataataagttgggtgtgatggcttgtgcctgtagtttcagctactcaggaaggtgaggcaagaggatcacttgagccctaggaggtcaaggctgcagtgagccttga

SEQ ID NO: 83816 - DNA, 1775 bp, Homo sapiens
aagatatagtacccttgagtaagtactggtgaaacttttatgaactctgcctttctcttataaggatgcttctgccactgttccaactaaaaacatctttggtttactgagatgtggataaactgaacccaatttgacttaaaatgagaattatgttgttaggagtagcgaactgcattgtgaaatacatctcacattgaggttgtacagaatgtatggtaactgactttgcccttggtgggcatattttttttctaataatttattcattcttttattcaatatgtaccttatgtaaggtactattctttacaagtgagacagagtgaagaacaaaacagcctagatcctcatggagcttacattcttatgtttggagaaagaccaaaaaacaagcaaatagggtaatttgcaggggtgaggataagtgctgttatggaaataaacaagattatgttataaggttggggaagggttttgctttaaataggatgatcagggaaggcttctttgaggtgacatttgtatctgacctgataatgggttaggaactcaccatttgaggaggtgaaggaataatattgcaattgaagagaataacaagtatagagaatctgaggtaaaactgagtttagtatgttaaaagaagggaccgaggtcagtgtggctacagtgtagtgagctagaagagcaggaatgagatgaagttgacagggcagggatcttgaccttgtaagccattataaaacacttggattttaccttaaaagcagtgttaagattaatatcctgatgcctgtgaacctgagctttaaaatgcattcttttttttttaatcactttttaaactttacagctaacaggaaatatacttcatttaaaatttttaaatttaagtattgcttcttttccaactcttgtgcttttctttacattagaatcatcttattgtgaaggttcctccctatcatgaccaacatataactttgcctgtgtcagtgggaatatatgtagtgacaaatgctggaagatctcatgatgttcaaccattcacttacactccagacccaggtatgtcaaaatgaaaaattcagaactaaaacaaataattaatttccagttttttgaaagaatatgaagatgactagccaaccaaaaagaaagttgctcactaagatgaattgatgttagtttcttttggaaatgacattattttctaagaggacagccgccagatactgcttttactcttatattaaggaatcatttctaccttatgctataataataaaaggcagcaatgctctgaagtcagattctctgaagctatctgacaggttactcctccataagaatttccatgcattgactaccgcttatgtgcagaaacctgaaagtgacaactttgggaaattgctaatagtttagtttggctggtttatagggtacattttgagagagagaagagataaactagagtgacaggtgataaaataaaaaatcccaaagactgatggtgaataaatatttttttctttctatattgccccataatacctgataaatattttaaataaaactttggttgggttaaaacgatattttaggctgggtgcggtgatgcacacctgtaatctcagcactttgggaggccgaggcgggtggatcacctgaggtcaggggtttgagatgaggctggccaacatgttgaaaccttgtctctactaaaaatacaaaaaaaaaattagctgggtgtggtgatgggtgcttgtaat

SEQ ID NO: 83817 - DNA, 1235 bp, Homo sapiens
gacttctcacatgatgagtgcattgtctaccaatgaggatatgcaaatgcagtgtgaattgttttcttctcctcctgcagtttctggaaatgaaacttctacaactaccacacagcaggttgcaacccctggcactaccatgtttcagacatcaagttcaggagatggagaagaaactggaacacaagcaaaacagattcagaacagtgtctttcagaccatggtccaaatgcaacatagtggggacaatcaacctcaagttaaccttttttcatccacaaaaagtatgatgagtgttcagaatagtggtacccaacaacaaggtaatggtttattccagcaagggaatgagatgatgtcacttcaatctggaaattttttgcagcagtcttctcattcacaggcccaactttttcatcctcaaaatcctattgccgatgctcagaacctttcccaggaaactcaaggttctctctttcatagtccaaatcctattgtccacagtcagacttctacaacctcctctgaacaaatgcagcctccaatgtttcactctcaaagtaccattgctgtgttacagggctcttcagttcctcaagaccagcagtcaaccaacatatttctttcccagagtcccatgaataatcttcagactaacacagtagcccaagaagcattttttgcagcaccgaactcaatttctccacttcagtcaacatcaaacagtgaacaacaagctgctttccaacagcaagctccaatatcacacatccagactcctatgctttcccaagaacaggcacaacccccgcagcagggtttatttcagcctcaggtggccctgggctcccttccacctaatccaatgcctcaaagccaacaaggaaccatgttccagtcacagcactcaatagttgccatgcagagtaactctccatcccaggaacagcagcagcagcagcaacagcagcagcaacagcagcagcaacaacaacagagcattttattcagtaatcagaataccatggctacaatggcgtctccaaagcaaccaccaccaaacatgatattcaacccaaatcaaaatccaatggctaatcaggagcaacagaaccagtcaatttttcaccaacaaagtaacatggccccaatgaatcaagagcaacagcccatgcaatttcagagtcagtccacagtttcctcacttcagaacccaggtcctacccagtcggaat

SEQ ID NO: 83818 - DNA, 1087 bp, Homo sapiens
aattctctcatttaaaatggtgataatattacatactttacatggatttggggaggattaaatatggcaatgtataaaaatgtgtgtttgccattttaagctataaacttaaaaggaaaatgaagtcagaatgacagataataccttacccagttgaagtaagtagtttctaaggaggtagaaactcatctttaatgtttatataccaaggaatttatataggacttttgatatttaagcaaagttgtatttttagactgcttaaaggaaacctaagatgaattccagtgccagtctgtgaaaacctttttcttggactatcaggtgcctaacttttagtaatatacaaggagaatgcagtaatgaattttccccaacaactaataaatatcttttcatgaatctttactaatcagatagcttctatttttaatgtttctgcagactgtagtcagcttttaagcttctgttttcaatgtctctgcagactgtagtcagcttttaacctctggaccagctacattgcctgatcagttgatggccataagtcagccaggccaaccacaaaacgagggccagccacctgtgacaacacttctttctcagcaaatgccagagaattctccactggcatcctctataaacaccaaccagaacatcgaaaagattgatttgcttgtttcattgcaaaaccaagggaacaacttgactggctccttttaactggatatgtaagtattgcattttggcttcttattgaaaagcatcagattttattcttcttaacagatttaggttaagtaatagtagttctaatcttttaaaatgtggctttctcacaagatgatacttttttactctgaataaaattattctgaatgatagcttatggtcatatagttaatacagaccaggccgggcgtggtggctcatgcctgtaatcccagcactttgagagaccaaggtgggcggatcacgaggtcaggcgatcgagaccatcctggctaacatggtgaaaccccgtctctactaaaaaatacaaaaaaaaaaaaaaatacagaccaaacatccctagtccaaaaatcca

SEQ ID NO: 83819 - DNA, 5459 bp, Homo sapiens
ctcccttcagctgtgatagatttttttaggtgtatgtgaaacagaagtgaatttcatgtttggacttgtgtcttatccccaagatatctcattgtgtatatgtgcatattccaaaatccaaaaaagaaatcagaaacacttctgatcccaaacattttagataagggatactcaacctatattggacattccttctgcctctgagcttctttgccttggaataacaaaacatctgatgagtatgcaaaatgtgtttcctttgtactatatattggatataaccatgcctcacttatcccttcctccagaaataaatattgagtcagaaaagtctgtggaagatcaaatatgataaagttttacttacagtaccataatatactttaggatcattcagggtgtcagaaactttataaatgcttccctccctagtaagttaaattaaactttttctcttttttagaaattccacgaagaaaatcctgattccaagatgtcctgagatcttgtggttccatgagaattattactttaaaaacaaaacaaaatataaaaaactgtgtttgagtaaactgatagattttactctgactgcaaaagagcacacctatgctgcttgttgcagtaactaaccaccaatgttaacatcttcatattttatattcctaataacagtgatgactgagaatctatttgagtttccagctggcagaattaattgttattattttcctaggcgcaatttccttaaacgtacagtttaaattcaaggctggaccactcagttattattgctattagaaaataatatatcatgtttacttttgttcttcattattttctttcctgcattgttttagtcaagtaatggcttttgaaaaagtaaagttcaataataactaaggctgtgatttttttcaatataaaaggcacagctgttggccaaagtgaaggaatcttttttcagttttattggagaaactgaagggtaacattctaacaagtaaactgtatgtgcagataaaagtactcttgatttaacacaaaggcagatgatacacttataaaactgggaacagctggaatgcttcttgattttattttttcagagagttgttagttctctgggtttctactaaggggtttagccataactgtgcatagaaaaataattatctgtaaaaaatgaaggggataatatatgataaattatgttctgatatcctcctacagtagtttaaattgacagaaaaatttgaatgttttcttcttaacccagtcttaggctggtattccctttttatatatatctatattacttttcacctctttttcactttactttagagaactattaatatactactggcttcatgaccctgtagcatctttggccactttaatctagggtgacctagcaatcctgcagcacagggcagagagtactgtcttaggaattattaggagttgattcctgagaaacaacacatttttccccatgaacggtgctgttctgaagtcttcaaatttttccctctaataggaaacagtataaattttaattaaaaaaaaaaggcaaactaaaatttcttgaaatatcacttctccctgatctgcagtgagtataaattcacttgtcacctcagtgctttacagtttgaagtggtcacttacctgatggttcccacaagccttaggctttacagggttgtatcattgacttaaaatgaagaattaacttgtgttacatctataaagagcaaaataacacactccagaacttggcagttgtagcattagttatacagttttgggtgttcttgccacccgtgggatgcctgcttctcactaccacctgtgtctggacacatgcttatgtctcattttccttttggcatgtggaaagctgtcaatgcagtgtaaggccaacgtgtgtgtggcttctatgtgttgagataatgttttggtatccttgtccgtttcatttattttttaagtgtacaaaaaataacctgttaattgttgaaggctacttttctgttctttttttttttttttttctatcctgtacatttagttgaactgtgcggaattgtggtgttggttttgtttacacagccagatttttccttctttttgttttgtgatgatcttcctttgttctttgaatgtgctcttttgtctttttctcttttttctcatgttttcttccctccacctccacccctttctttctttctctctctgattgagaggcattgaattacgttttcagtagtacaggcttcttgccgatatgaagggaacttttcagaaagagacctactctgggtcatttaattttgaatacagttttcaatcgttcaagttttggatggtttatatctaatgtgtgtttcatttttttggaaagctatattttgtatttaggaaatggtatactattttgctatttgtactgagtgagtacattggcataaatatagaaatttatatatatacatatatataaactattcttttttgccacacatttttgtggtaaatttgtgagtttgtctgatgttctaccacaacgtggcgtctgataacagtgagggggggtggggtttgttatgtctttattgagtatttaagtatcttttgaaacaaatgacctgttcatctgtggccattccatcaggcagttagttccttgatgtcagtagtgggctaaaggcagcttactgtgtgtttgctggagctttcactcagccaagtgttagagtcaggaaacccattgaggcaatggcgtcaaatggtgtttcacaagaatgagccattcagtctttgctcactatatatttaatattttattattgttgttattgttattattaattggctttctgtattctatgccttttatttataaagacactaagaaaacccatgtttgtaattttaataacatttttcccatcttgtaatatccagagctactttataaattctctgaaccaaaagtattttcctcagtgtatctcttctcccccagcccctattgggaaaaattacccagtatagttcaggttatgaggaggatcagccacacaatccagtgcttcagtttgaaaatgtaaaattctaaccctaaagtagggttggttgaaatttcagacaaagcaaacccagcaggtataaaaagtagtataaatacaaatctgtaagttatttttgaattttctgaacttttttctaagagattacataggagactaaagaaatctatctgttcaagttctaattaggatgattgttaatactgcactgtggatgaagtggcgactggcttgtgtgctgacttctgtggtttagcaagaggtttattgttatcaaatgctaattggcaatgccaagtcactgggaccaattttctgttttataatatctaagtttagaacagaatatatacctgaactgtagtggtttgatcggatggagacagaaaacccgatttttattctcataaattttgtggttatttatacaagggctgtgctatgctaccatattcttgttcaataataataggtttgttgttttttttacattgttaaatgttccttacccctaaaggtcaatgttaagtacaacattctgaaaatacaatttggctacgaagagtattcatcttctttgaagctcagtggttgatatttgtgctaataatgcaatttcctgattactgttacaagttatagctacatatgggagagactcagtgagccagcaaaggccatagaaacaacaatttattaaatgtatttatggcagaaggacctaaataaactgtgagccaccttttcttctttatattgttacatttaagtgttcttgctttcagcaactcacattaatgcttggagcttatctctttctctctctctctctctctctctgtgtgtgtgtgtgtatgtgtgtgtgtgtgtgtgtgtgtttccttattgtcattccattatatatccacaccaacatgggtgacgataattcaaagtcatattttgcctctaagcttgatcatgttacctttatgattaaagtatcatgttatttagccaatgcaaatctgttttaaaacaaatagtttaaaaaaagaacaagtttttaagggctttattatagaagaagtattaatgaaggactttccttcctccctccctttcctcccctccctgcctcccttcttcccttccatctccccctcctccctgccttctttgtttctccttcccttattcctccctccctcctttctcccttccttcctttcttccattcatccttccttgccttttatttttattttttgtaatatcacatgtgctgtagtttggaattttattctagtgcatttcttgctcatcagaacctcagctaatctacctaggaaaaatagtatcaaaggaaatgagaaagttgtatctgagtccctccagaactaagataattctttttgaccatttaagcctttataaatgcgttttgaccatttaagcctttataaatgcttgttttaggaaagtgaatctgttagatgcatcaacaaataatgaccaggacaaaacgatttaataattaaagtctcaaatcaccatggttatacattttcaccagaaatagtaatcttacaatttttcatttttctgatgaagatttctgttccaatatctgtttcctaatagattttttaaattaattagctttcctctgctttatgaccacaggttttatccctaaccgagacagctgtcttatatctgcatgccttagactgtgtggagggactccatgaagaaagaccataggttagaaaaataactcatagtatataccctagtaagtgggttagtagaatctcataacatgtattaaaaagaggttttcttctctgcttgtttgtgtcactagagcaaaattgtagagataatgctcataatgcagtaaatatcagaataatatctacaatatcatttgtggatggtcccaggtcccagtgctctagttactttacttctttttttttttttgagatggagtcttgctctgtctctcaggctagagcagtgtgcgatctcagctcactgcagcctccacctcccaggttcaagcgattctcctgcctcagcctcccaagtagccaggattacaggcaccctccactaggcccggctaattttttttgtatttttttagtagagatggggttttgccatgttggccaggctggtttcgaactcctaacctccagtgatccacctgcctcggcgtcccaaagtgctaggattacaggcatgagccaccacatccggcctaattacttctttaatccccatttatttttatgccattctagcctcatttattaataaaattatgtttttactttctctttcaggaaattttttaaattaatattt

SEQ ID NO: 83820 - DNA, 3494 bp, Homo sapiens
cttccctttggcttaagaataaaagaaaaggtacattgctagaattgtttctttgggagagggtaaaagattacagaattagactgttcagcctttatataaactaaatttgtcttcatctcaaccagctaatggtaggtcttatctgaatactcatgagaattttagcatctgtgaaactccatgcaccagatgtgtgtaaatttcaggaagaaagtgttgaaagcattttctctgatgttaattagatggaaataaatcactaaaacatagtttaggtaaagcctgattatgccacttttttttaactagacagggcaaagttgtttatgttagtgtacttcttgtctatcctcagttaatttacctagacaaaaagtgtcaaaggaaatgagaaaaaggttatatctgactccctccagacctaagataattccttttgatcagatacagtcagatggagtgccttggtttttgttaattttgcctctattccagctccttaccacagcggtggtgcttaaagaaaggatcatcagcaacaggtcaggatagttctacctttgggatagggctgctttccccgtgctagtatttctgtgactgttagtggcactgaggactgcaaacttttatgcaatattcttaataccctattgatattatgcactttaatcattccaaagaagccaagaatgctgtatagtgatgattccttcctaatgaattcatcttaactatttagaatgttatgtcccttttcttttggatagccaacttggtataaatgttatatggatttttctaaaatgactatataggacttaagactttgaaatgtaatttacttataaggggaaataattatgctttagcacatcattttagaaacgtcacattttagaaacattcagcttgctaacctacatgtttgggaattcattaaaaccagttgtctatatattttgtgccatgtatataagaacattacaatatatctttttctacatatgtagtatgtgcaaccagtggttctcagagtatggttctcagcccaccagctagtatcagtatcacctgggaactagttagaaatgtaaattctttggccccatcccagacatactgagtcagaaactctggaatagggcccccgcaatctgttttcacaagccctccaggtgattctgatgcacactttaaagtttaggaaccactgggctaagactctgttgagatatagagtttttcttccactcagactgatatagttatacattgttcttcatgtaaattcagcttaacctggttatctataatcttttattggcaaaagttaattctcagtactgcctatagagatacagtgtattttatgtacatacacaattagtctaattcttgataattcagttaatttagtttggcattttcctaccacttactaaaaggtttacattaaatgactgatttaaatatataggtgcaatgttctatgtttattttaattgttatgacatttaagtagctaatataattgaccggtgctaaagtctcctgtttatccataaaatgggtacattatgggcagtgtaatacaagctttcttttcattgcctagtactttaccagcagaccacagttttgccctggctagaccaaccctcagaacaaaatcatcattccttgtatttatatttgtatctgagatagtaaacaagatggctggccaggtcaacatggcaccttaacttatttttttaataggtaaaacttcttcaaaagtagcttgctttgtataagaactaagctatcagtatagatatagctatccttggagcttatgtttcagacaagaattatttactaaaataaataataaacaagataatgcattatacaatttgggcatttctcgtttctcaagtgtatgcatcatggtaaatataaactaaccacaagataggtagattgattcatttcattttaatctccttgtgtaattcagtacctccataattgttctaatcttcttcccactgtttacaaattaccagttaattaactcgtgaaagaaaaattcacatatcagaataaaaataaatgtatactcactttataaaaatcaccactgctgtctttccttaatactagcagtggaaatgtaagtggcttactctacaaattttggtgctggcaaatacataggcaaactgttgggagctgctctagttacattcctcccttcttattccctttttctcttcctcactttattgcataacatattcctgtacccaaagcattctaccacagttctatttgactcccacttgtaataactcctttaaaaaattccatgtttaaccatatgaccctgcttgcttactcatattctccctccctctccccttcctttctctctcttccagaagtcatttgcctggtttgaaatattttgtagggattgcttattatattattttagctgatgaacctcaggacaacgtctacacacacacacatacatacacgcacacaaaatctcagctgttgaagagtgggcttggaatcagacttctgtgtccagtaaaaaactcctgcactgaagtcattgtgacttgagtagttacagactgattccagtgaacttgatctaatttcttttgatctaatgaatgtgtctgcttaccttgtttccttttaattgataagctccaagtagttgctaattttttgacaactttaaatgagtttcattcacttcttttacttaatgttttaagtatagtaccaataatttcattaacctgttctcaagtggtttagctaccattctgccatttttaatttttatttaattttatttgcttgagcacactgatcaaccactgaactgccttcttccattgtcctgcaatgatataagggttacatttttgtgtatatggctttcatagttgggatttcagagcactgataccagatattttcagtttgttctctgggggaatttcatttgcatctatgtttttagctatctgtgataacttgttaaatattaaaaagatattttgcttctattggaacatttgtatactcgcaactatatttctgtaaacagctgcagtcaaaaataaaacactgaaagttttcattttgcagtggatagctgtcttttttttcctcaaactttgtgaatggaattgtgtgcatgaacgacagttttgagcagcatgagtatatggctgaaattataaaatcattagggaggaggtgtgaaatatagacatatttctgagtagttattttgtgcctaccattttgccaggtagagtataagtgactcagtgtgacagaatttttgttttacgtataatttaaatgtttcatgtttagtaaagcaatacatatacacggaggtgcttttgatgaaaaccaagtctccccatcccttagtcccatgcccagagacaatctctgtttattctttt

SEQ ID NO: 83821 - DNA, 1076 bp, Homo sapiens
aaggtagctcgtggtgtgacgaggtgcccctcgagaaagtgccgtgatgtgaagggcattgattctggagccagactgcctgggtttatctgccatggaccagctgggtgaccttgagcaagctgccttaacttgcctcagtttccccatctgtaaaatggagacggtgccatcctcccaggactagtgatgtgaaccctacagaacagggcctggcggtgtgtaggaagggttcgggattcacctaactgcatcctgctcgcttgcacacttccttacctgcccctcctgtggtttatctgtccctcagagggatgcggcagccctttgctgacagcttcagtggcctccgtctttgtgacatgtgtggtgcggttcagcccttccctgtttcttctcctgaggcccgagacccaccttgtgctctggggaggcgtttgctgcctgtggctttggtacagatcatctccttttgtgtctcccaggacaacgtctgacatgagccgagtgttctgctcacactgtgggaacaagaccctgaagaaagtgtccgtgaccgtcagcgacgacggcaccctgcacatgcacttctcccgcaaccccaaggtgctgaacccccgcggcctccgggtgagtggcgcctctcccagtcccctcccaacaccagagtgaaaaagaacagaaaggacaaaagaaaacctagtctagtcgtttctgcaagatgggcgattgaaagcctgtgacctaggtaccaagacggagtggggagagtgtgtgacagatgccatctcatgagaagcgaccggttattcaggcagtagttgtgaaaggctacagtagcggctcacgaagtgggaactcatttggagtaaggcggaggttagatttgtgcaggagttgaaggatgggcagggtctcgggaagcccatgacgcagagaggaacgggtgtggaaagcacagcacggaagagagggccggacgggctagatgagcagcagctgccgacgcagagaatcgggagggaaggattggaggacgaatgagtggcactggcttctcccagcagtaaaatagc

SEQ ID NO: 83822 - DNA, 1490 bp, Homo sapiens
gaactggtgctgtgcagcgcttcttttcctggttctggaaaccacctgtgccatttggtgatttttaattttgcttagaggctagacaatcgtcatataatgacaacatttgtatagtacattaaatgtttaacgtttactatttatgatttttttatgatttttttttcagtatatataatgccatgtggtcagtcaggttcttaacacagggagagagggttttcagcccagcaatgagtatatttggcccagacaaaataaaatgtctgttgagagagcttgctaatgacaggtcatggaaaatgacgaacacaggctccaggacggtgttagaaagacacctgggccttcgtcctcgtttacacatcttgagaggcctccccaggctgagtttccttcgcaaaagccaaggaatatgggcaaggcagggtttgtgaagttcccttaactgtaattacaaaatgaaatgtgaaaagaaaattgatttcttctttaacttgtggttgtagaatgttctgctgcagatggggctgcacgtgctggcggtgaacggcatgctgattcgtgaggcccggagctacatcttgcgctgccatggctgtttcaagtatgtagctggtgccctggccctggtgccctctgtggaacactcttcctgtttctttttttgttttgagaaacagtctcgctctgtcacctaggctggagtgcagtggtacaatctcagctcactgcaacctctgcctcctgggttcaagcaattctcctgcctcaacctcccaagtagctggaactagaggcacataccactgcacccgactaatttaatttctgtatgtttttagtagaggcggggtttcaccatgttggtcaggctggtctcgaactcctgactccaagtgatccatccacctcagcctcccaaagagctggggttacaggtgtgagccaccacgcctggccactattcctgtttcttctacagacttgtttaaagagaaccctacattatgtgtgtttcttccacctcatcattcctctggggcctgggttccgtctccacctgggcactgagaacttggggacagaggttgccagtgacctcccaccgtatctcagtggcatggggttagggacatgggttctggaacagtgagcctcattctttagcggtacataccgaaatgtttgtccttggaatgtctgggatttgctttgacaaaatccacaagtagaaggagtgggtgggggtgaagataaaataagactggccatgaattgatagtttttgaagctggggggtgatggatacatggaggtttgttgtgttttgtctgctttatacttgagagattttctgtttacaaaaagaagagtacatgggttcaaatccagattctgtgtcctgctgctgctgtgattttgcaaaagctgattcacttctttgtgcttcagattcttttctttgagacgaggtctcacgatgt

SEQ ID NO: 83823 - DNA, 2071 bp, Homo sapiens
ctgggactctaggcgcgcaccactacacctggcaggttttatcttcaaaggtgaagaaggcactaaggtctagatgctgaagccgatttcccaggtgtcccccaaggtttgaccccgcccacacttctctggctatgcgggcggcgtcgctgcgcatgcgcgcgagtagagcagggaggtgctggcgcggccgccaggaggcgcagctaagtcgcggctgctcttcctggttcccagaggcccagacttggacataggagccggcgcaagctccgtgcgcatgcgcgctcccctctcacgcagccaacatggctccagtggagcacgttgtggcggatgctggggctttcctgcggcatgcggctctgcaggtacggggagctccctccgggacgagagagatctgggctggccgcccctcccggagtgcgtggagtcgcgcggagcgttgcttggtgcgggtgggtctgagctggggcgttctgtccgcaggacatcgggaagaacatttacaccatccgggaggtggtcactgagattcgggacaaggccacacgcaggcggctcgctgtcctgccctacgagctgcggttcaaggagcccttaccggaatacgtgcggctgggtgagtgcctctgccctagcgttgacgggaagctggggtccagggcgcagatggcacccagttgggtgcgagttggggtctagctgccttatcagagcagtagatttagagccagcactttctaggagattgtggtaggagagaggcttcctgggtctggagtcctccagtaactagctgtatgctctcgggcatagcattcaaatttgggcctcgtttacctcatccgcaaaatgggaataataattgtatctgtctccaaggttgctgtgagcatgaactgaggaatatggcagtcagctcagtgtcaagcactttgcagacaagcaataaatttatttggatttaaaataagagtttggatctcttgctattactctcgtccatttcttttcagtagattgggctgatgactggatacaaagatctgcacctggcagagctttaaaaagggaatgctttgcattgtattaaatgtgaaagaaaattaagctgggcgcggtggcttacggcctgtaatcccagcactgggagaccgaggcgggcgcatcacctgaggtcaggagtttgagaccagcctgaccaacatggtgaaaccctgcctctactaaaaatacaaaattagctgggcgtggtggtgtgctcctgtaatcccagctacttgggaggctgaggcaggagaattgcttgaacctggaggtggaggttgcagtgagccgagatcgtaccactgcactccagcctgggcgacagagcgagactctgtctcaaaaaaaataagaaataaagaaaattaaagaattgtctcttggcttaggagtcagcgttgttctcttgttgggaatcaaggtgatacccaggaaaggcccctcagtggttggaagtgttttagaggttagaggctgatagtggagatgatgttacctcctctgtttgtgatttctacgattttctccaccaacttagtagctctgtgatctttgccaacttactaaatctttccgaggaaatactaatagtacttttgaagaatggcaaaggatgaaatgcattaacacataaagcttttaatgcagtgcctagtacacagtaagtgcacagtaaattttcgttgctgctaatgtctgttttttaggaaataagagcaatatacctagtgttccttgtaccagggtagcaggagacatctttctgttaatttcaggaaattttaagtgtttattatggatgactctggagaataacagcagtctgacatgtattatgcattaagcacatgctttttgtttcctcatagactactacaattacaagttgagcatactgaatctgaaatccagaatgctcctaaatctgaaacttttttttttttgagatggagtctggctgtgttgcctagcctggagtgcagtggcacgatcttggctcactgcagcctccacctcc

SEQ ID NO: 83824 - DNA, 2645 bp, Homo sapiens
gggtggaccacgaggtcaggagatcgagaccatcctggctaatacggtgaaatcctgtctctactaaaaatacaaaaaaagtcgggcatggtggcgggcgcctgtagtcccagctacttgggtggccgaggcaggggaatggcgtgaacccgggagggggagcttgcagtgagttgagatcgcgccactgcactccagactgggcgacagagcaagactccgtctcaaaacaaaacaaaacaaaaaaaagcttttctcgggacgggagaggccgtgtagcgtcgccgttactccgaggagagaccagtcggtagaggagaagtccaggttagagggaagtgggaggcactttgctgtcttcaatcgaagttgagggtgcaaaaatgcagagtaataaaacttttaacttggagaagcaaaaccatactccaagaaagcatcatcaacatcaccaccagcagcaacagctgcagccgccaccaccgccaatacctgcaaatgggcaacaggccagcagccaaaatgaaggctttgactatttggcctgaagaattttagaaaaccaggagagaagaccttcacccaacgaagccgtctttttgtgggaaatcttcctcccgacatcactgaggaagaaatgaggaaactatttgagaaatatggaaaggcaggcgaagtcttcattcataaggattaaggatttggctttatccgcttggaaacacgaaccctagcggagattgcgaaagtggagctggacaatatgccactctgtggaaagcagctgcgtgtgcgcttttcctgccatagtgcatcccttacagttcgaaaccttcctcagtatgtgtccaacgaagtgctggaagaagccttttctgtgtttggccaggtagagagggctgtagtcattgtggatgatcgaggaaggccctcaggaaaaggcattgttgagttctcagggaagccagctgctgggaaagctctggacagacgcagtgaaggctccttcctgctaaccacatttcctcgtcctgtgactatggagcccatggaccagttagatgatgaagggggacttccagagaagctggttataaaaaaccagcaatttcacaaggaacgagagcaaccacccagatttgcacagcctggctcctttgagtatgaatatgccatgcgctggaaggcactcattgagatggagaagcagcagcaggaccaagtggaccgcaacatcaaagaggctcgtgagaagccagagatggagatggaggctgcacgccataagcaccaggtcatgctaatgagacagaatttgatgaggcgccaagaagaacttcggaggatggaagagctgcacaaccaagaggtgcaaaaacgaaagcaactggagctcaggcaggaggaagagcgcaggcgccctgaagaagagatgcggcggcagcaagaagaaatgatgcagccacagcaggaaggattcaagggaaccttccctgatgtgagagagcaggagatttggatgggtcagatggctatgggaggtgctatgggcataaacagcagaggtgccttgacccctgctcctgtgccagctggtaccccagctcctccaggacctgccactatgatgccggatggaactttgggattgaccccaccaacaactgaacgctttggtcaggctgctacaatggaaggaattggggcaattggtgaaactcctcctgcattcaaccatgcagctcctggagctgaatttgctccaaacaaacgtcgccgatactaataagttgcagtgtctagtttctcaaaacccttaaaagaaggaccctttttggaccagccagaattctaccctggaaaagtgttagggattccttccaatagttagatctaccctgcctgtactactctagggagtatgctggaggcagaggacaagggaggggtggtattaaacaagtcaattctatgtagtatattatttaatcagttctgtgtggtgcattcctgaagtctcaaatgtgattgttgagggcctggggaaaccatggcaaagtagatccagttagagcccattaatcttgatcattctgtttttttggtttgtttgttgtttttttttttttttttttttgtccatcttgtttcatttgcttgccctgcccccgagatggagtcttactctgtcgcccaggctggagtgtagtggcacgatctcggctcactgcaatctctgcctctcgggttcaagcttgtccaggctgatcttgaactcctgacctcgtgatcccctgcctcagcctcccaaaatgctgggattacaggggtgagccaccgtgcccaacctcacttgctttcttatccttacactcccccagtcccagagaaactgccacatacaccacaaaaaccaaacatcccccaatgaccttagccgcattgctccattcactcccaggtgagaattcaggtaaacgtccacaaaggtcacaggcaacgtacatacggttctattatatcccatatattaccccttcatgtcctaaagaagacattttctcttagagattttcattttagtatatctttaaaaaaaaatcttgtgttaacttgcctccatctttttcttgggtgaggacacc

SEQ ID NO: 83825 - DNA, 1643 bp, Homo sapiens
acctgaattctcacctgggagtgaatggagcaatgcggctaaggtcattgggggatgtttggtttttgtggtgtatgtggcagtttctctgggactgggggagtgtaaggataagaaagcaagtgaggttgggcacggtggctcacccctgtaatcccagcattttgggaggctgaggcaggggatcacgaggtcaggagttcaagatcagcctggacaagcttgaacccgagaggcagagattgcagtgagccgagatcgtgccactacactccagcctgggcgacagagtaagactccatctcgggggcagggcaagcaaatgaaacaagatggacaaaaaaaaaaaaaaaaaaaaacaacaaacaaaccaaaaaaacagaatgatcaagattaatgggctctaactggatctactttgccatggtttccccaggccctcaacaatcacatttgagacttcaggaatgcaccacacagaactgattaaataatatactacatagaattgacttgtttaataccacccctcccttgtcctctgcctccagcatactccctagagtagtacaggcagggtagatctaactattggaaggaatccctaacacttttccagggtagaattctggctggtccaaaaagggtccttcttttaagggttttgagaaactagacactgcaacttattagtatcggcgacgtttgtttggagcaaattcagctccaggagctgcatggttgaatgcaggaggagtttcaccaattgccccaattccttccattgtagcagcctgaccaaagcgttcagttgttggtggggtcaatcccaaagttccatccggcatcatagtggcaggtcctggaggagctggggtaccagctggcacaggagcaggggtcaaggcacctctgctgtttatgcccatagcacctcccatagccatctgacccatccaaatctcctgctctctcacatcagggaaggttcccttgaatccttcctgctgtggctgcatcatttcttcttgctgccgccgcatctcttcttcagggcgcctgcgctcttcctcctgcctgagctccagttgctttcgtttttgcacctcttggttgtgcagctcttccatcctccgaagttcttcttggcgcctcatcaaattctgtctcattagcatgacctggtgcttatggcgtgcagcctccatctccatctctggcttctcacgagcctctttgatgttgcggtccacttggtcctgctgctgcttctccatctcaatgagtgccttccagcgcatggcatattcatactcaaaggagccaggctgtgcaaatctgggtggttgctctcgttccttgtgaaattgctggttttttataaccagcttctctggaagtcccccttcatcatctaactggtccatgggctccatagtcacaggacgaggaaatgtggttagcaggaaggagccttcactgcgtctgtccagagctttcccagcagctggcttccctgagaactcaacaatgccttttcctgagggccttcctcgatcatccacaatgactacagccctctctacctggccaaacacagaaaaggcttcttccagcacttcgttggacacatactgaggaag

SEQ ID NO: 83826 - DNA, 1039 bp, Homo sapiens
agatggggtttcaccatgttgactaggctggtctcaaacacctgacttcaagtgatctgcctgcctcagcctcccaaagttctgggattacaggtgtgagccacggcgcctgacctccttttcttcttgaggaacctccagtgaggtgttctgctgctctgctgcatttgcttgtcccaaggtcgccagtgacctccgtgttgctaaacccaatggtcacttctcaagctgtaatcactggccttatagattggacacaatgaatcgatccttcctgcttgacatatgttctgccttggtttcagggtgccacaatctgtgggttttctgtccatctctctggtcactctcattcagtctcccttgctcgtttttctcttccccagtctgcaaacatgggggtgctccatggtggctttgtcctgtgttcatttgttaatttacccccctttcattcacaagcacatccagcctccttgctttaaatttggcctatatgcccaaaactcacagctagggcttctcccctggcaaccaaagacagtatttacgtctaattaacatcctcaagtgaactgttgaaatctgagtcacctgcttcccacagctttctacatcttgaagcagtgacaattctgtgtcactcaggctaaaatcctccgtgccttccttgacttcattttctgtcccatcagcacctcctgtctgcattgcctttaggatatattctgggatccgaccatctgtcactgtgactgctgctgtcacccatgtccaagtcacttcttgactgttattgcaaaggcctcttaatgggtctccctgcatctgctgttgtcttcctatggaacggttctgaatgcagcagccagaataattcaaaccagaagtcaaattgtattgctactccataaaaaccaaagtcattccctatgagcccaccggccccctgtgatgcctttatgtgtgtctgctactcctttgttacctcatctcaaacatgctcctccgctttccagatccctcgggccacaggtct

SEQ ID NO: 83827 - DNA, 1016 bp, Homo sapiens
accatgcccggctatttttctttgttttgttttttttttaaataagaaacagggtcttactctgtcaccctggctagcgtgcagtgccatcatagctcagtgtagcctcaaacttctggctttaaacgatcctcccaccccagcctcccgagtagctaagaccagaaatgcacaccactatgcccagcttttttgtattttttgtagagacagggtctccctttgttgcctgagctggtctcaaactcgtgggctcaagcgatccttccacctcagcctcccataatgctggagttacaggtatgagccatcatgcctgacccctgcttttctttccttcttagacttaagagtttcttcgtgttgggtcagggttttgtgtgagagtttctttcttctctgtagggcattttcttaggatcatgagccttgcttgtagcaggggcagggcctgacgctgatttatcagctttcgtgcagtaagcacctttgaattccgagctagaggctggcgctgaagtggtgaacagcagacagcatccctgtcctcctggaatttagactctagagaggaaaacagaaagtcgaacaaatggtgcaaactattccagttgtgacagatgcgatggagcaaagtacaggatgatctgggaatgcatcatgggagactttgcctggcctgggtggggtgtgtgtgtgtgtgtgtttgtgtgtgtgtgttcatgcatgtgtgtttatcaaggaaggcttcctggaggaagtgacacctggacaccagaaagagaaaaaggaatcgtctagaggaacaagagaaaatcattttaggtggagggaacagcatgtgggaagctttgaggcaggaacaagctggttgctgtcaagtcacacaggaggccaacggcagggaggaggcaggtgctagatcagtgctgtccaatagaaacagaatttgaggtgtgtgtataatttagaatttgctactagccatattaaaaataagtcaaaacataggccag

SEQ ID NO: 83828 - DNA, 1035 bp, Homo sapiens
atatatcttttcagtctctcttaacttagaggtagtcctccctctttttactccttgcagtgtgttgttgaagaaactggacagcgtgtcctttacagtttcccacactttggattttgctgtgtgtctccctaaagtgtgggtctgtgtgtctctctgtccctcatgggcagatctagaggctgagactgaccttggttcttttttttctctggtgtggtgatatgtgtttccatcaggaggcacatggtgtctgattgtctctcttggtatgctggcttttaaagggctgtctttcaaagggcacagtccctggggacttcccagagtcttttccctagattctcatattcagccttactgctgtctgtcgacctccataaagtagcattagaaggtattggtaaccagttattacttagaacagaagggtgcagtcgtatagctgaagaagtatgtttgctgattactgaagttagcatgagcttaggcctttggctttcttgctgaaacctgagcctcttgccagctgaatattttcattatatatgttccatttagtcctaattgaatcagacttcctctagccatgctctaaattggcactgtttgcagcccctgcctgtgacttgcccaaagctttgattccaagagatcagtggccctgcggggcctggctgatgtgctcggtggggagtcctggggctttctaactcatgctagggaggaggccagggtagaatcttcttagacactgtgtttcttaaagacactgccatcacctttgcccaaaccaccatctgctcttgcctggattaccacagtgacctcctacctggtcttgtgtacctcagcccttctcctgtagccagactggttgtgctacagcaggaatcaggtcacttccttgctcaaaaccctgtaacggagtcccgtcccatgttgagcaatttccaaggaccttgtcccaaggcctgactgggaggctctggctacctcctgccctcatctgctcctctcttccctcgctccact

SEQ ID NO: 83829 - DNA, 1055 bp, Homo sapiens
agtggagaacatgcagctgaccctgaacctgcagacggagaacaaaggcagcgttgtctcaggcggagagctgacaattttcctggacgggccaactgttgatctgggaaatgtgcctaatggcagtgccctgacagatggtgagtgccgccctgctcctcaggactgtgccgggacagggtggggctgggcgggggccaggaggtgctgagagcttggttcttactaggccatcttggtttgattcccactcagcctggcccatagctagcccggactcttcttagctccgtggatcagtatcacaacatgaattttcaagggtcacagtaaatgtccagtctttgtaaatatgtaattgtttggtttgatagcagagaaaaacatctttcatcccatgtggactttggaaaatgaaatatctttatcaaatgtgactttggcccattattttccttcccaatacagttacactttttggggaggttgaaggtgtttttatgagaggcattggttgggaagggtacgctgtgttcttctagagatacacactagcaaaatacagacagagcagggaatttggagagtgtcccttgctctgtcccgaatgttggtagtttgtttcttttgatctagtctgaaattagtcacctttggatctagcaggaaattatttcatgaagtccgaggtctgaaatgggttgggtttctccataatttttctcattaaatgttttgttagatgtgatgtaaccatggcactttccagacaccaagcaggatttctgtagcttcaaaggggtgcaatttgaattgcaattcaagggcagttggttggaatctcagtggccggatgggccttgactgtggagaaaaatcccttaactggactgatcggtgtttggggtgctttggtgcttggagaaaaacatgtgtcattcactcattcaacacatatatatgtaattgtattctggtatgcactaggtcttagaccaggccctagccagatggcagtgggccaaattcacatggtctccactgcttcaggttta

SEQ ID NO: 83830 - DNA, 1632 bp, Homo sapiens
ctcatgcctctaatcccaacactttgggaggccgaggctggaggattgcttgaggccaggagtttgagaccagccaggacaacatagcaagactcgatctctagttaaaaaaaaaaaaaggaaagaaagaacactctaatatactgtagtcccccattcattcaaggtcctgtgtagtcctttctggtctggagctatagtaaaaggaggcagtgagtgggccagattcaaacagggaatgatgccagtagcgagaaagtgaagaggcttttctggcgcacctgtacaggttgtgctctgcattccttgggggccagccccatggagattcctcctgtgcacagtggaggttgatggggatgctcatctcctaagcggcaacagtgtcctatgcactcataattcagggtcaggggatctcaggtcataggacaaatcacaggctgctgtctctgttcagggtacctcaagccatcaatggccacgttgagcaggtgaacacttcccctctgaactctctagctctctttgaagtttgggagggcatttgagcactcttctcagctaagcccaacatacggcctggaagtagattggacaagtcaccatttactataccttctctctcaaggtgagtttttttagtctaatgaaattgccacctttgagaaggttgctctgtactctagggtgcgcaaaaggaaattgtttgtcttccggaagtctttctgtaatttagaatggacttggcagcgattttatttttaccttccctgtcatttgtgaggctggcagtccagaggtagggtgtggaatggagccgtaaattgcgcttgcagtgaccagaaggggcccattttaactctaattgtgcctttcccggttcacttctccttttacccgccctctcctttttttttttttttctaatccacatttgagtggggaggaagaattgaggggggtgcaggtgggagtaggtttatttattggcgcttctctgggtggtggacactgtttcttttcccattacggcttccttttttattttttcatgcttctattttaagtgcctgtttctttctggttctgtcttgctggaaactggcccagctccactgaatttttttttccatgcagctattaaaagacaatgaccagttaagagtgtgctcagaggaaggacagacttgaggtggggagccctcttggttctagtaatcctaggcaaataccgcttacccggattggaatgtgagaggagttttattaggtaattttactttttgtgcctgttttataggaggaaaatcaataatcaggttgttttgttttgtttgtttgttttgagacagactttcgctcttgttgccccggctggagtgcaatggtgtgatctcggcacactgcaacctcagcctccagggttcaagtgattctcttgcctcagcctcctgagtagctgggattacaggcattcgccaccatgcccggctaattttgtatttttagtagacacgggatttctccatgttggtcagacaggtctggaagtcccgacctcaggtgatccactcacctcggcctcccaaagtgctgggattacaggcgtgagctaccgcgcctggccct

SEQ ID NO: 83831 - DNA, 4373 bp, Homo sapiens
tatccatttttataaaacaagagtgaatggcagcccgtctgtataaatattatatttctaagttttagaagtggtggaatcaagaaatagacgaatggcatagcccttcattgagacttgtatgggatgatttacttgctaattctttattgaagactttacccccaaattttacatattttacttcttccctaaatgtaatttccatacacatcagtcagaagttgcatcagccgtggtcagattccgattcttcatctttaatgcgtttaaggcccagtgactcgctaggtcttagttttctcatttataaaattagggcaaaagttgggcgtggtgacatgcatctgtagtccctgctactcaggaggctgagccaggaggatcgtttgagcctaggaggcagatgttgcagtgagctgagatggcaccactacactccagcctgggcaacagagtgagaccttgtgtcaaaaaaaaaaaaattacagcaaaagtatatatctcataagttgtcataaggcataaattacagacacaccttcaagatattatgggtttgtttccagactatcacaataaagtgaatatcacaaaaaagcaagtcacatgaattttttggtttcccagtgcatataaaagttatgtttacactatactatggtccataaaaggtacaacagcattatgtctaaaaaatgtatacactttaattaaaaaatactttattgctaaaaatgctaacaattatctgagcctttagccagtggaaatctcttcactggtggaaggtctctcctcgatgttgatggctgctgactgatcaggatggtagttgttgaaggtcagggtggctgtggcaatttctaataagacaacatgaagttcacagcatcagttgactctccctttcatcaaagatttctctgtagcatgcgacgctgtttgacagcattttagcaacagtagaaaatctttcaaatttgcagtcaattctctcaaactttgctgcagctttatcaactaagtatatggaatattctaaatccttgttgtcatttcaacagtgttcacagcattttcactagaagttgattccatctcaagaaactgctttctttgctcatccataagacacaactcctaatctattccagtcttcttatgagattgaagcagtttagtcacatattcaggcctacttcttattctagctctcttgctatttccaccacacctgcatttccttcctccactgaaatcttgaacccctcagagccatctatcagggtttgagcttcttccaaactcctgttgtgttgatatgttgacctcctcccatgaatcacaaatgttcttaatggcatctagaatggtgagtcctttttagtttttatttattttttatttttttatttttttgagatggagttttgctcttgttgcccaggctggcatgcagtggcatgatctcagctcactgctgcaacctccgcctcctgggttaaagcagttctcatacctcagtcccaggagtagctgggattataggcatgcaccaccacacccagctaatttttgtattttcagtagagatggggtttcatcatgtgggccagtctggtcttgaactcctgacctcaggtgatctgcctgccttggcctcccaaagtgctgggattgtaggcttaagcctttaggaggtttttaatgggttttggccacatccatcagaggaatcatgatctaaggcagttatagccttataaaatgtatttggtttttttggggcatgttttttggggttttttttttttttcgttttttgtttttgagatgcagtctcactctgttgcctaggctggaatgccgtggcatgatcttggctcactataacctacacctcccgggttcaagtgattcttgtgcctcagcctccaaagtagctgggattacaggcatctgctaccacatccggctaatttttgtattttagtagagacagggtgtcatcatgttgggcaggctggtctcaaactcctgacctcaagtgattcacttaccttggcctcccaaagtgctgagattataggcgtgagccactgtgcccagccataaaatgtatttcttaaatagtaagacttgaaaggcaagatgactccttgatccatgggctacagcatggatgttgtgttagcgggcatgaaaacaacattaatctccttgtaaatctccatcagagctcttgggtaaccaggtgcattatccatgagcagtaatatgttgaaaggaatcttttttcctgaacagtaggtctcaacagtgggcttaaaatattcagtaaaccatgctgcagacagatgtgctgtgatccaggctttgttgctccatttataaaacacaagcagagtagatttagcataattgataagggccctaggattttcagaatgttaagtgaacattggcttcaacttaaaatcaccagcaacattagctgctaagaagagagacaacctgtcctttgaagctttgaaggcatgaacttctctttatctatgaatgtccaagatagcatcttcttgcaatagaaggctctttcgtcaacattgaaaagctgttgtttcgtgtggccaaccccgtcaatgatcttagctagatcttctggatagcttgctgcagcttcttcctcagcattttcttcacttggacttttacgctgtgtttgagggatctttccttaaacctcatgaaccaatctttgctatcttccaacttttcttctgcaacttcctcaccactctcagccttcatagaattgaagagggttcgggtcttgctccagattaggctttggcttaagagaatgtcgaggctggtttgatcttcttttcagactactccctatcgctttctccctatcacttttcttggtaaggctgttttactttcttatcactcaagtgttcatcagagtagcacttttaatttccttcaagaacttctcctttgcattcgcaacttggctaactgtcacaagagtcccagctttggcctgtcttggctttcaacccaccttccttatcactaaacttaataatatctagtatttgatttaaagtgagagacatatgactcttccttttgcttgaacacttagaggccaatgtagggtataaggagagagagagagagagaacagccaggtggtggagccgtcagaacacacacaatatttattattaaatttgctttttatttatttatttatttattgagatggagtctcatgctgttgcccacgctggagtgcaatggcatgatcttggctcactgcaacctccgcctcccaggttcaagcgattctcctgcctcagcccccccagtagctgggattataggcgcgtgccaccgtgcccagctaatttttgtatttttagtagagctggggttttaccatgttggccaggctgatctcaaactcctgacctcaggtgatccacccgcctcagcctcccaaagtgttgggattacaggtgtgagccaccgtgcccagcccaaatttgctattttatatggatggggtttgtggcactgcaaaacaatggcaatattaatatatcaaagatcactggtcacagatctccatgacggatataaataacaataacgaaaaattttaagttggaaaagtttgacatattctgagaattaccaaaatgtgacacagagacatgaagtgagttcatgctgttggaaaaatgattgagaaatagacctgctggatgtcaggttgccacaagccttcagtttgtaaaaaatcacatagtgcaactcaacaaaacaaggtatgcctgtatataaaacatgcagagtgtttggcagggtgcctggcacagagcttttatctttatgaataatttcatggagttttaattatgcagcatgaatatatacatttttcacttcatttttcttttttaaaattttcttatagaatgggggtctcattttgttgcccaggccggtctccaactcctggcttggatcgatcctcttgtctcggccttccaaagtgttgggattgcagacgtgagccactgcacccagcctgtttttatacatggtttcatgtatctatgtgctcttctttgctttttaaaagtgacctcatactattttgcagttaatgttccataattcatctaaccattccttaattcttgtgtatttccctgttacaaaattctgctgtaaatacctgtatatagctttgtttcttgagtgaaattcttaagacaaaggatgtgaattttaaaaatgagctctagtgtgtattagcagaccgtctttctaagaggatcaatcatata

SEQ ID NO: 83832 - DNA, 1106 bp, Homo sapiens
caaggctggagtgcagtggcatagtcttggctgactgcaaactctgcctcccgggttcaagcgattctcctgcctcagcctcccaactagctgggattataggtgtgcgccaccatgcccagctaaattttgtatttttagcagagacggggttttgccatgttggccaggtggatctcgaactcctgacctcaagtgatccgcctgcctcagcctcccaaagtgctgggattacagttgtgagccactgcgcctggccccaacacattcctgttatgttgatctttcctgctactcttttgttgcaataaatgtaaatgtaaccacagtatgttagaaaaacttgataaagttatgtaaaaaaggtagtgttaatatatttatttcggattcatcctgatttcctttggacaggcattaatgacttgctgtacttttcaaagtcatgttttgtaaaactttttgctgtcgcccaatacatgtagtgtaacattgtagataccatgttagcctattaagtgaaaaacctagcaagtataaataaaattctcattcttagttgatctttaaagtatgatttgtgcatcttcagtgaatgatgaacccacaacagccactgatcccgaagaaccttccgttgttggtgtgacgtccccacctgctgcacccttgagtgtgaccccgaatcccaacacgacttctctccctgccccagccacaccggctgaaggagaggaacccagcacttcgggtacacagcagctcccagcggctgcccaggcccccgacgctctgcctgctgggtgagtagtcttctgtcccataacagatctctcctcctcaaagactgaggctcctttacgggggtggaaacaacgtggttatttattacctagtggctagtagcctctggggaggctgctgtgcattgaagcaagggaggtgtggaagaactgcttgttctacataaatcttaaaaagaatctcagtcgcctggggcagaatcaatgctaccttgtactgtgacttgaaatgaacagcttgactcaaagagtgtggcttttacggaacaaggagctcattttgctttcctgaatcattggagg

SEQ ID NO: 83833 - DNA, 1060 bp, Homo sapiens
gggggaagtcttctgtgttcatctagtgtttctcacagacaaaatcacgcataagcaaatagaattcccattatgctcacatcgtccgcttctatatcaatagcattggaacaaatttgcattttcaaagcaagcattaccgcagaactgactgtagtagcttcccagaaaaggtcaacttctcctagacagtacccaaaagtagaagtaaataaattcagtgtaaaacataaaggcccacagcaccattaatatccttgagaaagtggtaagcattatataaatacatttttgcatcctttatatataggttactatattctgggtaagtagagttattgtcagactgcatgcaaataacaggagtgtggggataagtggtccttggctgtattttgtactgatcgggcttgtgtattatctctgaatcacctgctaccttggcattctttcagtagtgcacataagccatcctcagcaccttgatcttatattagcttacaaacagatttgacttcataggtagagcagtataaaataaccatatgttgtgtttctgtattcacccagatctcgtttaagatactctgtaaatgaatcttatattacaaaaataaatgtgagcatgaatatatatgatgctcggaggagaggggtagtcatagaacctgtgactttaagccgggtgcggtggctcactcctgtaatcccagcactttggcaggccaaggtgggtgggtcgcttgagctcaggggttccagaccagcctgggcaacatggtgaaacccgtctctaccaaaaattaaaaaacaaaaatagctgggcatcgtaatgtgtgcctgtagtcccagctactcgggaggttgaggtgggaggattgcttgagcctgggaggtggaggctgcagtgagctgagattgtgtcactgcacttcagcctgggcaacagagtgagaccctgtttcattaaaaaataaataatagtaaagaatctgtgactttaacaggttgggtagacgaaaaagcctggagggcctatagatgatcttgtggaggggtc

SEQ ID NO: 83834 - DNA, 1094 bp, Homo sapiens
cttctatttaacaatgaaaagtaaaattgttgtgaggatcagctcccattgattctgattttattaggttggtgcaaaagtaattgtggtttttgccacgactcttttttttttttgagacggagtctcgctctgttgcccaggttagagtgcagtggcgcaatctcggctcactgcaacctctgcctcctgggtttaagcgattatcctgcctcagcctactgagtagctgggattataggtgcctgccactatgcctggctaatttttgtattttcagtagagacagggtttccccatgttggccaggctggtctcgaactcctgacctcaagtgatccatccgcctcagactcccaaagtgctgggatcaccagcctgagccacggcacccggccgccatgactccacaattacttttgcaccaacctaataaatgttgtttgtgtttatcagtctctggtgtctctccctttcctgtctgcctcctcttctcctcgcttcttataggtgtgtgtgttgggggggtggggggggtgcgttctgatagaataacaaacagaggataccaaggaaattttttaaaaaccctttaacgaaagagagccaacattgcatgaaggctgagattttttttaaaaggcaaggattcagaaaagggctgatcagtattttctgatcctagttcagtgctagtcagggagactgtcagtaaagacctttttggtctgttgatttgtagaattaagcaaaagatgaccatgcccctgtggaagctgggttggtaccagctggtagctgatttcccaggagaaccctgaacgctttacagatgatctactgactccaaaacaagacctgaagcagcaaacacttttacaccaaatgcgtcttcttttaatgtcttaaaataaccttttctatagtccttcccttttgcaaggtcactgctgtagctcagcacttacccagtgcctctggctccatgatgtagaatacgtgtgttttctcatttgttcctttgcctctgttgccgaatgtttttaatgtgttaactacaaaacagagttggaggaacttggattttatgagat

SEQ ID NO: 83835 - DNA, 1050 bp, Homo sapiens
ctgggcgtgggcagggcttgtgggaatgatttcattggaaaggcctgcgatattttttcccctcctgcgtgtggttcttggagaaagttggaggtggtggtgatttcagtcgccttggccgccttgagccggagctgagcggaggcactgggccgagcctgcttcccgggccttcctaccatgccagggctgctccctgcctccgccaccctggcacaccttcacccgcgtaccgcctcctccccgtcgctctgccttttccaaaactcacttgggccctccgtgcgcagggttcttttttggtttttctgtaaaaatcaaaacaaaaaacagagacttttgagaggagcagatgccacctaaagtcccactgcattccctgcaaagcgctcaaatgtggaagccagtcattggcatttttattttttattgattgattgattttttcaccagtggctttttgtaacctctgtgttctgctgtgtttcttgtgtttagtcttcgagtgcttcgactgaccatgatcccctgggccccctccctcctggctggggtaagtactgagttctcttcctggcccttggccttccgtcagccacggtgctctgtcctctcctcccgcgtgtcttccttccctgttcctgtccctctgttttccatctctcccctctccagcacactctctgggcatgccccaccagagcaattacaggtgatggagctgggcagctgggaaagtaaccaagctccaccgaaccactgtagcatccacccaccatcgctaaaggagtgtgaccctaagaaaagatgtccctgagcagctggggggctattggcttttggtcttgagtttcaaggtgtctactcaagagtccatgctaccactaagatattttgacactgcctaactcccaaatggatttgtttcagatctgtgaccgtatggttggaatgatccaccctaacaaatctttctttgcagctgagatgttggaggactttggtctaattttgactaatagaagccacctttttatttctgacatagct

SEQ ID NO: 83836 - DNA, 1008 bp, Homo sapiens
gtgggttttcatgccagttctgctgagtgatggtcaccaggtaagcacagctgatggagacttgaaaacagctctcgaatgctaagtgtggaaatatttgagatagaaatggaggagccgtggtcagagtcgatactgttaatgaacgatcagaaaaaaacccacaaaactgtcatagtctagaattaagaggaagaacattctggctaaaggccagggctccttctgaatctcagatccttggggatctgtgttggctgccccagggctgtggctggggccggctccccagggctcaccgagaatgaacaggaagaacagccagaccaagtgagagtgatcggcagcttgctaacccagcctgctggtgtccctctctgctgccccaggagagaccccgcatcttccccacacactgctgtgggactcaggacacctcgggttcagatccacatctgccctcggcagccctgaccctgggcctgtggctgaatatgtctgagtccctttgtcctaaaatgaggtcgagccaggtgttcctggggtctttcccagcccccaactgaaactgaatgccgcgaggcagccagccggccttgggaggcctccacacagcagcagtgccagaaatgacgacacaggcctcaagcccgctggacagatccccctggccctgtggttagccttggctttggcccttaacagggcagacgtggaggatctagttcaaagcagtagcttcggggctgggagcagcccctcccctggaaacctcttgggaagccttccttctgtgtgttctgaggtggtggtagctctgtaacagctctgggcacctcctgttctttctttcctttggctttcttttatttattttttatttacaaaatagagatgaagtctcgctgtgttgcccaggctggtctcgaactcctgggctcgagcgatcctcctgcctcagcctcccaaagtgctgggattacaggcgtgatccaccgtgcccagcct

SEQ ID NO: 83837 - DNA, 1058 bp, Homo sapiens
gagcttggctttggctggttcttctctaacaggctgacaacagggagataaactcagacccagcacccaggaggtgggaacctcagggaaaggacaccggctctccgtgtttgaatctgatgttctttctttcttctcatgtggcagagaagagacaggacaatggacgggtgtattacgtgaaccataacactcgcacgacccagtgggaggatccccggacccaggggtaaggacttgggctgagaggggggccgggctgggctgggtctctgtgcagctccagcactgggcaggtggctttggactgcatcgtcccagagggctgatgtcagggacctttagccacacacaagtgtcttgagactctcaccgtacagatacactgttggcctgatgagagcttaaaaggggtttcttaaatagaccttcctggtggatggagggcggcccggctggcgggtgttgctggtctccatactgattgtgctggctgctgataattggattgcaaaaaggttgagggcatcctggtctcccaacacccccaagtgaagctgtgctggggcacagggtgcctcaggattgctggtggctgctcagtccaatgccatccatgcagggctgggtttttggccatgagataataagtgacctctccgtgctgcagaactgttctcacgacttgggtcatgcttcttgggtgcatgtcctcaaagtccctcatgggctctgcagagacaaagccacactttgaggacccagcctccaaccaccaaggtccagaaggtggggccagcccttcacccttttcttcccgtgtttccaggatgatccaggaaccagctctgcccccaggatgggagatgaaatacaccagcgagggggtgcgatactttgtggaccacaatacccgcaccaccacctttaaggatcctcgcccggggtttgagtcggggtaaggactttgtgcaggtagcagcagtgtcaggagccgaggcccaggctgtccttgttctggctctgggaggcccactttgggtggcccctgtggtgcg

SEQ ID NO: 83838 - DNA, 1825 bp, Homo sapiens
cactgcactccagctcaggtgacagagtgagtccctgtttctaaaaaataataatacatttaaaattagctcggtgtggtagcacactcctgtagtcctagctacttggaaagctaaagcgggaggatcgcttaagaccaggaattcgaggccgcagtgagccatgatcacaccactgcactgcagcctgggtgacagagcaagaccccgtctctagaaaacgaacaaacaaataaataagatgggatggggaggaagggactatcctgtttattccgaatgacactagagttatttctctaaaagcaagaagtctggctttatttctagattttcttttttattcttcaaggatcttaatgacagtcacttcctcaccttacattactaatctttaaattaacatagcaccagctttccttagggctgacaaagacaaattgttcattttctgagaaatcgcatgaacccctgaacatctttgctcttcctaggacgaagcaaggttcccctggtgcttatgaccgcagttttcggtggaagtatcaccagttccgtttcctctgccatgtgagttctggtactggggctcccgtggcagttggggttattgagttatttcagtgtgagttcccggcacagcagcaggtatcggaatgtttgtgtcttaggcgggcgcaagacacttgtctaacccggagctggctgtctctaggaagctagttttcattcctagggcacatgctattgcctcctggcccagcaggctggggaatgcctgttcatacagacaggagaacagatgaccacttgaggctcgatttaaagttcttttcttttttttttttcagtcaaatgccctacctagccacgtgaagatcagcgtttccaggcagacgcttttcgaagattccttccaacaggttagatcatggtgcccgaaaccagtggcaggccgacgccctcctcccagcaccccatctcctatcgcgtggcctgttaaacccacactgcagactttccagggcgtgagtcttggtgactgtgtctgctggatattgggccttagagtcccctgtccctcccgcccctgcctgctgtggaagggagagtggcaggctggcccgatgctctgtcttcccagatcatgaacatgaaaccctatgacctgcgccgccggctctacatcatcatgcgtggcgaggagggcctggactatgggggcatcgccaggtgagcttgagtgccccggaaggctgccctgtaccccgcttccccaggctacagcatcaatggccagaaagctgcctgccccctgctcacattccctcccaaagctctcatgcatcttcaggaatgggcacagtgtggcattcaaaatacgtgaacccgccaggcgcggtggctcacgcctataatcccagcactttgggaggctgaggcaggtggatcacctgaggtcgggggttcgagaccagcctgaccaacatggagaaaccccgtctctattaaaaatacacaattagctgggcgtggtggtgcatgcctgtaatcccagctcctggggaggctgaggcgggagaatcgcttgaacctgggaggcaggaggttgcagtgagccgagatcgtgccattgcactccatcctgggcaacaagagcgaaactccatctcaaaaacaaaacaaacaaaaaaacaaaatacgtgaatccatgtggccagtccattgggcctggaacaggggcctggggtgccccactgggctggacattaagcctttagttactgggtcatgaggcgacggaggactcctgggaggggcgaga

SEQ ID NO: 83839 - DNA, 1047 bp, Homo sapiens
ttgcccgcccaggtagagtggaaacagggtagttactattcaaacagaacctttgcagaaaaattattgtaataaacatgcatcgtgcccttgtgcagtgcacagcctaggcaactgagcatggtgacccagggtacaaggaccccctttaccattagaagctctggatattgtgatgtaaagtcttggaacacatcacctgggagccgacaatcacacgttttcccaaatatcatcctcaaatgcagttgccgccctggttcactgtaggtctgagcctgccctgttcactgaccagctgttcatataggttagcccgggtgcttgtcacagggctcgactccctgggacacgtgtccccatactaacctgagacacgatggtgaagagacacagctcctgtgcagatgtgcacgaagggacccattattcttgtcttttctgtctcttccctcacagagagtggtttttcctcctgtctcatgaggtgctcaaccctatgtattgtttatttgaatatgccggaaagaacaattactgcctgcagatcaaccccgcctcctccatcaacccggaccacctcacctactttcgctttataggcagattcatcgccatggtaagggggccccaggggtctgcctagttccctcctcctctccctcctcttccctctcctggtgaagtgtgccaggggcaccaggggaatctgctctttctctgagacctccaggaaggggcagcattggaggaggccctgggcctgttcaccaggaggcagcgtggcgtgaacggcagcccccgtggactggctcaccctctcggggctccaccctttgcccccatagagctcgtaacctaaaaatgcaagaagctagagagagttctggagaaaccagagctttctcagtggctgccctgtaggtagtgaagagtttccatgttgctttgtacaggacttgtcaagagggagcccagggtcgctgggccacagactttactgaacattaaatatgtgctctgttgagggccttgggatgacagggc

SEQ ID NO: 83840 - DNA, 2005 bp, Homo sapiens
ttattgtgtcaggaatgtggacactaatttccaggacactgcttcttttaaagcagattggctcttgccttccatgctatgatcccgaagtgaactaagaaatacttttgccatgtgaagttcatttagtgattgctatttggggtttgtagctgagcccaggcgttttatcaaaaggacctcctttggttcccatgagctcctttgactagctggtaaatatctcttcctttgatctcaaagtaatttttatgtcttaaaaaatgtagtattgctccccatccaaataattgaactaaagcaggctgacttcccacacctgacactgtagcaagagcacacataagccacttggaattaatctcaagaggctgaacttgctcatttttatttctgttcctcttcccacccacaaatcaacctgtccatttgtagtgggcatacgagctgggtctgtccaacgaggagccggttagtatcccgctacatgcctgcgaacacttctacctcctgactcgccccttggagacccctctgcagagcagcacaccaagtgaggacttgcacttttttaaaaaatcttgtttctttgccagtatcctgtcctctgaaaaggaaaactttctgctaaggacagcctgtgtctgaaagagtctttcatttctagagcatgttacagggaggtggacccaattctgacttttctttattaactctttatgaaaggatggccaaaatttccattaatacatttttttgtttttgtttgttttgcaagctaattttagtcctaaacagaggtcattgagaatatttggactgtcttgttgactttttaacttgaatgctatggatagtagaaatgtcataggtaaacaatagacttaggtgggttcgtggttccaagcactgtaggagagggttctcacatccttttgacggtcttcatgcctagaatgggctctgcaacccccctctctgttaaactttcgcttggcacagtgggagttacgtggtttgcttgtggggactagtcaaagcttctaggtaagggataatcagagaaacagtctccactgaaaggctaaatgggaggatcttcccccgtgacctcaaaaggtattttaaagctaatgaatgcctgtgttcattgaatgttctttcattaataaagccattaatgggtgtttttgtttggttgttctgtccatttagaaagctgacttgcctctaaacccttgttttttcttccactccccactccatgtcatttctccacctcagctattgtggatgctgatggaagaatttatattcggaactggcagggtggcatcctgtctgggggctttgagaagaacccgaaaccaattttcactgagggcaagaaccagctggagattcagaatctacaggaagactgggatcactttggtatgtgaactgcattataaccgtagtgccttatatttgtttaagatgttatatttttcaaagtattttgaagaatagttccttgtttaatgtttataacatcgccatgaggtacaacagtggttacagagggtgagtttgcctggtctgaggatggagttactaggtagcagattcaggggactaaaatcttagttaatagacatttgccttattcttttttaattttattcttagttttacttttttttttttatttcttgagacggagccttgctccgtgctcagactggagtgcagttgcacaattatagctcactgcagccccgaactcctggtctcatagctttttttttttcttctttttggtagagacatggtctcgccatgttgcccaggttgatctcgaactccaaggctcaagtgatccctttcaccttggcctcccaaagtgctaagattacagatgtgagccactgtacctagccctttgtgtgtgtttagtcatctctatcattttgtgtgtgtgtgagatggcgtcttgccctgtcacctaggctggagtgcagtg

SEQ ID NO: 83841 - DNA, 1028 bp, Homo sapiens
caagcaattctcctgcctcagcctcccaggtagctggaattacaggcgcccaccacaacgcagagccagtttttgtgtttttagtagagatggggtttcactatttggccaggctggtcttgaactcctgacctcaagcgatccacccgcctcggcctcccaaagtgctgggattaccggtatgagccaccgcacctggcctttaaggcctgtaatcccagcactttgggaggccaaggcgggcagatcgcctgaggtcaggagttcaagaccagcctggccaacatggcaaaaacccgtctaaatataaaaattagctggatgtggtggcgcacacctgtaacgccagctacgtgggaggctgaggcaggagaattgctggaacccgggaggcagaggctgcagtgggctgagatcgcaccactgcactccagcctgggtgacagagcgagactccatctcaaaaaaaaaaaaaataataataataatatagttacctagttccaaatttaaaaagatgaaagagtctctaatgaagaatttccctctgacccttgatgggctttctttttttaataaattcttacggaaaatttcaaacttttaaaagtggatagaagctgggcacagtggcttacacctgtaattccatcattttgggaggccaagatgggaggatcactggagcccaggaagtgaagaccagcctgggcaacatggcgagactggagactatgtgtctactaaacaaacctggcgagagtagtatgatgagcccccatgtacccattatccagctctggtctggtttcatctttttctgctgtccactggattatgtcctgatggtagatttcctttaaagcagggtgaaagtctgtcttttgcagctattccaatgcagaacattgcctttttttttttttttcctgagatggagtttcactctattgcccaggctggagtgcagtgtcacgatctctgctcacttcaacctccgcctctcagattcaagcgatttttctgcc

SEQ ID NO: 83842 - DNA, 1080 bp, Homo sapiens
ttggcctcccaaagtgctaggattacaggatgagccactgtgcccggccacaagtttttatttaaaaattagacactaggccgggcgcagtggctcacgcttgtaatcccagcactttgggaggccgaggtgggcggatcacaaggtcatgagatcgagaccactctggctaacacagtgaaaccccatctctactaaaaatacacaaacaaaattagccgggcgttgtggcgggtgcttgtggtcccagctactcgggaggctgagacaggagaatggcgtgaacccaggaggcagagcttgcagtgagccgagattgcgccactgcactccagcctgggcaacagagcgagactctatctcaataaaaataataataataaaataaaataagacactaatgaacattaaataagccagtcacaaaaggacaaataccgtgtggttccacttatatgaagttgctagagttgtcacatcatagagacagaaagtacaatggtggttgccagaggcgggggaggggagctattcttgaatgagcacagagttccagaaatgcaagaggaaaagagttctaggatggatggtggtgaaggttacaccgcagtgtgaatgtacccactgccactgaactgaatacttacaaatgggtaagatggtagccacgatgaaaagtttattttaaatttatgagaccagttctcttgagtgatttgtagaatggctctgaaaacagttacagaagaggagttagaaaaatgtttggagcaaaggagatgtggtcacgtaactgtataatctttaggtgacagaaaaaaacccattggatatttagagtatatttgtatgtgttttagtcttatttcttcatagatgaggcttataacttttttgaaacaagatcttactctcacccaggctggagtgcagtggcaccatcatagctcactgcagccgcaagttcctgggctcaagggatcatcccgcatcagactccagaagagctagaactaactgcaggcgtgtgccaccatacccagctcttttttttttttttttttttgaaacgaagttttg

SEQ ID NO: 83843 - DNA, 1075 bp, Homo sapiens
gagtgcaatggcgtgatctaggcttactgcaacctctgcctcccaggttcaagcaattctccttcctcagcctccgtagtagctgggattacaggcgtgtgccaccacactggctaattttgtatttttaatagagacagggtttctccacattggtcaggcttgtttcgaactcctgacctcaagtgatccgtctgcctcggcctcccaaagtgctgggattacaggtgtgagccacctggctcactttgaaacttttttttttctgtagagacggggtcttactatgttgcccaggctggtctcaaactcctgacttcaagcaatctcctgcctcagcctcccaaagttctgggattacaggcatcagccaatgtgtctggctggcttctatgttaaatacctcctagggaatcttatcatctggggtaaaatcctcatagtagtcttttgagagcagtacacagacccatgttcgtttcttccagaaaagttaaggaaagtgcccaaaactattcagctggtctatggcaatttaggatcttttgattctgtttgttctcgatttgtagaatattaattttctcaaatctcacacctgagccccaacacgtgccctctgtctatataggtaccttgccgaatggatggtacatggttatccctcagaaaacgtttgggaattggacctgaaacgttttggagccctccagagcagccgcacctttctgcgccaccgggtcatggaagtcatgcgtaagtgaagctttatcgcagttgctcctagttgcaggtatcttctcggtggcccgtgttgtcattcagaaggagcaaagttttcctcagttctttaacaagtgctttgagttgggcatttgatttgactgtttcaggcctgagttaaggggctttatgctcctcatgatatatacgtaacattttctttagtgcatcggaccttgtttcattctgagaacaagaaaatagaataggagttacagttggtacatagcagcttcataaatattctaagcaatgccttcttcccggtctgccttgagagaccgtatgtcga

SEQ ID NO: 83844 - DNA, 1036 bp, Homo sapiens
aggttgcagtgagctgagattgcgccactgcactcagcctgggcaacagagtgagactccatctcaaaaaaaaaaacaaaaaacaaaaacaaaacactgatttcttaagaattctggtatattttagtgtttcatctgtattgtaacatttttctgaaattttagctccttgtttcaggtttttaatttgctagagaggcctgtttatcataagaatcaatagctagcgttccctggagcttcttgcagtggagtaggtctgcaaatgttgtcacatgggaattggctgattgaattttctcaatgaggttcattgctggtggggccatgtggcccagccaggtgctctcacgctcactctctctgtttcattccctaaccctgcagtccactggggatcaggcattagaagttctacagtacctcttctccaatgacctggatgtgcctgtgggccacattgtgcatactggcatgctcaacgagggtggagggtatgaaaatgactgcagcatagcacgactgaacaagcgcaggtgagatgagctgccgtcccgctctgctccctccaacatgttgattccttaggggtgctgtagcagaggctctcaggcgcttctccgggaaccataaatcccagagtctaagaatcattacatgaaatcaaagccagtttattagcagtcctaaacaaaagaaatcaccaggaggaaaagaaaaaaaagcccaccagattatgtaccctactgggagaagatgccttgtcttttttcttttttttttttttgagacagggtctcactttgttacccaggctggagtgcagtgatgcgatcatggatccctgcagcctggacctcctgggctcaagtgatcctcccacctcagctttccaggtagctgggaccacaggtacacgccaccacacccagccagtttttgtatattttgtagagatagggttttgccacattgcccaggctgatcttgaacacctgagctcaagcaatctgcccaccttggcctccaaagtgct

SEQ ID NO: 83845 - DNA, 1051 bp, Homo sapiens
catgtttgccaggctggtcttgaactcctgacctcaggtgaaccacccacctcagcctcccaaagtgctgggattacaggtgtgagccactgcgcccggccttatttgtttattttttacactccaagcttgctttatttaataagcattaggatatctttgaagtggatttagcttctctaaatgtaaagtctttatgctttttggtttctgtagcactggattaaaatttgaagttacaggattatgacacacacaaaaatgcctttcgaagttaggtcccttctctccatgcagtgtggcctcttttctgtacacagagtaacttctgtgtctgtggcatcttcagggaagaaatggcgtaggtgaatctctgaacttcctacataattttctttcctataagtggcaaccacagctgagtgaaacaaactgtaaccgaatgaaagcaatgacaacggaatcctccccaggaagctgctgattagagagggccaaacggacagacatcttggccacctgtaacgagcaacttccaggtggttactgatggagactctttgaagttcacccaaagtgggatccacctacaaattgtttcacagttttccttcttctccgaggcaaagtgaaagcaacagaaaactctccactgttagctatcagtggacccctcccagcgtttgctctgctgcttggaggagtgacccatacgctcaacacctggcgagtgctgcatcctgtcagcctcctgtggaagcggttcacttcggtgctgtccaggactttccactttcctttataggaacggtgattgcgtcagtggccgctgttagggaactgagctgctatgtaacgtgttctgagaatcagaagcccatctttgaccccaggatagcagattaattatgtctgtgggcatcgggcatcatcttttgtatggcaggcggccagggtttgtctgctgattcccccagagaagacactcgccttgtcctcattgtgcctgctaccctcgactaacacaaggacctggcaaagaggaatattt

SEQ ID NO: 83846 - DNA, 1469 bp, Homo sapiens
gcacagtttcccaaaagctggcagggttgtgggaggaggcggctgtgccccattgcagtgacaccaggggacccttcccacggtgctgctctctgtgccgagggtctgagtgtcgctggatgactcggcgtttcctttctttcttagggcatggatttcattggtcgcgacgccctcctgcagcagaagcagaatggagtgtataaacgcctcaccatgttcatcctggacgaccatgattcagacctagacctttggccttggtggggagagcccatttaccggaatgggcagtatgttggcaagaccaccagcagtgcctacagctacagcctggagcgccacgtttgcctgggctttgtgcacaatttttctgaggacacgggggaagagcaagtggtgacagcagatttcatcaaccggggagagtatgagattgacatcgcgggataccgcttccaggccaaggccaagctctaccctgtcgcctccctcttcacccagaagcgccgaaaggatgacatggagctgagtgacttacatgggaagtgatgccaccagggcagcctcacctcctccccatcatcttgtcctagagtgggcgtcaccttggagcttctcttccttccgcctctgttcctcttctggagcctttgcctcccatctcttatctccttgatataattttgaacttgacctactttaaacttttttgctctgcagccttccttgcccttccacctcctcctcctaatattcactctgggctcttcttcccttcccacccctcactcagcttctcgtggtggcaggaggtatgtctgacaggacagaagcaagctccactgtggacatgagtgatggtgacagctgctttcaaattctgcatctcaaggcagggcaagccggggtggtgcaggtctcagggcacgagtccctctcccttgggttccattttcttggagcagcctattagttctggtggggttgccgtgtgtcggatgcagccctgaggggcagctcgtgcctgcagcccggcagctcgttctcctgttctgctgtgctgtgggctggcactcgatacctctggcaagaggatgattatctacctcactgataagaggcatcgcatggacgttctctggtctgtagtggagacaagcagttaacctagcaccatcctcatcctccctgcagaagccattagcagacctttgggccagggcagcctccctataattttcttcatctcttgctaatctctataataaggttgctttttctttcttagttgagtaaacaagtaagccacagtgtttgaaagggaaaaaccatattgccttgtgtgttgcttttcccagtcaaaagggtctgaccttagaaagtccccaccagtgatgctgagtgttctgctatggaaacaatgctgcttttctctcagctgtccaaagttcagccgttcctccttc

SEQ ID NO: 83847 - DNA, 1184 bp, Homo sapiens
gcagtggccatggccgccccctgtaccagccgtaaagtctgtctcggcctccagcagtatcacccagggcaaggagtgggtgatggctcctccatcctttctttccctgcattcctccctcaatcccatcttctgtgctgactcccccttcccttcctgtcttctagaatgcagccaatcggggcttaaaagccagcgagtgggtgcagcaggtgtcaggcttgatggacggtaaaggtggtggcaaggatgtgtctgcacaggccacaggcaagaacgttggctgcctgcaggaggcgctgcagctggccacttccttcgcccagctgcgcctcggggatgtaaagaactgagtggggaaggaggaggctcccactggatccatccgtccagccaagagctcttcatctgctacaagaacatttgaatcttgggacctttaaagagcccctcctaacccagcagtaactggaacacacttgggagcagtcctatgtctcagtgccccttaaatttctgccctgagccctccacgtcagtgccatcggtctagaaccactaaccccgcattgctgttgatcgtcacgctcgcatctatagataacggctctccagacctgagctttccgcgtcagcaagtaggaatcgtttttgctgcagagaataaaaggaccacgtgcaatacttaatgccgcatgatctctatccctcttcccaataggggctggctcttttgacagcctttggcgtctgtagaataaatgctgtggctcctgctggctgctgtggtgttcacctagtccagccccagaacccaaaattttgggaacagcccctagggctgcctcaaacgtctgtggaggtggaggccaaataggtggggtgacttggagcaaggcgttcataattcagtagatgaggggtggaggtagttggaagcagagaagcctttcttggagctgctctcccccctcccttccagcaagatggatggatccggctaccctgcacaactgggaccgggccgttctccctccgggcctccaggggcgctgtagtgcctcccgccgctctctcgacagcccatgcgcagccgcgcgtctttaaacaacggaagaaccagtggatgcggcagggcgttgggcggaaggggttcgcacgccaagaaccgccatgcctgggga

SEQ ID NO: 83848 - DNA, 1964 bp, Homo sapiens
accccctcctgtctccatgtggaggagggtaagacatagattcgctgtggcatcggggcccccagcgctgatccatgtactcctaggggcgtgcttagtctgaggccgtgcagtagaggatgggtgctctttcatgggaactggtgtgtctgacttgtgctaaagccccaggggtggccacttcctgggggaaggggctcctgattctcgagcttgatcacccctgagtctgagttgggtgcagcctttgccaatgggcctgtgagcactgtgctccttgctggggcctggggctgccagcacctactccccacagacacttttggggtgttggggtatgttgctgcaaggcctaccgccggggcttccgcagctgctcagacacaggatagtgagtctgactcagacctcctgcttggggttgacccggtgtcccctcccaggccctcaggaaagcagagagcttgaagaaatgtctctctgtcatggaagccaaagtgaaggctcagactgctccaaacaaggatgtgcagagggagatcgctgaccttggagaggtaggggcggcttccctccctccgtcctcagggcctggtgcatgaaacatgccccgtcttcaggaaatcatctgtagtcagtcaggccctggttcttggtggaatgggcctttgggctgacttctgttgtcctgtagccttgtagcagggaccccatggatcctgtccttggaccctggacattccctgctgctcccagtgctgctagcaggagagctcttcccaagcatgtatgggcactggggtggagggatttggggaatgggctaaggctggcccctgcttccaagcctgcctggtatttatttgcatttcaagctgccaggaagcttatcacaggctgttcccagcctggtaaggaccgggcctgatttgggagcccagctttctgctgctcctttctctctagccctgcttgtttcacctgccacagctgctcctaaagggactggtctcaaagctttccttgctttcctttccaggacactagtcagggaggacttgggttcgggtggggtgggctggaccctgacatcccagcaagttgtggcccagattgagatggtcgtctattggttccaggccctggccactgcagtcatcccccagtggcagaaggatgaattgcgggagactctcaaatccctaaagaaggtcatggatgacttggaccgagccagcaaagccgatgtccagaaacgagtgagtcctggcagcaccagtggccagagtgtttcctaggcaaaggctggcagaacagccaggggttcggggcctgggcttttggtctgagctgctgttctggacttttttcttgcaggtgttagagaagacgaagcagttcatcgacagcaaccccaaccagcctcttgtcatcctggagatggagagcggcgcctcagccaaggcaacccaggggccagggtcccctcccctagggctcatcagctctctggtggctgacatgtggcctctgtggctctgagcgaagtggttgcctaagggcccacggtctgggattgagattgggaggagcagcagctccctgcatgtgggaggcatacctgggccagggtaggggcagggcccggcgctggggtcctccccacaggccctgggcacagcccctgctctgggaaggggtaggggtgggtggcaggccttctgagggctgcaaatgctcacactagtgagggtccctgctccagcaccgtggcctgagccaggtcctccccacaggccctgaatgaagccttgaagctcttcaagatgcactcccctcagacttctgccatgctcttcacggtggacaatgaggctggcaagatcacgtgcctgtgtcaagttccccaggtcagcaccacctcgcaccagtgggaagtgttaggtcttaaggttgttggctga

SEQ ID NO: 83849 - DNA, 1582 bp, Homo sapiens
ggactacaggcacacaccaccacgcccagctaattttttgtatttttagtagagatggggtttcaccctgttagccaggatggtctccatcttctgacctcgtgagccacccacctcagcctcccaaagtgctgggattacaggtgtgagccaccgtgcctggcctaattttgtatttttagtagagagggggtttctccacgttggtcaggctggtcttgaactcctgatctcaggtgacccacccgcctcagcctcccaaagtgctgagattacaggtgtgagccaccacgcccggctgaaaagaacattcttaatgtcatggttgagaccctccagggtctcctgcaggcctctggcaggcagggagcaagtaggatgtgcagagagtaggataggggcctgggggattgagttcaaggcttttctgcccagctgaattgggccttcaaacgagtcccactttgcctgattacctgtttgctcataccctttagactacaggaaacagctttcaaaaactttataccaagggttgggtatgttgcctcatgcctttaatcccagcacttagggaggctgaggcaggcagatcacttgaggtcaggagttcaagaccagcctgtgcaacatggtgaaaacctgtctgtactaaaaatacaaaaattaggagtggtggcgggcacctgtatccaagctacttgggtggctgaggcaagagaatcatttgaaactgggaggcagaggttgtggtgagccaagatcacaccattgcactccagcctgaacaacagaacaggactctgtctcaaaacaaacaaacaaaaaaaactatactatcttcaaagaatgaggatgaattaatgaacatttgaggttctctgaactgagaaataaagcctgtttaaggggttgtggtaagattttaaaagtaatcctccaaaattgtcacctagtgagcagaatacaaaaatggagcttaagttccactacaagaccaaaactgtcacgtagagcctaagggtaagactgtattggatattagggaccacaaagcactttcatgtttacctcatttgattttcacagcaactgtgtggggagaatcatccccatttgagaactgagaacactcaggctcagcgagctggtgtcccgcttggtgtcagaatactctcaagcccaggctttccctgactgtcaacccattcctgcttctcttgtccgctagtgtgaccccccagccaagggctgccagggcctctttcactatggactttgtgttctgccattcaggcacctgcggaactcgagtcatgcaggagcttttgtgatcgtgacggaagaagccattgccaagggtatccggaggattgtggctgtcacaggtgccgaggcccagaaggtgagcaggtcaggctggtttgtggcttatctgaagaaggcaagaggagcccagtctgcgaatccatagagcaaacactgctctgcgtggctgctgcagtcagagtgaaagtacaggctgggccactccccctgccccagtgtcctacccctgagtggcagaagaaacctgccacca

SEQ ID NO: 83850 - DNA, 1025 bp, Homo sapiens
caccccaccttgggagaaccagagctgttctagttaagtctgttcacatatgagatttggtccacagtttaacaaaatagttggaaattcccatactgatgcccttgactttgcacgtggcgtgtgattgaggaagctcatggcacgtgctaggccaagccaggttggaacccgagtcctgcctgcaggaccatgctttcctgcctcgtcgtaccgcacctccagggatctcttccagctcttttctgtcttcttggtctggcaggccgtctatacccaggattgccccctggcagcagcgaaagccatccagggcctacgggctgtgtttgatgagacctatcctgaccctgtgcgagtcgtctccattggggtcccggtgtccgagttgctggatgacccctctgggcctgctggctccctgacttctgttgagttctgtgggggaacgtgagtactgcagaggggcagagtagacaggtcatctaccttcatcctctgaggatgtaggtcttaggctggaccaactcttgtctgtctaaggttgaagtgaagtcctcagaaatgccgttgctaaatagcgttcccaagaatctcagcatcctagcatgctcattagatccctgtatctgaaggtaacatttcctgacgaaacattcccaggaggaaaagggggaaaacattgtattcacattaccacacagttgcttgctgttgtttgctgggctgaaactagcaagaaggcttgtgtgaatttgggattcagcaaggcctggagtgcttgttgagctcttgatgtgggcctagcccttcccattcctggtatctcacctaatttcctttgacagcttgggcggcatctggggaatgtagctccattgtctcagagcccccgagcaggccacgtggttgactcagctcagtttggcttgggatagccacttctgccaatttggattcctctgtatctctctgggcctttttgggaaggtcatggtggcctggaaagtttctgcttccaaatg

SEQ ID NO: 83851 - DNA, 2071 bp, Homo sapiens
aaaaaaaaaaaaattctaagatgctccttaatattggttatgtctgtgtgtgtgcacaaatatatttaattttttttttttttttttgagatggagtctcgctctgtagccaaggctggagtgcagtggcatgatcttggctcactgtaacctctgccttccgggttcaagcgattctcctgcctctgcctcctgagtaggtggaattataggcacttgccttcacgcctggctaatttttgtatttttttagtagagatgggatttcaccatgttggccaagctggtctcgaactcctggcctcaggtgatctactcacctgagcctcccaaagtgctgggattacagtcatgagccactgcacctggcctatttaatcatatttaatgatattaagggagtatgtgtgtgtgtgcaatttacatatgtaaagagaagttatatacacgagtttatattgaaaatataagaaaatttgtatgtttttaaggatttatttattggtctcttccttgacccctcttagaaaacagagtttacagtgaagaatgctcaggtccgaggagggtatgtgctacacattggaaccatctacggtgacctgaaagtgggggatcaggtctggctgtttattgatgaggtgagttgggttactgtggcccccattggatctggttagtaattatcttctcctctggctttaaattgtcctgtcactgttgggccgggtgtggtggctcacacttgtaatcccagcactttgggaggccgaggcgggtggatcatgaggtcaggagatcgagaccatcctggctaacacggtgaaaccccgtctctactaaaaatataaaaaatgagctgggcgtggtggcaggcgcctatagtcccagctactcgggaggctgaggcaggagaatggcgtgaacccgggagggggagcttgcagtgagccaagatcccgccactgcacaccagcctgggcaacagagcgagactccgcctcaaaaaaaaaattgtcctgtcactgttatcactccctagtgtaagtagaccgcaggggttaatttaggtgcatttggtggattgtgagggatgcaactaagagttaatctatatgttcccaagtcagtgatttcaccagtgatttcagttaagatcccgtggacttgttttcacggattgcttttctaacgtcacctacttctttgggagccaaggatgctgaagaatgaagaggtaggctctggcatgtgacagagctccagagtaagagtagcttaaaaccaggatagcagtgtatgttctaaaaagctcaagctgatacggaggctctgccccacagtcagagggcctggtttctcctcacctgtcactccaccttctttcctggggcattgcctttgatttcctggttcagaggatagctatcagatccattgtctaggccaggggttggcaaactttgtgtaaataactggatactaaatatttttggctttgctgaccacatgttcctggtgatgagtactcagctctatagttggagtgttcaagcagccattgaccatatgtaaatgaacaggtgtggctgtgttccaataaacctgtttatggctgggcacagtggctcatgcctgtaatcccggcactttgggaggccgaggcgagcagatcacctgaggtcgggagttcgagaccagcctgaccaacatggagaaaccctgtctctactaaaaatacaaaattagccgggtgtggtggtgcatgcctgtaatcccagctactcaggaggctgaggcaggagaatcgcttgaactcgggagatggaggctgcagtgagccgagatcatgccatagcactccagactgggcaacaagagcgaaactccttataaaaaaaaaaaactgtttataaaaatttataaacacatacatttggggaggctgaggtgggaggattgcttgaggccaagagtttgagacccagcctgggcaacaacatgagaccccatctctacaaaaaaataaaaaatattagttgggggtagtggtgtgtgcctgtagtcccag

SEQ ID NO: 83852 - DNA, 1128 bp, Homo sapiens
aagccctttgttgttgttgtttttttttttttttttttttttttttttttgagaccgagtcttgctttgtcacccaggctggagtggagtggcacaatctcggctcactgcaagctccgcctcctgggttcacgccattcttctgcctcagcctcctgagtagctgggactacaggtgcccgccaccacacccggctaatgttttgtatttttggtagagacagggtttcagcgtgttagccaggatggtctcgatctcttgaccccgtgatccgcctgcctcgacctcccaaagtgctgggattatagggggagccaccgcgcccggccgcgaagccctttcatattgtctaatgagtttgcttccaaaatacaattggacaattaggagctaagaagagtttgcgaaagagaatccagcaaaagtcagccaagaaggagtgaaaaggtcattgaccccactgtcccctttctatgcatttcccttgagcagtatttgagaacacagtggctacggtgatggctctgcgcagggagaagatgttcgtggaagaggtgtccacaggccaggagtgtggagtggtgctggacaagacctgtttctatgctgagcaaggaggccagatctatgacgaaggctacctggtgaaggtggatgacagcagtgaagatgtgagccaacagttcttccttgttagccgaggagggccaggcgtggagccggggagctgcttttgccccacagtgctccaggccttgggagcagacctgacacacctttgggttgggttccatggtatttctgaagccgagggagctgttgcttgtacctgttgctttcctggccatcgggtaccctcgtaggagtatttttgcagccagggtacaagtttcctacaagctttgcacattaaaaaggagaggcagctctctgaaggggagatgtccttgtagaaaactcagcctcgagctctgccgctgctgaatgagttactttgtctccctaggcttcaggttccttatggaggcttttagatactcaaagatgcggctgggtgtggtggctcatgactataatcctagcactttgggaggccaaggcgggtggatcgcctgaggtcaggagtt

SEQ ID NO: 83853 - DNA, 1035 bp, Homo sapiens
agacatggatggctttgaagaggagaggaaactggcccaggtaaagaacttggagagtgaacaggaaacccaacaccttccaacccagcaccacttggctgcagactgagcatgagtttccttccattaaagtctttgaagtgctttttcccctagatcagtggttctcaagtgggggcgagtctgccttccagggagtaattggcgataatgtctgaagacatttttgattttcacaactaggggcagatcctgctgtcacgtacttggtagaggccagggtgcccctcagcatcccacactgcaagagaagtttccacaacagagaatgatctggccccaaatgtcagtagtgccaggattgaaaaaccctgttctggcagtttatgctgggcatagtttagcaagttccagtcctttggagtcccttttctcctactttacggtaacttatgcttgtttctcttgctgacagctgaaatcacagggcaagggagctggtggggaagacctcattatgctggacatttacgctatcgaagagctccgggcacggggtctggaggtcacagatgattccccaaagtacaattaccatttggactccagtggtagctatggtatgttgctgtgctccttccacatctgagcattctgccccgtatctggggggtatttgaaagattgtttctcaagattagctctccagcagactgctgacagcctctcctggagtgccgtacagtcacgctatgcacttttatacacataggcacccttggctggaggttttcttaactctattttgaaataattattgtcacaggaagttgtaaaaaaaaaaaatttgtaggaagggtctcacacccttttatccagtttcccctaattgtaacatcatgcaggaaactgggcaattgacattgatacaatccacagtgactatcagaatgctattaggggcctggcgctgtgcctcacacctgtaatcccaacactttgggaggccggggcaggtggatcacctaaggtcag

SEQ ID NO: 83854 - DNA, 1075 bp, Homo sapiens
gatgtccaactatgacactgacctttttgtcccttactttgaagccattcagaaggtactggtgctattgcaaacattgtaaacttctgtggagttttccaggctgtactcttaacagtgctgtcaaagaaaaaatgaccatatgctttgccagccaagggtacccatttccatctgcctacttcattgttaataatgtgaggctccacaaattggtgttctaaatgtcttaagaacctaattaaatagctgactacaaaaaaaaaataataatgtgaggctctagacctgagacagtataatttttgagtgtaggggctggctggagtctctctacttccccaatgtcacgttcttggggttataggatctggcaagaccggcatcctttctgctaatgctcctcaatcctccaggaacctccttgggcaaggtagcgccagaaagtctgcttcctaaagggctgcctcctgattcttatctatagggcacaggtgcccgaccatacactgggaaagttggtgctgaggatgccgatgggattgacatggcctaccgggtgctggctgaccacgctcggaccatcactgtggcactggctgatggtggccggcctgacaacacagggcgtgggtaagtatgctgcacactgggtggtgtttggagcggcaccacgtgtgctatgtgtgactctttatgaaacttttctttgtgtgtgagattgagtgttgctctgttgcccaggctggagtacaatggcgtgatcttgcctcactgcaacctctgcctgctgggttcaagtgattctgcctcagcctcccacgtagctgggattataggtgcacaccaccacgcctggctaatttttgtacttttagtagagacggttgttttttttttttttttttttttttttttttttttttttctgagacagaattttgcttttgttgcccgggctagagtgcaatggcccgatcttggctcaccgcaacctccacctcctgagttcaagcaattcttttccctcagcctcccgaatagatgggattacaggcatgagccaccatgccta

SEQ ID NO: 83855 - DNA, 1045 bp, Homo sapiens
ggctcatcgcagcctctgcctcctgggttctagtgattctcctgcctcagcctcccgagtagctgggattacaggcatgcgccaccacacccagctaattttttgtatttttagtagagacaaggtttctccatgttgatgaggctggtctcaaactcccaacctcaggtgatccgcccgcctcggcctcccaaaatgctgggattacaggcatgagccaccacgcccagcttctttagcaggtttaatgtgcaggcttagcattagtacttgctgaaggttggaacttcttcattaaaaattctaagaattttttttttttcttttttgagacagagtctcgctctgttgtctaggctggagtgcagtaacatgagccactgtgcccggccaatcctaagaatttcttttgcggtggttgcaagtctgggcagaactcttgtcaggggctgtaactggacttatctttactcctttgtcaggctggatgacaccaaaatcctcccaggcaacatgaaggataacttctgggagatgggtgacacgggcccctgtggtccttgcagtgagatccactacgaccggattggtggtcgggacgccgcacatcttgtcaaccaggacgaccctaatgtgctggagatctggaaccttgtgttcatccagtataacaggtagccttgggttcctactccattcctttccttgagctgagcaggggaggaggaactcggagctgtgtagctctcttctcagctaaaagctcatttctttatttctcagattacctgtctgatctctggaacaaggatgggcctattctttcatgaactaaaccttatcgcacataatagcttcttgcgagctattcctataatgtcatgcttgctgtacttcgggctgctgttttttttttttgtttttttgagacagagttttcctcttgttacccaggctggagtgcaatggtgtgatcttggcttactgcaacatctgtgccctgggttcaagcgattctcctgcctcagccttccgagtagctggg

SEQ ID NO: 83856 - DNA, 1412 bp, Homo sapiens
cataccaattttcaggataagttcttccagaaagatggtataagccctgaacttcagagactggtgaagaagcccacgttttaccacatcaacctgtggctgttagatctggcaggcctttcccctctgcaggtggtgtcactcgtggtggtggggactgttagggagctaggttcaaggagaaactgctccatgagaggctaccctctgctttggctccaccaggccacctgttctgacaagtgtctatattccaggcatgttaatcatgaactgcacagttagtgtgtggtcgtctcttcctgctagtgtgtggccacctgacatcacttgcaccctttaaaagttgaactgctgtccttctcttttagtttaaacccattttcctgaacacaattgacccatctcaccccatggcaaagctgagcagagctgccaatacccagaagtgcatccgggctgggggcaaacataatgacctggacgatgtgggcaaggatgtctatcatcacaccttcttcgagatgctgggctcttggtcttttggagattactttaaggtaagttcagagcagaagaaccactagggttttgaggaaaatggtcttttccacactgggaactgggttctaattttgcatgttttaaaatatgaaatatcatctaggtgattcaggaatgaatggcatttattaattctaagacttcctggaagtagtacctataatttggtgatttcagtatatatttggatttcttacataaactgatcttgaatttgaatttagagtgaacatgttgtgattttgtatctgtgttcctagcatctggtctcatactaaatagattttggtttggcaatgttccatatctttctctctgttctttttgtaggaattggcatgtaagatggctctggaactcctcacccaagagtttggcattcccattgaaagactttatgttacttactttggcggggatgaagcagctggcttagaagcagatctggaatgcaaacagatctggcaaaatttggggtaagaatgcacatcacttcttgagagtatggaggagtgaaatgacactcagtgccagagtggggttttatgacctggaatatgtggtcattttgcatctcagggttccttttgagatgcacatggggaggagtgaggctagagaatcgcttgaacccaggaggtggaggttgcagtgacctgagatcactccactgcactccagcctgggcgacagagtaattatctttagatgcattaatatctttatttatttatttatttatttttttgagacagagcttgctctgtcagctaggctggagtgcagtggcacgacctcggctcactgcaacctctgtctcctgggcttaagcaattctcctgcctcag

SEQ ID NO: 83857 - DNA, 2025 bp, Homo sapiens
tctgtcacccaggctggagtgcagtggcgcgatctcggctgactgcaacctccacctcctgggttcgtgccattctcctgcctcagccttgtgagtagctgggactacaggcgcctgccaccacgcccggctaattttttgtattttttttctagtagagacagagtttcaccatgttagccaggatgttctggatctcctgacctcgtgatccacccacctggctaatttttttactatttgtactgacaagatcttgctatgttgcccagggtggtctcaaactccagggctcaagcaattctgccacctcggtctcccaaagtgctgggattacaggcgtgagccaccgcgcccaacttgtgaaagagctttgaagtcataaagttttttctctctccaccagttcccttgtactttcactttcagtaagctgtgcctccaaagtggggctacagcatccccactccctggtaatctaatggctggaaggcagccgtttgctgttagggttcttgggggatgtaggctacatagaggtaggtacattcctgctacatacaggtggtcccttgtacagataggcccatccccaggactattgctgctgacagccgcctcaccatgacatcaggccaaacctagagaccctgactttggggctagtggaactttgcagttctaggcgtgtacattaacacagagctgaagggatctttagagataatctcatatggacccctcctttttttggtgaagtgactccctcaggacttgaagctagaactcaaaccccggtctcctgagcctctctccctcttccccagttggactaaactgagggtttttctccccctttttttctttttttttttccttctttttttgtttttttgagacggagtctctctctgtcgccaggctggagtgcagtggtgtggtcttggctcactgcaacctccacctcctgggttcaagcgattctcctgcctcagtctcgcaagtagctgggattacaggcacgcaccaccatgcccagttactttttgtatttttagtagagatgggatttcaccatgttggccaggctggtcttgaactcctgaccttgtgatctgcccaccttgccctcccaaagtgttgggattacaggcgtgagccatcgtgcctggctgtccctctttttttctaattcctagtctcgggcctgacacagagcagatgctcgatacatatttgtttaatgaacaaacatccagcagcagtgtgcttggtgtgctggggtgttgaacctcttgaggttggcatgggaaggaagaacagatggggctgctgtctgctggtgatgatgattttagccttggacattacaacatagaggttttaggatcaaacagctcacctgagtcgtgctttgacttggcttgagaagccagaagtcttgtgtaatgtgtactttgactttcaattcccttaattttccttcatttttttttctttgattagttctttggggtgactttcaagatggactctactctaacagcaagtgaaatccggcagcgatttatagatttcttcaagaggaacgagcatacgtatgttcactcgtctgccaccatcccattggatgaccccactttgctctttgccaatgcaggcatgaaccaggtaagggtttttccttttttcttggcttttggttcacataagaggcagcagagcccagataaaagcacagccctggggtcagaccgattctggttctgtcactccctgtgtgatcttgtgaaactttatgtgatgggcctcagtttctttgcaaaatgaggaataatattgcgggcctgtaggtattagtgagaagcgaataagataacacatacaaaatgtttagcacggtatttcgcacatagtacgtaggtactcaaacattagcttttttttttttttttttttcctgagacggagtctcgctctgtcatccaggctggagtgcagtggtgcaatctcggctcactgcaa

SEQ ID NO: 83858 - DNA, 1032 bp, Homo sapiens
gggggggtctaactcgatcatgtgacgcaccccatcccaccttttctcgcagttgcatcagccaagttagagccgccttcccaggaatccactaatgaacggattcgtcctcagtttgactggcatgttggttgaccaataatatctcatgaggtaaggcgcggcggggcactttccgtcggcgcgctctgattggacggagcgtggcgggttgtggtaggtcgtggtctgaggccggtacagctgcgcgtctgcgggaataggtgcagcgggcccttggcgggggactctgagggaggagctggggacggcgaccctaggagaggtaggccgccctcggagagctctgcggtgctaggagagcggctgggcccgcagactggggggaaagctccgcagccgcagtgggccccaggatcaggccccgcgtggcctggagaagcccagtctgggctggagcgggagctggacagtgtggccttgcgttcgcccccgggagcgctgcgagtgtcgcggcctcgggtggatttgctgagcaccaatacctcacggttgccaacctggggttttagctcccttggttttaatcccctaggggcgggtgggggcacgggaggaaggatgggccagctgggtgcaatcctgctgtaagccagccattccttgatttcttaaaattaactaaacagctgatgccggtccaggcgcaccgagaccgtcatcttaagctgttctgtaaaacagtttgtatttctcggtgtgctttgaagcatgtgagttaattccgaacttggtgttaaaggattagtatacctgatcacgaaatacgtatttagcagccactgtactagatgctgaggatgtgctgtaatagcccagggccaggcgcggaggctcacgcctgtaatcccagcgctttgggaggtcgaggcgggcggatcacctgaggtcaggggttcgagactagcctggccaacatggtgaaaccccgtctttactaaaaatacaaaaattagccgagcgtggcggcgc

SEQ ID NO: 83859 - DNA, 1621 bp, Homo sapiens
agagctgctgctttggacttgggggtgggacagctcatctgagtattgccagccccctgtcctagtgcccacagcagaagggaatttgttaaataagcatggaccaaaatgccaacctctcggttgtgtatatgggtttgtgtcacaggactgtgacctgttctcggtgggtgcagtctgtgtagagtgcacatctgattattggtgggtcctgtgcctgtgcttaagcaagtcctgtggagaagtcatcatggagaattagtggtggccctagcgtgccacaaaacctggtctcatgagcatttgcaacatcccttttacatccttaatatccccttaccccacagtagccccaaacaaatgtgatctgaggtttagatcctcagtgaaaattgtggtttcaagtcttcatggccagcctcaaggcagttctagatgtgatcagcagtagtcacaaattcttgttttgtctccacacccagaaggcaagttttgtcagagctggggaataatttcagatatttgacatcttgattataaagggcttctgaacatctgtgtttactgcctttggaatacaaacaggtgcaactgagggactagctacactaccaccatttatctgtccaaggcaagagtatcaccaaggcctttgctccagccttacttggcatctttgcgcaagatagtcagagcaaacaatagtaatggacacttctcacacctggccaaggctgttggtacccacgaaatgacagcaaagatgagaggaaactgaattgcaagagcaatatgaaaccccaaccaagaggagtactctgcagttctttggctttggtatagagtggccactttctctaggacctggaagaagagtttgatggctaagaacgattgtgatcctaggtcttctttgtacgcatctccgtatttaggccagatctgcctcctgggaagggaaggggccaatgtcagcctccaggtgatttctttaatctgacattacaaagagaccaacagactgccaattctaccacattcccctggtgggtactcgactatgtagttttctctatgcttctggtcaactctgacacatcttggaattcttgtaataagaaaagaaatttttatacttttttctccttccctgagtcctgtggaccaaccctgaaatactaaaaacaagggcaataattaaagaagtatagactctttagtaggccacaggcagagcagactcccaccttctcaagcacatacaacctctctactggtgtagccccaagtgtgagaaggaaagtgggaagcggggtgctgcagactctttgacagcaggaggaatgggaatctggtagaagtataggtcaacagttctttttttttttttttggaaacggagtctcactctgttgcccaggctggagtgccgtggcacgacctcggctcactgtaacctctgcctcccaggttcaagcgattctcctgcctcggcctcctaggactacaggtgcacgccaccgcacccagctaatttttgtatttttagtagagatgggggtttcaccatgttggccaggctggtcttgaactcctgacctcaagtgatccacccaccttg

SEQ ID NO: 83860 - DNA, 1030 bp, Homo sapiens
ggggtcagctccctttctttaaaagtaagcaaaaccaggtacagtggctcacacctgcaatcccagccctttgggaggccagggtgggaggactgcttgagcacatggttcgagaccagcctgggcaacatagtaagacaaaaaataaaaaaaaaaaaatagccaagcgtggaagtgccagcttgtagtcccagctacttgggaggctgaggcaggaggatcgcttgaacctgtgtggtcaaagctgcagtgagccatgactgtgtcaccgcactctagtctgggcaacagagtgagaccctgtctcaaaataaataaataaataaacataaaaagagttggatgatgttggattataggaggaagaagaagggaactgatgcttattgaaggattgctgtgtgggatttgatcctgaccacagtgcactgagataggtgtcattctgcccacttcacagcagaagagaccaagactgaggggaacactcatgtgtgttttgaaatctggaaataacttgttctcctagtcctagaaggatgggcagggctttgatttccagagctggctttgcctttgaaatacctatgaaaatcacctgggtctccacagtggaaagaggccagaagatcagtgagcagattgtcattggcacccctgggaccgtgctggactggtgctccaagctcaagttcattgatcccaagaaaatcaaggtgtttgttctggatgaggctgatgtcatgatagccactcagggccaccaagatcagagcatccgcatccagaggtagggatctcgagggtgggggactcctcagactccccatctgcagtgtcttctcccttcacttcagacgcctcctctggcttctgcctgggtcttggctctcgtactctcagcagcatttgtttgacgggccatttccatgtcagcgctgatcacagtccctcccaacctgggttgagaaaggagacctagggactcttccccaacccttgtccccatcccaggcctgctgctcctcct

SEQ ID NO: 83861 - DNA, 1041 bp, Homo sapiens
gtggtgcgatgtcggctcactgcaatctctgcctccaggttcaaacacatcacctgcctcagtctcccaggttgctgggattacaggtacatgccaccacgcccagctaattttatatttgtttttttttttttagtaaagatggggttttgccatgttggctaaggctggtctcgaactcctgacctcaaagcagtccatccaccttggcctcccaaagtgcctggattacatgtgtgagccaccacacctggcctgtttgattgattctggtgttactattgtaaataattctgcagtgaatatcctcatacacatctttgcacacctttgtaaccatttttatagggcagatttctagcaatggaattgctaggttggagtatacacccgtttgcatttttgatggatggcttcgaactgtcctctaagaatcttgtatcagtttccatggcagttgattctcatgtcaccctcttgtccctgcaggatgaatcaggcgccaaccgtgggctttgagcaggatgttggcagccgaaccacccaccatttcatgtaccctgagagtgccaagaacctgcccgccaacgtcagcttcgtgctggtgcccttcaaggtcctggaccttctgtggatcgccagcgccttgtccacggggcagatccgattgtgagcttcttgctggcctgggtagaatatgggtgacaggaccatcttgggcagagtcttctaggggccagattgtaggattcctttcattgaacattttggccaagaggggctggtgagaagggagggcctaagttggtgggtgagctgaaggcacagcttgctctgtgtcacctcctgtgtggtgacacagcatattgatggtggaaagatgaggaaggatctgtttttttgtttgtttttttttttttttggagacagaatttcgctcttgttgcccaggccggggtgcaatggcgcgatcttggctcactgcaacatccgcctcccgggttcaagcgattctcttgcctcagcctcctgagtagctgg

SEQ ID NO: 83862 - DNA, 1055 bp, Homo sapiens
cccctgctggggtctagcaggcctgagccttttccagggtggccagcctgctggagcttacagtgggggagggtaggacccagaccagagtccctcgccatggtccagccttgatgttgacatccaagagttgggagagggggagggaatgccctgccctccctgccactttgtgcgactcgcccgggttgggccctttaggagagcatttgtgtccctgccctggagtctcctcttcctgctgtgtgcccttgctcggggttgttccaggaagcctctggtgtggggggctctgttgccaccagctgatttcctgccccaggtgcgtgggtgggggaggagagggttgaagattacctggagaaatcgcccgctttgcttccgtttcacccctcttctagggaggacagcagagtgcacagaggttctcttctaatcctctcacccccaacctggtcctccacaaccaggctagagcgtatctatgtatctggggaagccagggcttggggaggagtggactgacccgtgttctgtgaaggtcaaggagggcccacttcgatgaggatgagtttggcagggagcgtggtcctgctcgccgagcggggctgtaagtggaggactgcacctgccttttcctccttgaagccccagctctggcctcagcagtagtgccctgctggtggttagtattcctgtcaccagctccgcctccttacagagggaaaagcctccagttgggaccctgggatgccagtctctgaggtcagctgcccctgatacctttggaagggacagccctcctggaggaaggatagctgtcaaagccaaggagccctgactttgtggtaggctggagggcttgcaggaagtcctcaaaacagaggagccccattgctgtgctccttgacagagcaggaagctggcctgattgtttccagagaggacccaccaggccgtaggaaaaagggcttggctaaggggtcagtgagggctcttcccagtctggctgccactgcctggtgtcgatcaataactgtgcagaacacacgcat

SEQ ID NO: 83863 - DNA, 1870 bp, Homo sapiens
cctcccctgccccagagcagcacgggccgtgttaccatccaggggcctgggtggttttgggcagccggattctctccagtactttcccccgggcagctcccagtctctggctgtgctgactttggctttcttgttcaatggtctgggaaaggatgccaggcagcctggcccccgacctgaattgcccacttatgctacctcggaggagtctgtcctgtccccatgaactgacaggcggctcagggcttggggaagagactggagcttttgcttccctcctgggaatgtgccttctccccacatcagagcctgggacctgtgggaccctgagacgctgcccgcagagtactgccttcccagcgcccgcctctttcctgtgctccacccctcgagggagctgggaccccaggacctgctgtggatgctggaccaccaggaggatgggggcgaggccctgcgagcctggcgggcctcctggcgcctgtcctgggagcagctgcagccgtgcctggatcgggctgccacgctggcctctcgccgggacctgttcttccgccaggccctgcataaggcgcggcacgtgctggaggcccggcaggacctcagcctgcgcccgctgatctgggctgctgtccgcgagggctgccccgggcccctgctggccacgctggaccagggtgagtgtgcaggctggtagtgctgcagaatcaggccaggggcacctgccctccctgtcctctgggccatcccctgaggggactaggggaccatgaggtgctcaagcagggaaggggcatgctggagtttacttttaggattctggaaggcctcatccttgtcaatggggtttggtctgaggttgaggcatgttcatccttgtcagtggggtttggtcagaggttgaggcctggcagctgagctctaggtcctaggcacatcggcaaaccctgcgtgttctgtactgggtgccaggatgtgggtgcagagcgtggcgaggggacagagcccccaggggacatggtcatctctgcatgaggtcccaagcacacttccgggggctcacagccttagcctcctaggctgaacctcatggaaggtcccagggaccgtggacatgaatggtattgaagccactcacccagagccacacggctagctggtggtgaggctgagacctgagcccaggtggtttgagcccagagcctgagctcttcaccactatgggtgtcctgggtgggggtgaagagacacctatgggctgggactggcaagacgagatgatctctgccaggcagagagcaggagtgcagttacagtcaaagatacattgtgggcaaaagccaggaggtgtgaggggtctggcgcatttagggactgttgagtagcctctcgtgaaagaggattttgaagacaggcctcctcccctgccacccccaactccttgtccctcagttgcagctggggcaggagaccctggtgtggcggcacgggcactggcctgtgtggcggacgtcctgggctgcatggcagagggccgtgggggcttgcggagcgggccagctgccaaccctgagtggatgcggcccttctcatacctggagtgtggagacctggcagcgggcgtggaggcgcttgcccaggagagggacaagtggctaagcaggtgtgtactaatggaggtcagatcccttggataagccccttgctgtctgggaagtggaccctgatggaggaaacccagagagaggtggggctcccttgggtaccccgggacagtcaggtccccaaagccaggcaatctgcccccagcttggggctgcatgccaccatccctcccccttctcttggcaggccagccttgctggtgcga

SEQ ID NO: 83864 - DNA, 1046 bp, Homo sapiens
cctttccagggctgtgctggggtagggctgggcagagctgctttggaccttccgcctgtcctggcatcgtgcccttacttgagatatgatcacctgtgcccccgcccccaccccctggccatatggtgggacagcaagagcccaacaatgactatgatctaatgaatgtcaccagcgccaggcttctcactcctcctggccaccgagccccctggaacccatggccagtgtagagcagctacagcttgtctggtttcaggtccacctcagggtgtcaggtcccgtctccagcacacccctggaaagaaactgctgcaaaggcctactgaagcctgactgtggtgttttctgtcactctgcagctcaagcctcacatttcactgtagtgactcatatcccataatcggtagtcattagcaaaaggagcagatggggaagcattttcagttttcttttgaggtgtaccattcaagttctacatttggccaacggaaaactatttgttgagaacccactctgtggggccccagggataaaatgagcaaaaatggggtccctgccctcaaaagtcctgtggtctcctggagacagacattaatcaataactactcaggtgcatgtgtattacaaactgtgccaagtgctttgaagcagaggggcacagttaagtcttgacatttcaagacttagccactttgcaactaccaggttttggctgcaaagttccagatggcttctgtcttttgcatttcatactttaaacccttgcaggcccttccctaactatcaagggcctgtcccagaagcaactcaagttttgttatttttaatttttttttatttttgagatggagtctagctctgtcacccagattggagtgcagtggtgcgatctcagcccactgcaacctctacctcccgggttcaagagattctcctgcctcagcctcccaggtagctgggattacaggtgcctgccaccatgcccagctaattttttgtatttttagtagagatggggtttcactgtgttggccaggctcgtc

SEQ ID NO: 83865 - DNA, 1025 bp, Homo sapiens
cttctgaagccgtagagcaaacaaaccacagggcaccacctgaggcctggcgggccttgccacccagctctgggggcaactggaggccagttctgcttggccaggcctaagtagtgactgggcttgggttctcctgcagctgggtggtctgcagtttgacaaggagctgaggtcgctcattgcctaccttaccacggtgaccacctggaccatccgagacaagtttgcccggctctcccagatggccaccatcctcaatctggagcgggtaggtggggcacccttggcccagccagggaggggtgactgaaagaggcaaagatggatccccgccacttccctctaaaccatgtctgccagcagccagctctataggacaccttccccttcccgggtgcccctgctctgcccctggtagaggccagagccctctttcagaataaccccaccttgctgactggtctctatgtccttccccacaggtgaccgagatcctcgattactggggacccaattccggcccattgacgtggcgcctcacccctgctgaagtgcgccaggtgctggccctgcggatagacttccgcagtgaagatatcaagaggctgcgcctgtagctgcctggatgagcacacctggctcatcacacttgcaggcctgttccctaaggggccccagccaaggagctgagcgaggctgtctggcttgggggagatctgacagcccagacctttctacggctggcagcagagaaacaaagtctggacccactccatgctctgccctcagacctggccaggtgatgctctgggggcagcatctccccaccgagagaagcgggctcctaatgaggtgggaaagccacggcaggcagcgagcagcccaggccagctttctgcatggatggtcagtctcttgccctcaaacactacagcaaacaagctacccctgccagtcctagacaacttgggtacatctggggacctagcagttaggcttgactttgaggagaggctgtgatgttt

SEQ ID NO: 83866 - DNA, 1021 bp, Homo sapiens
cgaggaggttagcctggccacaggcagccatcaagccccgatgacccctcatccctagccccagctagagggagcagagccatctgaacagactagaccttccatgcttcccaggcccacttcccccaccctgacccatgaagactaggttcctcccaggaaacagtttgtccctagtcagaagggctcagaaagacatggagtttgccttgacctaacttattcccttattggagctctttttgccccgcctatgatagacttagaagcgtttttttcctcctggcgtagtgatttcattcctgtagaacaagagatccaagaaggaataaaatgccaggaactttaccatgttatgtgggccactgctacagccctgggctgtttgctggtcagtttctgccagcctgggtgtctgagctggttttaaactagatgagtcagaaggcacagggaaggaagaatgttttacattattttcttagagggatagaggtgggtggcaatgaatggtacttcttatgaggcccatggtgaccagccctgcttcctgacaacaggaagaattcaatgactatgaggccaacgacccttgggtacaacagttcatccttaacctggagcagcaaatggcagagttcaaggtgagcaggggccctagggatccacttagggaattacccacgtcagcccaaaccagcagcctgcagggtctcatcacattccttctggggaccctgaaagcccttccaaccctcacctgtagaaactcccccgtggcctcacgctactatcctcaccacctaagactccagcatagaggcagaggagttaggtggggctcggctgatgtcaaccctctgtgtgcaggccagcctgtccccggtcatctacgacagcctaaccggcctcatgactagccttgttgccgtcgagttggagaaagtggtgctgaaatccacctttaaccgggtaaggtaaaggggtcatgggtctgcggctctcgtttctcctctgagga

SEQ ID NO: 83867 - DNA, 1446 bp, Homo sapiens
tctgtggagacggcttctcactatgtttccctgctgttcttaaactctggccgcaagtggtccttgcaccttggcctcccaaagtgctagaattacccgcatgagccacctcgcccagcctggtactttaataaaagtgaaatgcttagaacaaagccaggtatacagtacgcccttaaaccttagctatgatcttgaccatcccctttggtagccataccaaaatatttaagaagcagaaactgacttttgtggttttttggtaaatttaaataaaatttaagaagaagtaaataaatataaaagggggggaaaggaggaactatagcaataatagctagtgtctcctgtgccaggcattgagctaggcacgttgtgcttcatctcatacatgaggagcaggaattggtgttcccattttatagacaggaaaattgaagctcagaaactttaaatcatttgcccaaggtcactcaactaatacatgactgagccaggacttgaacctaggaatgtctgactctaaagacaggaaaaactttctggtatttctgtttcttactcacttccccgacattggtacccccatattacagagggggaagtgggagccaagtggataaccaccaggatagaatccaggttttctgaaacccatccgggctcttgacaggccatagctggctggaggagtagaactggctggtggctcctcacactcccatggcccacgcgtgctcggtggtcttacagcagtgttctcccctagagtgactgcaccaagctcttcagccagggcattggaggggagcaggcccaggccaagtttgacagctgcctttctgacttggccgccgtgtccaacaaattccgagacctcttgcaggtaagccccaggttcaactgctgactgaatcctgtgcctgtgtgttgctctgagaagattgttagctggctcatcgtgtgcaaggaagccaggaggacgggtgagggagcagcacgcaagccctggagcctggagttgtgcaggtcccttgagactaaaggccctgttggtttctcagcagtgaagttgtcacactgacaagccaacatctggtgctctagactttgcacttggccccacaatgacaagagctctcagaagatgctcagaggaagtggagccacatggttgttctgacctagccgcaggtgctgcctaacattgagcattctgaaatctcttgtgagagtttatcagaacagtctcaaggcctcatcgttaccctggacctgaatcagctgagatctggaaaggggcatgttcctggctcctcctttcattagcactagctctgttataacctccaacagggcctgcagaaagcctcagggctggaagaacgccctgcagtcaagggatggggagaggagagagggaagggatggggagaggagaggagg

SEQ ID NO: 83868 - DNA, 1714 bp, Homo sapiens
actcgggaggctgaggcaggagaattgtttgaacctgggaggcaggggttgcggtgagccaagatcacgccattgcactccagcctgggcaacaagagtgaaactccgtctcaaaaaaaaaaaatagttaaaaataaaaaaagtagtttttaaaatgtggattatgcacctgatgaaatgccacatagtcatgaaaaataaggtaggtgaaaacatggaaaatatttatgatatacttttttaaaacagaattcaaaattgctatctgtatcatgattgtaacgatgtaaaatatgtacatatttcaaagaaagactataaaggaacctgaaaaaatgaaaaaagttgctctgtttcccttggggaaaaaaaatgagtattcctttcttggctgtcccctagagcaccagaagtgtctggacaaactcctcaataactgccttttgagctgtaccatgcaggagctaattggcttatatgttaccatggaggagtacttcatgagggagactgtcaataaggtaggacataggacgcatctcttggaaatggggcttccggtccaagaagccaggctgagggaaatggctgaggcatgtcatatttattggtcctgctttgagaatactcttgcatgcagattgagtggtaccactttgtatgtttagagagcatctttggagtcgttgtgttctttgtatacccagctaggacttccttcccaagaattaaaaaagaacagctcagctcagctcttcagggagcccacttgttccctacctccctgaaggtttgtgggtaaggagcctcagggaagtagggcccctgcagatatcttacactccccaggtaatggatctctgcagggctaaggcccgaaatatttaatttgttcacctagtgatcaatagggaagtaagctattttgacaaggaggatgcacgccatgttgggagaaacatggacaaggtacagaaaagggagcagagctagggccagtgtacccagaatcatctagaacatgacatgcacaactgggaccctcagtgttggctttgccttttgggtaggctgtggctctggacacctatgagaagggccagctgacatccagcatggtggatgatgtcttctacattgttaagaagtgcattgggcgggctctgtccagctccagcattgactgtctctgtgccatgatcaacctcgccaccacagagctggagtctgacttcaggtacagttgactccctttctcctttctaggcagaaaggcccttcctgttgattcctgaggcccatttgtttctgccctttgtcctcatgattctagttaagttctatacaggacatcagctcctatccctaagatagtatccttggctccaggaagctgttggtcagccatatatctcatgggccaaatttctgttccctggactagactgaaggagctatgggcccttagacgtaggaaagagaacaggcagttcagatgaataataccaccaataggtaccattgctacaggcccagcactatgctaatctcctgcgcttttgaggtcctaataacaaccctatgaagtaggaactgttagctctgttttatagatgaagaaactgtgctttagggagattccgtcctcgtcaaagatccaccacttaggagtcagtggtggaatccagaactgagtgactcaaaacctgttctc

SEQ ID NO: 83869 - DNA, 1034 bp, Homo sapiens
actccagcctgggcaacagagcaagactccatctcaaaaaaaaaagtaaagaaaagaagacacatctcccaaccttttatttaggtctggcagaattttagggagtgaatgatttaggtgaagcaggtaaatggaaaatgtgattgacagctatctctgattctaattgggccagcagagctaggagggccatctggcagagcttttccttatgggcccagtggggagggggaatttgggactctctttgccctgtagctcttgtgtctaaggtaatccattgtcgtcctattccttctgctccatgtgtctcagagaactggaccccatcctgactgaggtcaccctgatgaatgcccgcagtgagctatacttacgcttcctcaagaagaggattagctctgattttgaggtgggagactccatggcctcagaggaagtaaagcaaggtaaaaacgtttcccatatttttggggagggttgaggtataattggcagtgtttcttaatagttaagccacaaatctcttattaaggaaacaattggaacttattagcccctggtggtctgtaggcaaattgactcccaggaagaaatctaaatttactggattttagaattggactagatctttgaggccatctaatcactttacagatgaggacactggtgccctgttttaaattttatgggatataaattatacttcaatgaagtgttctttttttgtttttaaagagtacataggccaggtacggtggctcacatctgtaatcccagcactttgggagactgaggcgggtggattaccggaggtcaggagttcgagaccagcctgaccaatatggtgaaaccccatctctattaaaaatacaaaaattagctgagcgtggtgcaatacacctgcagtcccagctactcgggaggttgagacgggagaattgcttgaaccctggggggcatagggccaagatcacgccactgcactccagcctgggtgacagagccagactctgtctcaaaaaaaaaaaaaa

SEQ ID NO: 83870 - DNA, 1019 bp, Homo sapiens
cctgggcaacagagtgagactctgtctcaagaagaaaaaaaaaaaaaaagttgggctctgtgactcagacctgtaatcccagcactttgggaagccaaggcaggcggatagcttgagctcaggagtttgagaccagcctgggaaacattgatgaaaccctgcctctacaaaaaatacaaaaactagccaggcatggtggcacatgcctgtgatcccagctagttgggaggctgaggtggaggatagcttaggcccaggaggcagaggttacagtgagccatgattgcgccactgcactccagcctgggtaacagagtgagactctgtctaaaaaaaaagagagaatgatttgatcacgttattaacattgtatgatatctgtcaatggtcttgatcatcatcaataacagttgcgttaacagtagtggtggtgtttgtgagattgctattgacatatggttgatcagattcagctcctgaatctccctaccttcttgaggggtgtttttgaaagaataggacattgtttgtaagtaccaaatctttttgcagaaccgcctctatcaggccattcagagagctgatgacatcttggacctgaagttctgcatggatggagttcagactgctttgaggagtgaagattatgagcaggctgcagcacatactcatcgctacttgtgcctggacaagtcggtcattgagctcagccgacagggcaaagagggtcagcatccgaaactgttggtttttagtttagttaaaatcatctgtaatctgaagtaagcagactcgaccaataaaaacacatcagtttttaggaagttttcttttttctttttcttctttttttttgagacggagtcttgctcttgtcaggatagggtgcagtggtgccatcttggcttactgcaacctccgccttctgggttcaagcgattctcctgcctcagcctcctgagtagctgggactacaggtgcacaccaccacacctcactaatgttttttgtatttttag

SEQ ID NO: 83871 - DNA, 1041 bp, Homo sapiens
ccctgcagcgagaaggatggtgtggatatccaacggatgctacctcccttcaaaacttaagccaccaccaactccaacatactggcgtccgccattagacctcaagacagggacattctggtggcgcgcggcggaaaaaggcacccaatccgcgcctgaagaatatatataatttttaaaaaatgcttccgtcttgcttccacacggcattacaaattatttaaacatgctttattgctttgctttttccaggagaatagaaaattaatacgtttttagaagtagactttaaaaaaaaaaaaccattagagttcattgggcacttctgtgggcagccccaaataggcgccaacgaagagggggcctcgcgggaccggaagtgccgaatggggaccaagatggcggaccttgattcgcctccgaagctgtcaggggtgcagcagccgtctgagggggtgggaggtggccgctgctccgaaatctccgctgagctcattcgctccctgacagagctgcaggagctggaggctgtatacgaacggctctgcggcgaggaggtgcggggtcgagcctcttctttttcatggaggatctagggagagtgggagccttcagtcgggaaatccgggctgtgggaaactctccttgctgggggatacaaaaaagcgggaaaacaaagaagcggaagctagtcgggtatatgagtagtcctgtcaactcttttcacgctgtcggacgcgccgagcttgtcttccctgatacctgggcgatctgcagcctctcctccctagacccccgttgatttccctgatccatgatcaccagtttctccacgggagtaaagttagtctgagagtatttgccaaattgcttggttctcaaaataataagcgcccttttgcattggcttaatttacaaattatgaaacgctctcatcctgttatttaagagggaagcctttgcagattaacttcttgaagcgttttaagacttcctcttgtggggagtgatttgggggtgtgattttagcgttttggtca

SEQ ID NO: 83872 - DNA, 1051 bp, Homo sapiens
ttcttcaggcgcggattgggtgcctttttccgccgcgcgccaccagaatgtccctgtcttgaggtctaatggcggacgccagtatgttggagttggtggtggcttaagttttgaagggaggtagcatccgttggatatccacaccatccttctcgctgcagggtaaaaaaacagcctggagacttccccgggcccggggaggcggagaccggccatatggaagggggacccgagactttggcgggggtcacgggcagtctaggcccgagaggctggggaccaggaggaggtaccgagggatggttgaggcgccaaaacggcttcctgcagttatctctcgcttccatccacagtgtgggaacatattctatctcaaaatagggctcgtggagattgcttttaacttctggggactctgagacgggggaggtgtgacaagcagcgggaggcatggatgtctccctctgggtagagtaaatggtacaccgaggggaagatagaaagatggagcgtgttaaaagcgtaaataacggaaacagtctttagagccaagactccggtttgaatttgtattttggtagttgggcaacttgtctcctcctctgaacctctattttctcgtttgcgtaatggaggacagagtttaaatgcgatgatgtttccttggaggatggagaagatgcagtgagcaatcatacaagctttttgtaataatggtaaacagacgtgggggaagttttttttgttttgttttgttttgtttttgtgacggagtcacagtctgtcgcccagactggagagcagtggcgcgatctcggctcactgccatctctgcctcccgggttccagcgattctcttacctcagcctcccgagtagactagctgggattacgggcgcgtgccaccacgcccggctaatttttctttttttgagacggtgtctcgctttgtcgcccaggctggagtgcagtggcgcgatctctgctcactgcaagctccgctttccgggttcacgccattctcctgcctcagcctcacgagtagctggaa

SEQ ID NO: 83873 - DNA, 1349 bp, Homo sapiens
acccatttctagcctggagcattgatcttgccaccctgcttttgctcagcccagaaagttatttatgaggacgtttactcataattctctcttctcgtttaacaataaaatcaaatatgtatgttaattctatactaatgaccttggatttctcaaggtcccgtgctttttatttatttatttttttttttgagatgaggtctcattctgtcgcccagcctggagtgcagtggcatgatgttggctcaccacaacctccgcctcccaggttcaagcgattctcctgcctcagcctcccgagtagctgggactacaggcgcacagcaccatgcccagctaatttttgtatttttagtagagacggggtttcactgtgttgcccaagctggtctcgaactcctgacctcgtgagccaccacgcccggtcacatatgttgtttcttaatagggcttgctctgctggttctgctgtcttcatccagaatttcccatacagaaatgtctgttgaagtaatagtctcccagctatttttctgttttctgttttcttagctttcttggactccgtactgttggtgtaaccaaggcctggaggtctgggtggctcaggtttcctgcagccatgtttctgtacaacttaaccttgcagagagccactggcatcagctttgccattcatggaaacttttctggtaagttctctcgttaccatcttttgaaattttaagtgaattaatacatatcttgcttagtctcttgtgcaggaaatgttttccatttatgacaaaacagttgttggtaaatgtaaacaattcaaattatgagatgaggtgttaagttctggtgcattatctgttacctatttcagatgcatttcctagttcacaaattgtgtaatgattcttgtcagggcacacttttcttggctgcttacctagtgccaagtcgtgtgcctattgctgtaagacatactgagatgtgtaagacctgatctttgatcttgaatttgacatcaggttgggtaaaaagaatgtctgaaggtgtttgtctggttatcagagagtaatttaaataaagggaaggttggaccttggtttggtgcttgaagagatagaacttttgtatgagagaaaagggaaaatgcagtttaggtagggagtgctgtctgcatagaaacagataatttgcttacgtttaccatgtggggaatatttttgtaaagatggattaaggctaggtttgaattgtgtgaaatttcaaatattggattaggaaatacaaagttactgaaagtgaggtactaatgtttataaaataaaaactttttcttgccatttgcagatttaaca

SEQ ID NO: 83874 - DNA, 1646 bp, Homo sapiens
aggtgtgagccactgtgcgtggccttttttttttttttttttttttttagagacgatatcttgctgcgtttcccaggatggagtgcaatggcaggattataacccactacattctctgaactcctgggttcaaactgtcctcccacgtagctgggactagaggcacaggccatcacacctgactaatttttttttgagacggagttttgctctgttgcccaggccggagtgcagtggcacagtcttggctcacagcaacctctacctcctgggttcaagcgattctcctgccttagcctcccgagtagctgggattacaggcatgtgccaccacgcctggctaatttttgtatttttagtagagacggggtttcaccatggtggccaggctgggttctggttgtttatgatctttattttttggtgatctaggaaccaaacaacaagaaattgttgtttcccgtgggaagatcttggagctgcttcgcccagaccccaacactggcaaagtacataccctactcactgtggaagtattcggtgttatccggtcactcatggcctttaggctgacaggtggcaccaaagactacattgtagttggcagtgactctggtcgaattgttattttggaataccagccatctaagaatatgtttgagaagattcaccaagaaacctttggcaagagtggatgccgtcgcatcgttcctggccagttcttagctgtggatcccaaagggcgagccgttatgattagtaagtgatttactctacttgctgtatatgcctagtttaggataacaatgctgtgctcttggtggtgtgccagtgccaattaattacttatgtgggtttggcatcatgtttggatttactctaggtttaaagttgcatttcctttttaaaagagttgcattttcttttaaaacaatgggaaaaatcttaacacacctttctacttcccatctagttggaaatgggtgtttttcaatttctttttctttggcaaaaagactacaatgaaatgatcttatgttattagacagtgaatatcgttgctttcatcagcctgaagtgatgattcacattcatgtctcttctctgataaattcttgaagaaaatttttgtgtgtctgatcaggcctctagagggcagtcataaatcgttagatctatttcagagaataaggctaatgataattttatgaattactgtttttcagtatccttaaatgtaggactcattaaaaaattttgactagttagtgggatatttaagacctgtattaggaagaagggggccacaatgatgccattgtctttaaaaaaatttatttatttatttttaagagatgggggtctcagccgggcacggtggctatttatctttaaaagagatggggtctcagccaggtgcggtggctcacacctgtaatcccagcactttgggaggccaaggtgggaggatcacttgaggtcaggagtttgagaccagcctggccaacatggtgaaacccagtctctaccaaaaatacaaaaaattagctgggtgtggtggtgggtgcctgtaatcccagctacttggggcaggagaatcgcttgaacccgggaggcaaaggttgcagtgagccgagatagcgcta

SEQ ID NO: 83875 - DNA, 1857 bp, Homo sapiens
gcatcgtggcgggcgcctgtggtccagctactcgggaagctgaggcaggagaatggcgtgaacccgggaggtggagcttgcagtgagccgagatctcgccactgcactccagcctgggcgacagagtgagactccatctcaaaaaaaaacgaaaagatcgttttcttccttgtgcatacctttttttcttttttttgagacagtcttgctctgttgcccaggctggggtgcagtggcacaatctcagctcgctgcaacctctgcctcagcctcctgagtagctgggactacaggtgctgccacaacgcccagctaatttttgtatttttagtagagatggggtttcactatgttggccaggctggtcttctgaccccaggtgattggcccacctcagccttccagagtgctgggattataaggcctgagccacctcacccaggcccagccccttatgcatatcttaattctgtcctgctagcagatcttcatattccaaatgccttactgaaattctttgggatgcttcagaggttaagcaactatttaatagtctttctctgatttaagtaatctccctatggaaacaagatatttattgggaaaagcttcatgaaaaacttgaagctatgtttaaggtattttttcacagaacatactattgttttcctttaacggaaggcagtatcctctagtagagagctccctggatccagaatttggagattgcagttctcgttctagctctgccattatcttatagcataaactttgtcaaactatttggcgtcagccaggtgtggtggcatgtgcctatagtcctagctgcttgggagcctgaggcccaggaattctaggctgcagtgagataagattgtaccactgcagtcgtgtacagtggctcacgcctgtaatccaagtttgggaggccgaggcgggcagatcacctgaggtcaggagttcgagaccagcctgaccaacatggagaaaccccatctctactaaaaatacaaaattagccaggcgtggtggcacatgcttgtaatcccagcaactcgggaggctgaggcaggagaatcacttgaacctgggaggtggaggttgtggtgagctgagatcgtgccattgcactccagcctgggcaacgagcaaaactccgtctcaaaaaaaaaaaaagatcatacctctgtgcactgcagcctgggtgacatagtgagaacctgtctctccaaaaaaaaaagaagacatttgtggacttctgtttcctcatttgtaaattggagtcctgatgtcctttccagatcttcgattttatgctgatgattagtttttatgccactattctctgtaggaagcagacaatgatccaacaggggaagcagcagctaatacccagcagacacttactttctatgagctagaccttggtttaaatcatgtggtccgaaaatacagtgaacctttggaggaacacggcaacttccttattacaggtacttttctttcagagctgctttgtacccttttacttggttcattttatgcccaaacctaataggttttacttaaagggtttgggaattaatccatttgttgtgaacctgaataccttatcttttggacaggttagaagttcatgtggtggagtgattttaaaaagtgttggggataaagactgcctagctccttaataactcatattctactgagggcagggaagagaagttgaagggagcagtcagcttggaatattgattactgttagttgctgtgacagtttggctgtagtcagtctttgcctctcattcaaacctaactctttcaaaagccaaacaaaatggacagaccccacaagat

SEQ ID NO: 83876 - DNA, 1048 bp, Homo sapiens
agctgggattacaggcgcccaccaccatgcctggctaatttttgtagttttagtagagacgggatttcaccgtgttggccaggctggtctcgaactcctgacctcaggtgatctgcctttggtctcccaaagtgctgggattacaggcatgagccaccatgcccagcctgaacacactgtattttaaaaataccggtggaaggtccatgtccagtaggtgatttgatgtattataggtctgaagatggggtctgaagatgagaactgcatttgggcttggaggtaaacatttggatacgttatccaggctgagaccaaaccttccatgtaaacacaaactgtgcttcatccttatctaccatgaacataagggaggagaaacacatgaaatgtttcttagcatcaggcacattaccatcatcaagttgtgctgaaagagaggaggagttgaaagctgaagaaattcatgtctgagtcaaagtcactgctaagttttattttctctcacagttccaggagggtcagatggtccaagtggagtactgatctgctctgaaaactatattacttacaagaactttggtgaccagccagatatccgctgtccaattcccaggaggcgggtaagatctttgatataagaagagagagatttgtgtttaatttttgtgattacagtgtagtctcttagtttgttaccaatttagtttttttgtaaattaaaaaaaaaattcagtgaccctggggcagggacgtaaatgttgtttttaataaagctggtgaaatattttagtaaaagccaaacaaattctcttagaaagggaattaaaactaatctaatttctatttcagaggaacctgtggacaattattaatttgaaattcctgaatgtttctagtttggagaaaccaggcatatttgttagagataggttgccttttattctatttggtttttttttttttccaacatttttattttgaaaattccaacatacagaaagtttaaaaacaatgaacaatgaattcccacatgccttttagatta

SEQ ID NO: 83877 - DNA, 2019 bp, Homo sapiens
gaagtcactaagttgattagacattgagcacctaactgtgccaggcactgtatttggctttgcaataacaaagtctaaaacttcttgcagagcagagcttactcggtgggagaaatagaaactgttggaaacgttaaaaaacgcaaggcaggtgcagtgatgtgcctctgatccccagctacttgagaggctgaggcgggaggatcccttgagcccaggagttagagaccagtctgggcaacatagtgagaccttgtctttaaaagaaaaaaaattcaaagtcatacctaaggaggtgccttttaggaatcaggcatttgatgtagaacagggtaatttggatggagcagtgtttcacagcctgaaatgatgactctttaaaaaatttcatgtctcttctctgacatttttctctggacacagtttttgccttatgaatctgatcaggctgtagagtggaattgggactcttttggttacccagattttattagatatttatattagaattttgagctgtggggttccagtgctctggctggcaggacactgtggatcaaagcttgtgcctttaggcctttaatgtcatttgtaatccctattggtaaagtgctgaattccagaactaagaagtacccatttctaagacattgattgtgtttttgactttgctagaatgacctggatgaccctgaaagaggaatgatttttgtctgctctgcaacccataaaaccaaatcgatgttcttctttttggctcaaactgagcagggagatatctttaagatcactttggagacagatgaagatatggtaagtagaccatggatggaccagtatagctactctatgagatgagataggcaagacaggtaatactttacaagttaaaaaaatgagaacttagaaagtagttgcccttggaaccggtatatgagtatagattttctctctggttatcagatttttggtctagtaatcttacatacaatataagagcggcaatgccacttgtagtgattatttttaggtgaagaagatagtgattatttttggtgtgaagaagataaaggtctctgtttctgctgaaaactggtaataaacatgatctgttacttgttttatcctatggacgagctctgtgagttgttgggcaatttcttagatagctgtttggatcaggaattggcaaacatttttttgtaaaggccacatagtaaatacttgcagcttttgtgagctacgtagtctccgtctcaattactcaactctgccattatagtacaagacagccacagccagtaatgattggcatgactggcccatgagccggagtttgttgacccctggtcagatatgaaatacagtattttatttgctactcagcctgtgctgtcttataatacggggctcacttcactttgtttgtacaccagaatgtttcttttctcaccaggttactgagatccggctcaaatattttgatactgtacccgttgctgctgccatgtgtgtgcttaaaacagggttcctttttgtagcatcagaatttggaaaccagtgagtaatccttctgttaccctagttcaccctggttgggataaaagttggcagcagaagctgggtgcagtggctcacggccataatcctagcactttgggaggctgaggtgggtgaatcacctgaggtaaggagttggagaccagcctggccaacatggtgaaaccccatctctacctaaaatacaaaaattagctggacatggtggcgggcacctgtaatcccagctaccggggaggctgaggcaggagaatcacttgaatctggaaggtggagattgcagtgagctgagatcacgccactgcactccagcctgggtaacaagagcgaaactctctctcaaaaaaaaaatagttggcagtaggaaggtgcggctttgaggcttagggagcttttcacaagaatgtgttagttctttcaaaagaagtttgttctatccttgtagagtctttctttttc

SEQ ID NO: 83878 - DNA, 1057 bp, Homo sapiens
cattgtggtttgcctttccccggtgatgagtgatgttgagcatctttttgtgtttattggccatttgtgtatctttggagaaatgtctattcaaatcccattgcccattttttaagagttgtctttttatttttgagttctctatgtgttctgggtactagacccttgtcagaaatacgatttgcaaatattttctctcattttgtgggttgtcatctttcttcctttgatgcacaaaagttttaaattttgataaagtccagtttatctgtattttctttgttgcttgtgctataaataaaatactcactgcacttcccagatcttttccctgaattgttttgaaacaaatcctagctgtcgtacttagtgataacacctaaaaataataacaatagtatcttaatataatcaaatagcttgtgctttatgttgatgccagacattatcgtcaggcagagaactcgttaccgaaagtttctctcctctgcttcttcccagttacttatatcaaattgcacatcttggagatgatgatgaagaacctgagttttcatcagccatgcctctggaagaaggagacacattcttttttcagccaagaccacttaaaaaccttgtgctggttgatgagttggacagcctctctcccattctgttttgccaggttggtgggcctttccagccccttccacaatagatctaaagttaaactgaggtctagtctaagaaatagctttattagtatttccatgaactcgccagtgtgtaaagcagttagaggtagaagtttgagcacaaaaaaccattaataagtcctcgggctttttttcccataatgacaaaactcacgtttaatgtaaaaatgcagatcatattcctgtacagcttgcaggggaggaaaaaatcagaccatacaagaagtgagaagtaaaagtcctccccgtaatcttctcacctgtccgctccattgagccatattgcttgtattaacaacttcttgtgactgcttctaggtgttttctctgcatttacaatcatgtatatgtttatgtgt

SEQ ID NO: 83879 - DNA, 1169 bp, Homo sapiens
atacccagctaatgaatgatatttttaaatgcatatgaaaatatgcatagaatcagaatagcaaaatattttttaaagttgtggaaaacagatgtgctttactgaggttttataaataataagatgatacacttaaaatgggtgtgttaattttttttaggagactggtgtgatggctgtataccctcagtactcacatgtgcgtctgtgttacagtagactccattgctctgcagagagagtaaagaattttcatttgaactgtccagtttgtcaaaactacaatacagatcattcacctcttttcacatattgatcagcagataattgtattggaaagcagctggatgtctgggatactagagaatcagagttgtgtttgaaaacagcactggagacattttttcctctaactttttctctgtgcagatagctgatctggccaatgaagatactccacagttgtatgtggcctgtggtaggggaccccgatcatctctgagagtcctaagacatggacttgaggtaaggttgcaatttctagataatctgcagggtttggagggaagcactgacaaagtagtttatgggtttactctgatgttgtcaaagacatagttaaggtgtctgtgaaaaagtatgttctttctccctgacttccccgaagtttatacttcagattttctttctttttgtctccaaaacagggtctcactgtgttgcccaggctggtgtgcaatgacatgatcttggctcactgcagccttgacctcttgagctcaagtgattattctgcctcagcctcccaaagtgttgcttacaggtgtaagccactgtgcccagcctgtgcttttttctattcctcaacttgttagcatgatagcccacatggtcactagtcatgacatggaggctaggaaatctatatggaacatttcactctctgtatacatctagtcttagttaaatcaactatatcaatgctatatatatttttgtatcttattaaatttattccttattactatatactcctaaatagcatactttttatttatttattcatttatttttgagatggggtcccactctgtctcccatgctggagtgcagtggctccatcatggctcactgcagccttgaccttcctgggatcaggtgatcctccc

SEQ ID NO: 83880 - DNA, 2515 bp, Homo sapiens
taaaaatctaatcagaaagacaaaacagttagtaccctaagaggtggtgactgatttctttcttttttttggagacggagtctcgctcagtcacccaggctggagtgcaatgatgcaatctcagctcaccgcaacctccgcctcccgggttcaagcgattctcccgcctcagcctcccgagtagctgggattacggcacccgccatcatgcctggctaatttttatatttttgcagagacgggtttcaccgtgttggccagctggtcttgaactcctgacctaaggcaatccacccgcctcggcatcccaaagtgctgggatttcaggtgtgagccactgggcccagccggtggtgactgatttctatgagtgcttatagaagggagaggtgactgccagccaaggggataagggaataattttgttaaaggaggtggcatttgaattggtccacatgggatttggccttatgggagctggggaaagaaaggggatgctaatttagatggcctgattgattcccagtggttactgctgttctgaggatgatcaaggcatattgtacttgaaggaaaggggtatggttttgcctgcagcaactgtaccctctcagacatcctgtaacttttgcttaagactgtcatggggattgccactaagaaccagcctgtttggttcttagattcttctttcactaggtggtttcatcctttaaatacagcatacgttgtgaaccctgcctttgagaccttattttttgatgtgattgtaagcaggtagctgagttgcatgctcactggatctgtggcttccctcttctcctgtcaggtgtcagaaatggctgtttctgagctacctggtaaccccaacgctgtctggacagtgcgtcgacacattgaaggtaagcagctttttcccaatagtcaaaatgaggatctaggtgccattgacatagaaggcttgaaaggctgcgttcataatacttctgtatcatttcatttagcaccatataccagaaactttctggcccaacactgtttttgaggctcttccgttcaggatgccttcacctaccatttctttttgtgcaggtgggaaagggggaacataggttggctgttatattttagtacataaaggtttcagaatcatagagctgtcaaatgtggtattgactttatattcataaaggtactggtttcatctgtaagaggtatgatatgagggaaagttgtgctttttcattcttcttcaactatattcttttaaattgttttgaaaccacagtgaaattgaaggtggtgttctaggaattaagagatttgggaaagcttgttagtcaatcttgctagtgcttaaggaaagcagagtggaattgagtggaattcgaattttagtgtgagtagaaaagcggggatggggaaggagaagggagtttgagctcctggatataaatggtcacctgatcctaaaactttgaaagtaataggagaatgcctagtagttactgcaatagcaggaaagtcttgtgacaattgaattgcagcctcatagaaagaaagctcagtctcattttcccttgattcacattggagctacgtttttctcttgttctctcaggaatgtgggatgggtgagtaacatcatccttgctagcagacaggtttttcaagaaaacagctgtaattctgcctgatatttagatattctgcctgtatgaaacagattgaaggagttgggagacatgtaggaggaaaacaacttactattagtagaatactcatttttgtggatttaattttcattgtaggcatttgaatcatatccaagttgagtagaaagggaaaattgtgaataggaaatgggtaggcttataagctgaagagataattattaggcacctggttttatgtgtagtatctacatagaagttggtccgtgttggtgttttactttggcttggtggcttgttgatattcatggcccttgaaagcattgcctagactgtttgaattagaaacacgttttaagataacctattgtgttctttctttttttcttttaactttttaaataaactttttattttaaaacagatttagggccaggtgcggtggctcatgcctgtaatcccagcatattgggaggccgaggtgggcggatcatctgaggtcagagtttgagaccagtctggccaacatggtgaaaccccatctctactaaaaatacaaaaattagctgggcgtggtggtgcaggcctgtaatcccagctacttaaggggctgaggcaggagaatcacttgaacctgggaggcggaggttgcagtgagccgagattgcaccactgccctccagcctgggtgacagagcgagactccatgtcaaaaaaagaaaaagaaaagagatttaggtttacagaaaagttaactctcacttttatgaagaagacaggaagttataggggttgagtgtctcaagacacagtctaggtaatggggacagaatatcctggct

SEQ ID NO: 83881 - DNA, 1276 bp, Homo sapiens
tgcccaccatgtactcagtgattaagatagactctgcctcagagcacttgccatctaaaaaaagaagacaagtatacaaaagtgttgtgtgttgtgatgtggtgaaaggcacaggtacattgctgggaggggttaaaggagagggcatgtgtttgaaggtcagggcaggctctttagagggacagcatttgctaacttagtgataggccgtttgttgcattatggaacttgtagttgaacatttttctcctttattaaatgttagaagtcttggaaaggactatatcctgctaaattttactctttaggtactgtaatttgggagtcacctataaatacaggtcgggttctgttggttcactcactttccagatacccgaagttactattgagtgaacattccttctgcctgcacatgcagcagtcttccaggcaaatactaaccttggctggtacttggtgatgcacactaccaataccaagcctttttttctcttccacaggtggctggtgaaggtgctgatcaccacaggtgtgtacctaactgctagggtcgatgtggggtcttatagtttatccaaggagagggacctgcacaaaatattgaggctgccctgatggtgtctttcagagggtaactttgcagttggatgtcactgggcataatagtgctgcacaccatctgcctgtgcatcagatggtctgaggcaggagtctgcctctctacttcctcccacagaatttgtcatatatggttaatttgccttttactaagctaaaagagtctctagctagagaactttagcttcatactctcatagagttgtacattccaggtgtactgactgaaagatcaggaccgagagaaagcttttgagtatattcaggacttgctgaagcaagataagtatcagatacccttgtctatgaagtgagagggagttacttgagcttcaggtatctggatggtcgctcactttaccttttggagtgagctgctggttgagccttaaatcctaaggcaaggcaagtagaagaaaaaagcattccctcctctggggtccttagcagtgttcagacagatgggagccctgttgaactgtgacctaaagatacagtctcatacccttatggattcttcattgaggtatgaactattgttttttaacatgagacttgaattccttagaatgcagtgtggatggtacagttcctagtcatttaccttgactaaagcttggctttgttctgaactccagcgttttttttaaaatag

SEQ ID NO: 83882 - DNA, 2824 bp, Homo sapiens
attgattttacgtcctgctaatagggcagaacactactgtaggccatgccaatgatacatcttttttgtttgttttgagacagtctcattctgtcacccagattggagtgcagtggggcgatctcggctcactgcggcctccgcctcccgggttcaggcaattctgctcagcctcccgagtagttggaattacaggcgcccaccaccacacccagctaatttttgtattttattttatttattttttagtagagatggggtttcaccctgttggtcaggctggtttctaactcctgatctcaggtgatctacccaccttggcctcccaaagtgctgggattacaggcatgagccatcatgcctggtcgaatgatacatcttcatttgacccctgcttctgtaaagaatgctgattctgcagaactgatctagtaaccttaatctagctgaacctcatttgaagtcatcagaaccaaaagtatgcccttcatgtgggtgggtgggtggaccagccctgtggcattgagctcttgacaagtgcttaggcagacgggtcctatagctgctactgctaggagtgagtcagccactacattgtgtggtgccttgtcttgttctgtcctttttttttaacctgatttctggttaagggggtgttaaaacaaaaattcaaatgtaaactaggaaaatctcaactcttttaaaaaattagcatgcctttagtcaacatttatcaagctttacgccaaacgtactggatggggacacttgcagaagctgttgtatgttgtagggtgagatacatggaaaatagatggcctttatgggatctgtagaagaaactgagggtttctggtatacctcaagtcctctgacttccttgagaaactcattagtgtttattcaactacatttaattagaaaaagcaaattctaataggattgctcatgaccacaggattgttctgtttctaaatagtgaaaaaccagagaggtcacagaataacaatataaacaacccccaccctccatttcctggttatctagttttcttacatcattcccattgggactaggattctcagcttccaaccctagaatgagttagtctcacagaggcttaagtaatctctattttattcattagagcttgtgttcatttctacataagctgcttttggaagaagttaggggtctttcctagttagaaggagtatctcttcttaggaaggggttgtgtgattgacaactggcacaaataaatgaagctctagctcagtatgttcatgtatcaatattgtagtatttaaaatgtcctcatgtctccgattctcttgctttgtcctctcacttctttagcagatgtctcaagaaaatattgaggaagcagagtatatctgtaggctcttctgacccctagttttcttctggatcattttgctctgtgtgcatgtgtatgtgtgtatgtgtgtaataactacacatagaagaactgccttggaaggtttctgaagagaactcttagtgtttcatttggctttgtaattctaatgagttcttatctaaccaactcccttcttttctttttcagatgagtttgatgcctacatcattgtgtctttcgtgaatgccaccctagtgttgtccattggagaaactgtagaagaagtgactgactctgggttcctggggaccaccccgaccttgtcctgctccttattaggagatgatgccttggtgcaggtgagggttctcagagcttacctacttggcctgctttgttctttcttggccttcattgtgatgcaggctgctgtgttcatgtctcttcaccctcaccttccagcaagccttaggggtagggaacatatgatttgggcacataatatccctctctgtatttgccatttttctgttacagagccacatcactgcagctttcatctctaataaagatctttataagtgttttgttaataagctttgaacttctttgaagtggacactgcaaaacatgaactatttaaaagttgaccttgcctgaggcctactaactcttttgtctttgattcaactggtgcctcaaatgcagtggccccaggtctgattttagtgacagatctgatagatgtgagggtcattctgagtgatgaatcaaattgttaaagtcaggtttctttctgttactgactctaggtctatccagatggcattcggcacatacgagcagacaagagagtcaatgagtggaagacccctggaaagaaaacaattgtgaagtgtgcagtgaaccagcgacaagtggtgattgccctgacaggaggagagctggtctatttcgagatggatcctgtatgttattttatcattcactgtgggacttattgtagggaccagagggaaagatgggcattgtagtctagtcatttagatgatagtatggtgaaatcctgtctctactaaaaatacaaaaattagctgggcgtgttggcatgcaccttgtagtcctagctactcaggaggctgaggcaggagaattgcttgaacccgggaggcagaggttgcggtgagctgagattgcaccactgcactccagcctggcgacagagcaagactccgtctcaaaaaaaaaaaaaaaaaaaaaaagcgagctggagtgacagtgttcacaaaccagtttggtcccttacagagatggggaaaaggggtaatttgatgtctaattctaggtagagttatgaaatcccctcttagcagtgaaacacttgctcctcctgcatttcactctctacttttccaacaaatatttggcatagatttaatt

SEQ ID NO: 83883 - DNA, 2376 bp, Homo sapiens
tgcagtctgaatccatttcagaaaacttctatatggaaggatgttcagtacacttaattctcttgctctcaggaggtctctagtgtggccaaatttgtagcctgcctgtacctttggttgagatttctctgtctttaaccatatttgaattcccttcacccagaatattcttgtaaaacacagacagttttatatgtctccatttcctgagaacaaagttggctcagaaaatttgtggcacattgaccttgtcaaaggtctgttcattctcttattgatggaagatactcattttgcttgctgtgagcctgttaacttcagtcttgagaactcaggtagataaattcttgtcatttactatagtaagaggagtgagaggaagcagaacaaaatacaacagccctccttcattctctggatccagggttttggggtgaattggagcatctagacccatccctctgtagttttgaccttgctgtgtctttcctcctgtagtcaggacagctgaatgagtacacagaacggaaggagatgtcagcagatgtggtgtgcatgagtctggccaatgtaccccctggagagcagcggtctcgcttcctggctgtggggcttgtggacaacactgtcagaatcatctccctggatccctcagtgagtgacactctgagcttcaaggatcatctggttggaacctgagcatctggctcctgatgtctatctctgagatccactcctgatgtctatctctgagatcagctgggttagaacccagaatccatacctgctgcttctcttgtcattgcagtgtgtttcaggagtttcctgctgtggtttaaggatatgatctgagactacagaaatgtttctttggcttaagcctcaactcctttttttaagttaacaaccaagactgcataaatttgacttgctgcaggaccctaggtgacttttcaggaggtgtgctttgcttaattacctttgccattatcttctttgacaaaaggaggaaagcatgatcttcccgaagcttattctgaaattgggtgtaactaataactcagtactctcttagaactcactccccgggttttttctgtgcataaggaagtactttttcaatcctagaattagatttctctgggtatgtttttttcctaaaattgtcattttctgtgtttttatgatttttctctccctctcaggactgtttgcaacctctaagcatgcaggctctcccagcccagcctgagtccttgtgtatcgtggaaatgggtgggactgagaagcaggatgagctgggtgagaggggctcgattggcttcctatacctgaatattgggctacaggtaagagatccagaggcccacattgtggacattaggccttctgtacgtttcacacactcctttgtttgataacagggattttctctgcccatggtttcagatcctcaccttatgaaaagtgaacagtgtcactctgggttccacttttctcagctctttaattcgaacaaatcaggctgagaaagaaatattttgataaagagtcttcacatctgataaatgctgtttgatagctactctaagtcagaactggatgggttcctgaaggatcaactgtagttcccactattcactagtttcaaaagcagcaatgaatacctctcagttcataattggcttcattagcaataaaggacccctaaatgttccctgttgtcaaagttgctgagctctttgtgccgtgaagaaaaggtgtgctttaacgctaagatagtgtcaggattcttgatcatatgcttttcattttccttaatgattattgactcagacatctaagtaatctagcccaggtactttttgctttttaattttacttcctaatttagaaatctcaaacatagccagaagttagagagactaatacagtgaacttccatgtacccagtttttttgggagagggttgttgttatttttttagttttttttcttttgttggatttttatgggctgccacatgggttttcggtctatttttttcttttttagttttaacagctatcagcaacattctgctgttcttattttatcttttccctggactattttaaagcaaatccaagatctatcatttcatctataaatacttgataatgtagttccaacagatgtctgtttttgtaagatactagtattatcatgctcagcaaaatataacaatagttccttattaccatgttccagttttccctgttcttctttcccccaatgtggctttatagttggttgtgctcaggacctcagcatagcagtctacgctttttccatttccttcatctttctttttatgtctcttaaactgttctaccc

SEQ ID NO: 83884 - DNA, 3292 bp, Homo sapiens
cctgtctcagttctgactagccacatgtggcttggggtagctatagtatcggatattgcagaagaagaagttggttagattcagatttaattattgggggagggggacaggaatacttaataggtggtgctgtttactcctgttgcatcacgtcaggaggagtgtagtgtctggttgtcccactcacagtgatgttgggatgtttgtctgtatctgtgttaaagttcccgtcaaccctttacttacagctattacacacattgcctaggttcattctttcattagtggttggaaaatgatttatttctttttggatttaattagttggaattctaaagacaaaattcgcatcatttctttgcttactataagtacggttcatacaggaaaaggataaataatttttttcccattgttcacctgttttcagagtaaggagtgagggccacagcactcctttcagtggggcccagtaaagtgggttttttgctgttttttagagtaacattggtcaggtgctgtggctcacacctgtaatcccagcgctttgcgaggctgaggtgggtggattgcttgagctcaggagttcgagactagcctgggcaacatggcgaaacctcatttccaccaaaaatacaaaaaatagttgggaatggtggctcatgcctgtagtcccagctacttgggaagctgaagtgggaggattgcttgagcctgggaggtggaggctgcagtgagccaagattgtggcactgtactccagcctgggtgacagagtgagaacctgtctcaataaataaataaataaaaatttaaaaaaatagagtaacatcataaacttgtggatttttatacatttgtgctgaaaactcctttttttttttttaaacagagacagagtctcgctatgttggccaggttggtctttagctcttggcctcaagcagtcgtccttccttggcttccacagtgctgtgattacagatgtgagccacctcacctggcttctttttttttgaggggtgcgggggggtggtaaattgactcattctagaaaagtgggaatttctatttgaagttagttcttttgtccttttaacatgaccccactatttgtaggggtttccttgccttgttgcacaataaagtatccccacatgtgtctggaacattcttgcccctgccccaaactagtcattccttttaggaaccttgttcctttaagaggaaatgctgtttagggaccatggtctttgtggttatttaattatttatttgaaatatacagtagtgaagaaggatttaatatacttggtaaaaagaaatattaagaagatatagtgaaaaataagtgtgtatttacttagtagatgctccataactttggatgattaagtgatttactgagagaatgaaatgaatggctatcggattattaggatcttttttaaacacccaagtcatttctttctatctgctctaatttcttatgtgaagtacccaagggagaggttttcccatcatagctgataagcttccatcaggcttcacctgctcctctccttttgattagaacggtgtgctgctgaggactgtcttggaccctgtcactggggatttgtctgatactcgcactcggtacctggggtcccgtcctgtgaagctcttccgagtccgaatgcaaggccaggaggcagtaagtaatgaaggttggggacaggcaacatctttgggattttagtggcaccatctgagaacaatctttgctgtaagcttcactgtcactaatttgccactccatcttgattggtttccttcatgtgagaagtcctgagttttcctaacctagagcttcctcactggggctccatcgcaccatgtcatgatttggttatagctgggtagagatatcgatccctttagccctctggctggtcaaatagggctggaaacctcccctctaggacaccactagccatgagaattctcaggttttatcccagtcttagatcagtgtcacgtttactacctaatgtgaaagagactgggaaacattgtgtcctttgtagttaagaatgttagtgtttctgggcactgtgctaattgattccatttaattctgttttttgttgtttttttttttgagatggagtctcactctgtcgcccaggctggaatgtagtggtgcaagcttggctcactgcaacctccgcctcctgggttcaaccaattgtctttcctcagcctcccgattagctgggattacaggcgcatgccaccacgcccagctaatttttgtatttttagtagagatgaggtttcactatgttggccaggttggcctcgaactcctgacttcaggtgatccgcctgccgtggcctcccaaagtgctgggattacaggcatgagccaccgcacctggccttcattccatttaattcttgcagctgtccagccttgtggtactgttttcattttacacacgtggaagcaggcttagagagatgaaatggtgagtctagatcatatggctcgtagcccatgcttttcacatatgctaagccatagtgcctctctctagccctctttttcttaagatagcctgttatatttctagaatatcttaggatactctgcagactgaaatttggggatagggcttttggtcagcttataccatatttgtattttttcccaaaccttattggagctgggttttttttttcccctcaggtattggccatgtcaagccgctcatggttgagctattcttaccaatctcgcttccatctcaccccactgtcttacgagacactggaatttgcatcgggttttgcctcggaacagtgtcccgagggcattgtggccatctccaccaacaccctacggtgagtgagtctcatgtttgaagctcagcaggaagcctttctgccaagggctcagactggttctgccagagtgttggaggaggctgtgaagaggtggcagagagccgacttcaccatgaagcttgtgtgttgcaattgaaaccttcatttggctcagcattttagtacctgagagccaagtttcggtgttttagcttctgttaagattttcaaggccaagctttaatacagtccaatcttcctgagatttcagatttttgttttctagcaaaagggtattgccattggattagttttagagcaagtattggatcactgcattgataacctttcttactctgtcttgtcatttgcggtattaaatcttaaatgttaacctatctataagttatttagacctttt

SEQ ID NO: 83885 - DNA, 1565 bp, Homo sapiens
ttagtatattctttgtttttaaagatctaggcttttttcagcttttttaagcagaggcctttgccccaaagtacttcattttagagcctttcttgtaacccaggactatactctgacctccatttattcacaattaagttccctctctgaaacagaattctcccgtccttgagcttccaaaatagactgtatttcctttatttgggcccaaaagagacagctttcatgttctccacaacaccagctctttctagaactcattgcctagcagaaaccaaatagctacaaccacgtagaactgtatccatccttaaagagtggagacagagtagttttagtaagggaaatcagatgggttggatagaaaagtggagtttccgttgtcatttttctcaagccactagtccaatatttgtcacagctattgttatttttggtgttttctactaatatgtaaccagcaatgtctggatttccctttctgatcttctgtcttccctagtctgtacacctctccctttaatagtcatgtcgggaaatcctggctgggatggctgactttgctgctttatgtattgagaaccccctggagtgttcttgctacctatcctcttctcagccagcccctacctctgagcacgccaactcagttactcgtttttttgggtttaggaaatggtggaagcagcaggggaggatgagcgggagctggccgcagagatggcagcagcattcctcaatgaaaacctccctgaatccatctttggagctcccaaggctggcaatgggcagtgggcctctgtgatccgagtgatgaatcccattcaagggaacacactggaccttgtccagctggaacagaatgaggcagcttttaggtaagcagcccaggacagtccagggtttggcaggctggaacaggagctctctgagttttgactaaggccttactcttgcttcttattctgtgtgtagtgtggctgtgtgcaggttttccaacactggtgaagactggtatgtgctggtgggtgtggccaaggacctgatactaaacccccgatctgtggcagggggcttcgtctatacttacaagcttgtgaacaatggggaaaaactggagtttttgcacaaggtaggaatctgccagtggttctcctagattttaagtcccattgaattctctcacttttgcttatgttatggatcaggtcttttggggaccagctccttgattccaatctctctcttaccagcacatggaaaatgctggggccttctagctgcagtgatgttcttgtgcctgtgcattccacaggaaggctttgtgctaaccatccataatggggagatagatgcacattcaattggtctctttcttactgttttaataagcaggcaacaatttgtgaccaaaattcagcagtttaaataattaatattctggctgggcgcagtggctcatgcctgtaatcccagcactttgggaggccgaggcaggcagatcacctgaggtcaggagttcgagaccagcccggccaacatggtgaaagcctgtctctactaaa

SEQ ID NO: 83886 - DNA, 2175 bp, Homo sapiens
acccgcgcccggccaggccgtttgtttttatagtgtcccagggtttgcttcagtctgatgcgagtttacaaggttagcctgagcccagagctttagaactggactccacagactaggattgccaggattgatgggatgatccctcctggggcacacactgccatatggaatcaactctaggtttgccagagtttggcatgttttattccagccaaggaagctgggatcaggaatctgacctcacaaaccattctttatgtgtggcattctctcttgcactgcagacaacatgtggtctccttttggggtttaactatcgtgttgtagcagaaaaacctgtgattatcagaaagtgattagatatttcccgtgtgtttgtgtagtaaaaatgaatggcttgtctgttcgttgtgcttgtggaaactctagactagttgaaatcacttctcagtgacagattttttgtttcttctgccaggaccatgacttcttccagcatgtggaaatgcacctgcggtctgaacatccccctctctgtgggcgggaccacctcagctttcgctcctactacttccctgtgaaggtaggttgggggaatctgagctgaaaagggagatctgagaaaggagcagcacagggagtggattgatgggaatagtaccagggagggtgctcccctcagggcagaccacagccagagcaaaggcttcacctgcttctgccaatctgaactctgagtaccaagagtcaacttaagatagtgttcctggatctacaagtggggttcaagtatcgagtggagaataaaaagttttcccggtctgggcgtggtggcacacatttgtggtcccagccaatcgggaggctgagccccagattttgagagtgcagtgagctaagattatcccactgcactgcaacccggatgatagggtgagaccctgtctcaaaaactaaaaaataaaaacagctttccctacaagtgctgctttagcatgtgccattttctttgggcatctcaccattttttttctttctgctttctccatatcttagaatgtgattgatggagacctctgtgagcagttcaattccatggaacccaacaaacaaaagaacgtctctgaagaactggaccgaaccccacccgaagtgtccaagaaactcgaggatatccggacccgctacgccttctgagccctcctttcccggtggggcttgccagagactgtgtgttttgtttcccccaccaccatcactgccacctggcttctgccatgtggcaggagggtgactggataattaagactgcattatgaaagtcaacagctctttcccctcagctcttctcctggaatgactggcttcccctcaaattggcactgagatttgctacacttctccccacctggtacatgatacatgaccccaggttccagtgtagaacctgagtcccccattccccaaagccatccctgcattgatatgtcttgactctcctgtctacttttgcacacacccttaatttttaattggttttcttgtaaatacagttttgtacaatgttatctctgtgggaggaaggaggcaggctgtggtgggactgggtagggtatagtatcactcctgagttccactgctctagaatctaaccagaaatagaaacctagtttttaaggtgactggcatccatgtgtcttgttctggagatgaggatgtaggtgggaggtttgaacccaagttagagcaggaagaactgagtagactccttccttccagataccgacttggacttgcggcactctgtggctccccacccccaggtctgtggtggtttctttgttttttcctggttctttttgctgtgctgatgaaacatgacctcaataaccatgtgtatacccacccctcttcccactgggtattgaggaagggtggctgattcttcctcctcttctactctgaggatgttagtatggggattttagcatgaattctagctggggagtcttaacagatgccccttttactgatacagcacctaaagcgatctttggctccataggaccataggaagggtcagtacagaagaacctagatactgccctgcccctgagaactgtgtatatgtggggcctgtctgcagcacccatctcaggtgggttccagagggcc

SEQ ID NO: 83887 - DNA, 1003 bp, Homo sapiens
ggacaagatagggactcttaaaacacctgcttggccatggttgattgacatttgagtgatctggtagcccaacacaccctgtgaagttcaggtgaactgaaatgggcaggtgtaggctacacaccagtctgaaccagcacaaccaagagttgtttctcttttttttctttttctttttcttttttttcttttttttttttttttttttgagatgaagtcttactctgttgcccaggctagagtacagaggcacaatctcggctcaccacagcctccgcctcctgggttcaagcaattctcctgcctcagcctcccaagtagctgggactacaggcatgcaccaccatgcctggctaatttttgtatttttagtagagatggggtttcaccatgttggccaggctggtttcgaactcgtgacctcaggtgatccacccaccttggtctcccaaagcgctgggattacaggcgtgagccactgcacttggccaggagctgtttaagccatcaggagacatgctgacccactagaagaggctgctacgctcatttcttccacaaacgtttactgggcacctaccatgaaccaccacctcccagctctgttctgcacccagaggttggaggagagtttataaccaggcagtctctgtcgctgtgaggttggtggtgaggtgagtctgccagagggcctgccaccagtttcagaagagcctgcagcctgcatctgatttcctcagccacaaccttgggacttcaggaaaaatcagaaggtcccaagtctgaaaaatgaagaggtggggagtgggcagcaggggttttaggtcaggaaatggtaggaaacctgtagttgtggctcataatcctagtgggatattagaaccctcttcatttgtcagaacagattcctggggtctgctcccaattattcacacggtggttcatgcctggtaatcccagcactttgggcggccagaggcaggcagattgcttgagcccagaa

SEQ ID NO: 83888 - DNA, 1335 bp, Homo sapiens
agaattacgtgagatcacacagataaagcagttggccccaaggagcccttaccgtggaagtcaaggctgcactccagagccttcaggaaggtactggaattagccataaaggacaggcagaaaatccatgtgttcattttctcagacaacaaacactgattgggttggccagccctggtgctgggaagcagggagagacatgcacaagatgcctctctgctgttgacacaggcacactgccccctgctgcagaagcaggagagacaatggcccagtcagcctgggtgcttgggaaatggctccatgcttaaggatgaggaacaattgattaggcagagattggaaggaagctggcatagcaggcctggaagccgagttgagtttggagaagggagagatgtttgggagacctgcagggctggatgtagggagcggcggagtgggagatgagatgaggggaggtggtagggatacgattttgaagaacttcgaagatcaagtgagaatttggatttgatttcaatgacaaggagttttttgttgttgttgtttgtcttttttgagacggagtcttgctctgtcacccaggctgaagtgcagtgtcccgatttcagctcactgcaaactctgcctcctgggttcaagtgattctcctgcctcagcctcctgagtagctgggattacaggcacgcgccaccatgcctggctaacttttgtatttttagtagagatggggcttctccatgttgcccaggctgctgacctcaacagattcacctgcctcagccttccaaagtgctgggattacaggcatgagccaccgcacctggcaatgatgagatttaagcaggttttgagatgcctgttcttgcggcttcgagggacgaagcgagtgttagcagctgatgttgttggtggcctggtatgcctccagccttcccctgcatctcaggggctctaattgtgctcaaaataaataactgcaaagagaggggttctcaggacaggcctgggtcagggaagcctggcctgggagttggggccctgggtgctgggttctggtcccagccccaccaccagagcatgtagatctttcctcctgcctcagaggaggactctgtcacccaggctggagtgcagtggtgtgatctcggctcactgcaacctctgcctcttggggtcaatgattttcatgcctcagcctccccagtagctggaattacaggtgtgcgccaccacgcctggctaatttttgtatctttagtagagatggggtttcaccatgttggccaggctgatctcaaactcctgatctcaagcgatccacccacctcg

SEQ ID NO: 83889 - DNA, 1010 bp, Homo sapiens
ctggtgtcctgataagaagagagagattgcagggcacggtggctcacacctgtaatcccagcattttgggaggccgaggcgggcagatcacttgaggtcaggtgtttgagactagcctggccaacatggtgaaaccccgtctctactaaaaatacaaaaattagctgggcgtggtggtgcacgcctgtaattccagctactccggaggctgaggcagcagaatcgcttgaacccaggaggcggaggttgcagtgagccaagatcacgccaccgcactccagcctgggcgacaatgcgagactctgtctcaaaaaaaaaaagagagagactcagggagaagaccacgtgatgattgagaaactgcagtgaggtccacaggccacacagcaccaggaattgtacaccagaacctgggaagagacaggaaaagatcctcccctcaagccttcacagagatcatgggcttgccaacaccttgatcttggatttctagcctccagatctttgacagaatacatttctgttgctttaagccaccaattatggtactttcttacagaagctctgggaaactactataccacccacctgaacatttaagattgtgtattttggccaggcacaatggttcacacctggaatcccagcactttgggaggccgaggttggaggatcatttgaggtctgaagtttgaaaccagactgggcaacatagggagaccacgtctctagagaaaaaaataataattttttttaattagccaggcatggtggtgctcacctgtggtcccagctactcaggaggctgaggcaggtggatcgctttagcctgggaggtcaaagctgcagtgagccatgatcctgtcactgcactccagcatgagcaacagagtgagaccctgtcttaaaagaaaaaaaaaaatcagtctgggcacttgtaatcccagcactttgggaagccaaggaggacagatcacttgagctcaggagtttgagacatgcctgggcaa

SEQ ID NO: 83890 - DNA, 1040 bp, Homo sapiens
ccatcgcagccaaggtaggctggccagggccccccttcacgcccaggtcagtcccaggaggcccagccagtggcctcagggccggctccaaccacctggcagggctgcctggaatttgggcagaggggattgggggcgcaaggcttcagcctgcactttcccaccctcagcacggtgaggaggtgtcccccgccgccagtgacctggccatggtgctgacgcggggcctgagcctggagcaccagaagagcagccgggactcgctgcagtactccagcggctacagcacgcagaccaccacgccctcctgctctgaggacaccatcccctcccaaggcaggcccgcggggctggggtgggaccagggacagctgggacttagccatccaggagggccccgtccttccccctctgtgctcaccctggtgggctgggggcaaggggccacctgggccctgggcctcactgtgtcccgtgcccccaggctccgactacgactgctactccgtgaatggggatgcggacagcgagggcccgcccgagtttgacaagtcatccaccatcccgcgcaacagcaacatcgcccagaactaccgccgcctgatccagaccaagcgcccagcctccactgctgggctgcccaccgcggggctgcccacggccactggcctgccctcgggcgcaccccccggcgtggccaccatccgccgcacaccctccaccaagcccaccgtgcgccgcgccctgtccagcgctggccccatccccatccggccgcccatcgtccctgtgaagacgcccacggtgcctgactcccccggctacatggggcccacacgggcgggcagtgaggagtgcgtcttctataccgacgagaccgcctcacccctggcaccggacctcgccaaggcctccccaaagaggctcagcctgcccaacacagcctggggcagcccatccccagaggcagccgggtaccccggggcaggggccgaggacgagcagcagcagctggcggccaaccggcacagcctggtgga

SEQ ID NO: 83891 - DNA, 1061 bp, Homo sapiens
gagggtcgtttggccggctcctggaacggtctttggcgccggcctctcccagctgggagagaggggaggccgccgcaggaggctggcgcggctgggatggcggaggaagagctggtggagatggaggaggccccgaatcccccagggccggcgggactgcggctcggcgggggcagggcgcgggctgcgggctccgcctgcgcggccggggcgccccctcctggcccgaggccgggactgcgcaggccccagcgggccccttcccaccccgcgcttgcctcgccaggggccacgagggacatcggctcggcgctcacacgcatgtgcatgcgccaccgcagcatcgagaccaagctgcggcagttcaccaagtgagtgggcgctgcgggcgggcaggggggcggggggacggggcgtcgcgggggagcccggccctgacctgcgctcccgcccgccctccgcagcgcactgctggagagcctcatcaacccgctgcaggagcgcatcgaggactggaagaaggcggccaaccagctggacaaggaccacgcgaaaggtgagggtggcgcggagccgggcttcccaccccccactccgcagggaccccattagagcgctccgctctccccttctgcagagtacaaacgagcccggcatgagatcaaaaagaagtcgtcggacacgctgaagctgcagaagaaggcgcgcaaaggtagtgcctggcgcggccccccagccacagccccacggccccgctccacagccccaccgccccgtggggcgccccaaagccttcatcccagccagaggggcgctgtccccgacacaggaccctccaacctgttgggtgggacagagggagctgcccttccccccaaacctggtccagaacctccctatgggaggcagcaggaggcccaggcacccccgccccaggagtggctctgtccatccggcgtctttcacacattctttctttctctgtctctcctcctctcctcccacatccttcctgtagagctacttggtaagtcaaatgtcggtccctccagctgctcctc

SEQ ID NO: 83892 - DNA, 1037 bp, Homo sapiens
ccgggagcctcgaactccaacctgccagcaacccccacccctcacggggcctgtcctagcagcactgtactgggtggtgtcacccccatccctggcctggtgggattctgtgttgtgcacttggagaatctgcgctgggctgtgggggtgggggcccttgggagatcctgtggggtgcctcgttctttccccttctcccagcccccaaatcctgccccttcatcctaggctaaggaaagggggcacggcaggagggcaggaatactggttcctggcccccaccctatcactggagctgggccctctctgcctagtcagcgtagggcagccctgccaaaccctggcctcatttggggagaggaacccactaattttcccaggaggaaaaatgggggctgaggtcaggggaagggtccaatagtctccttagtgaccttgagccatttccaggcctcagtttccccacctggtggggtgaggaatgaatgggtggttggatccagcctgaccttaagcaatcctgggagacaaggagggctcggagctgagagcccagggtggtaatggggtaggaaaagcgcttccttggggttgctccaccgaccccaaccttcatcccgcctcctcccaaggtgatgatcaaggcctatccttgggatgcagggacattcagcctggagaccttggagtcctggagcttcctggggctgtgggggtggggcggggctgggggacgcagtctcacggtcgggtgcagaggcctaggtcggcggggaaggagttaacggttctccgctttattattttttcctgctttggcggtgacagcattgtctgggctccggggccgtgggggaacatggtggtggaagggggcggaggccggtaagaccccggactcgttaaagggccctagagtcggtcctggatccaaaccccattcatggtttggcggtctggggcgcagggagcctgcgtgtgcacaggctcgggtcaggaccccacggggccaccgcgggcaccgcacggacaccccg

SEQ ID NO: 83893 - DNA, 1027 bp, Homo sapiens
gcaggaagggctgcttccctgtgacctccagtctccctgtgggaaccagcctgccttcctgggagtcctcctggccagggagccagcccagcctctcccgggtctccgagtgctgatctcctcgtcttgggaggggagcagaggctcagagcagtcagactcctcaaaccagggtagaacaagtttgcagagggaagctgggaaaatgaggctttcctcagaatctcccacggtcagtcagggaagtcttgagccaaggggttgaggcctctgggtagaagattctgagggtcagtggatgctttgcaggcctagagtaggatctggtgtgagctctgccatggatttgttgtgtgacctccagcaagcccagtgccctctctgggttcttggttacttggtcagtaaatgcacatttggactaaatgggtgtgtgagacaccccctagccttcaatgccctggacccccagccttactttgcaacgacctaggaagagataccatagataggggcacagaagcagtgggcatgccaggggacttcagaacagctgggggaggggtcagattgcagggtggggcccagaggacggctcacaccctgggaagggagctgaggacagtcccagccctgggaggggcagacagctggcagacagggtcgagttgcggggcaggccttggagctgggaacagctgggagagttttgtacactcctcgcccatccctggttctgtgtgctccaagtgccatcaaggccctggggacctcagctcccccaccccctggcttctgggccactccccagtgactgtctcctcagtaaggcaggagggaacctctaagaaaaagctggcaacaggtgcatgggtgggatggcaagagtgagagccggccctgagtcctggacttgccacactgtgctgtgggctggctggcctcagcctcggtgcccgagggtggttatggacctacagaagatgtgcagggcctgagagcagccatctgcattaggtggggcagg

SEQ ID NO: 83894 - DNA, 1148 bp, Homo sapiens
ggtgggtgggcagcagtgagtacttggtgctggggttaggctgaccaagggggtctttggcaaggcctctcatctgtgccgcacatggcattctctgctagaaagggctctgggctgaaatcacaagtggcccatgctgaggagttgaatgtacacgatgttcctaatgtactgtcatttgtggccaggattaggaaggaaatggtgattccagcttggaggaaatccctgtggcaagagagggcaggagcccagcagggacccaagggcttgggcacttctcagcacttcttggagttgattatcatggagacaacaggatttcctttagtgaccagtccctttgttttcatttgcactgaggattcagcatgcaagaaggtccctgcggccgtgccaaggcttcatggccgggggacaatggtctccaggcaggggccagaccggccgcactcttgcccctcctccccgcacccagctgtctcctcaccccggccttgccctcctcacactgcgtttttctccaacaccaagacactatctcagcagataccccatcggtccttcctgctatctcagcttcagagcctccagcacagggttacacgcctgtccccagccctcgccatctgacctgcatccagccgtattctggggtgtgtctatgtgggatagaaggcgcagcctcttttctaagacacaaacgcagacctcattgtgagtcaaacacctgctgagttccctcacagggactccttgcagaatgcgaaatgcttccgccagagccagacacccgccaagaaccctgataacacagttcagaacccacctgactctgaagccccttggcctgcagttccatgtgcatgcccagccccacggccaaagtaacccaggccaccttgtcccttcctggaagttaattttctgtcctacaagcattcatctcccccattgcctgtaggggcccagccctaggccttgtggtgtaagctgaaaaggaaccagggctcagggagggcccaggggccaagtaccaccttaggaaggaaattggtgggaactagcagcaggtgaggcaggagacaggggagggctgtcctgggaaagaacagggggcttgagtacctgtgaatggacacagggga

SEQ ID NO: 83895 - DNA, 1046 bp, Homo sapiens
ctcagaggggcagtggcgtgatcctggtggggagtggagggagcaggcctcttgcccaccagcgcaagttctgctatagggcgcctcgcctgtaacccagagctaggactaagacatgtcccctcgggtgacttccaaggacgcctcatgtctggggccctcttatttctcacgcgtttaatccagggaagatttcctgggctggcagggaacatgtggatgaaaagcctatttcatccgtcttaaaattctctgaaaatggctgatcacaaaaggaattttttcagcctcccgggagggggtgggggagggtacaaataggagaacccctccccttccatttggccgagaataactgaaggagccccctcccagccatgctgtggcccaccactacggctgtggcacctccatcctcccagtcctttgagactctgatctttttaccggcctctcagaggccgccgtgaggctgctctgatatttgctctttgttaccactggtgagtattcatgtttaacttctcgtcctgtttcctgacacttatctcagtgctctttaagtgggcacttataaagcctagagaaagccatctcagttcataaaatttcacaaaacccctggactaaagatgtgaagacaagaaaggcactcatggctctagctcctaatcacagccagaaaggcaggaatggcccgtgcccagggcagcagctgtgagctgtgcttcctcttggggtgctggggctatgcaggtgggccaggccacatggctgtcaggaggccagggagagtccaagcacaggtcttgcccaagagctgacctctttatctttctgtttgaacagaggaggccagggctgtgcacagcaggctcgggaccgtgaaggtagagaccagcagggaaacagtgaaatgccaagcagaaacgtaaaccaggacccagactctgcacaggtgggggtggggcctcaagaaggcaagtgtcagggccttccgcctagagctccaaggccgagccaggccctgctgccacccatcctct

SEQ ID NO: 83896 - DNA, 1065 bp, Homo sapiens
aggttgcagtgagctgagatcgtgccactgcactccagcctgggtgacagagtgagaccctgtctcaaaaaaaagaaaaagaaaaaaatgaatactcaaaccccagcactctcccgtcttctgtcccccaacccacccagcaactagctcttgtccagttctgtgcagtcaggactctggacggcacatggcagaaaaccaattctcacccttacaggaagaaaaacaaaggtatcaatactattcagtgtgccgatctatatccggaaaatacattctatacttttttaaaaaaagaaaaataaaggtagtgtgcaggcagaggcgaggatgggctcatttaaaactagaagttcaaggctcaggccacctcctgtcctcaagtcctcctctcccccgccacagctggctcttcctcctccatctgccccattagtggacaggccacccgctttgtggccaggtggctcgctccggccctctcggcaccccagccttcagcacctgtcctgggctcatgtcccatgggacccatcagtgtggccagagtgcgctggtgctgattgccctgaaaagggtcgggtgcccaccctcagacacaggagcaggtgtcatgggccgtcatggttctggaaccagaatccaaggccatggacatcaggaggcagagccaacaatggtgtggacctggtggtctgggtttaaatgctcacagaggaggagtgtgaagtaggccctaccaagggccaccatgggggtaactgaaggagtgactttttcacctccaagcagccaactccttccttcctgcaggaaagtgggagggtgaagctgtatatgtgacccagtgaccctccagatccacagtgggagcaggcagtgaggaggtggtggccaggtatggcctccagctgattcctcctttgtggcctccttccgccaacagcactatttctggaagcatccatgcaggcagagcggatgggtcttctaccctttgtcgcgtgtggaattgggacgcaggcccagcacctcataccagggcccgcttggggccctgtctcc

SEQ ID NO: 83897 - DNA, 1024 bp, Homo sapiens
tgtggcaggccttgctagaccaggctgggatgaattaggtctgacctggggtatgaggggagtagaggaaatgctggccagagggagccctgcacagtgtgcctagggggcccaagagcctcaaaggggtggcatcttggtgtttgcggggtccactgggctttgagcagggctggtgggaggagactagaggtcacaggtgaacttggcaagaggtggccatgtgtccttcagggtgacccctgtccccacagcccaagcagccatgctcccactgaatcagcggtcacccccacttccaggagcccctgtgatggaggggaggacctggcagcagattggtgggaaagctcccctcctcggtggccaccacatggcacacgtggtcagacccctcatcaggttcacgctggccccttgccagtctttcactaaaagcacgttctttgttgtctgcacacctgagaagcatcacctcccccagccccatagctcaggcaaccagcagggctggtagggtgatggtcaggaacagttttcaggggctgagaacttgataatggatttctttctgaagcttgagaagttgtttctagatgggacctgcagtattctctggatctcactatttagacttcacctaaggatgccaggaaacttggaaagatttgacattggtcactccagcagcttcattaattaacaagtagctaatgtgtaccataatgtggtatcatttatttattttttgagacagggtctcactcagtcacccaggctatgaagggtgactgggcttcatagccagtcactgggctatgtggagtgcagtggcacaatcacggctcacctcgctgtgacctcctgcctcagcctctcaagtagctgggactataggcacacaccaccatgcctattattttttattttggagtaagaggaagtcagttatgcatttttcttgcacttggtaaatctttttttttttcttttgagacagggtctcactcagtcacccagaatc

SEQ ID NO: 83898 - DNA, 1436 bp, Homo sapiens
tcgctctgcctgccaacacggccctccggccagccgcgctttggcttcagcgactgtgcatttttcccctcctcttcctccctgccgccttgcagagaggactggtggagaatgcttgcatctgtaatgagccactgtatgcggtgaatgccagggcctgatccgaaccggcccagttaatggtagatgaggtccgagccacctcccaggagaacagggcactcctaagatgaggcgggcatttggagaggatggggcccacaagggaaaggaggaagcagtcatgggacttctttcacgagatcctgacccagagaagcccagcagcaaggcttccggttcattctgggcctcctctcacctctgctacagacaggcgtggcagcctgtccagctgagcaaatgctcagtccctaatatgtgcctctgctactgcccctccccagtgtcctgggtttgcataagagcccttgtgttgggaagagggggaataggtggagtggggagctgattggtcactgagggggtggggggccgggcagccgctagaaactggacttgtttttaattgtggggcctgggggaagggcctgagaagaaactctctttcatgccgtaattgggaaattccactttgctggcctcgtgcattctgccctgtggacagggcccttggctggggccaaatcaccaaggtgtccaaggccaccggccgtctgcaccactggcgcccctcccaagcccagctcccacatcaggctctgtcatcccctgcagctgccgaatctcgagtccatttggcatcgggaccccctcctcactctgtgagtctttgtgcggtgccccctcacctgcctggaggcattggccgggcccccagaagcccattgtgctggtgctaatggatggcgaattagagtgaagtggccagaccagatccctgtttgcctctggccccagctcacaagctagagcttctaggcggccccactcttcctctcacccttttaatggattgcgttcatttgttcaggataaaaataaattgctgtggcaaatgtgcaccaacctaagtctgtttgctagaagaggccccgatccacctacccagaatgcagatgggttttgatctttcataagtccgtagccgtatcgattgggcccccagctgaggggagggagacaggacattgaacaggcaggaggaattcttccacagagcttcctgcttccctctcagcagaagcttctcttcttgctggcttgagttgtctgtccagctccttgtgtgaatcttctggagctttccacagccgttccccgcccaggggccagggctgaagtgtttttgtcgccatgcaagggacgcagaggagtgtgtgcagcaggagccgctttacacaaccggctcccggcttctcatctcctaattagag

SEQ ID NO: 83899 - DNA, 1043 bp, Homo sapiens
gacatggaaaaggccctgcaaacatgtggcttcctccatcctccccatgctcctgtggggggctgaggccgttccaaagagctttgttgaggtggaggggggtatccacctgccctcctgcttctccattgcacttccttttctcctgcgatgactttaaagaggggcatcgttggctgggtgcagtggctcatgcctgtaatcccagcactttgggaggccgaggtgtgcggatcacgaggtcaggagttcaagaccagcctggccaacatagcgaaaccccgtttctactaaaaatataaaaattagccaggcatggtggcacatgcctataatcccagctactcggtagactgaggcaggaggatcgcttgaacccaggaggcggaggttgcagtgagccaagatcacaccactgcactccagcctgcgcgacagagcaagacttcgtctcaaaaaaataaataaaaataaataaataaataaagagaggcatcgcgatggttccgcagatgctggcatgaagccacaggcctgatgaggagcacaatgatttcttaaccccctctttagctgttaggcaaactctaaattgttcttctcagcctccaagattgcacactgagaaagaaaggaaagagattcttctggccagcaagtgaaaagctgttcttttggcaggagtgtgtttagctctgggacctggagcggctgctatagaaagacagaggcatcgggagttcttgaagacacacatctggtgggggttcttggcattgaggaagatgcatgatttccctaaagaccctgggagcgtttcctcttccccaggcagctttcccaggccgcacctccatgtcggagtcagtgggggtgagaacggggtacccaagctccagccaggcttgagtgggttggacttcctgtcggtgtccacacagcctccttttctggtggacataacggttgagatgcatgtcaaggtgaagccagtggctttaaaaccttcattttttagccagctactctggctccaggccctt

SEQ ID NO: 83900 - DNA, 1079 bp, Homo sapiens
gaaagcagcggaatgttcccacaagagtgacagttaacatcatgtggttttccaaattgcagaggcatcagtactcatgatgagctctccttgcctggacgactttcagggagtcagtggaaggagaggcctttggaggaggaatctatagctagagtcccctctggagaactgggctgaggtgggttttccaccctgtctcagccccacatgaccaagacgcatggcgagaaggagtttggggtagtaaccagcatctccaggctgcatggagcagaagtgcaggccccatgggcatgcttgcatgccctccccacccgctcagggcctgaggctctgtgaagctggaggccagcccactgccatgttcccaggtgcagactccaggccagggaggctttgcttgctttgcagtgcatctcctgggcttcctgggctcacgggaatcgtcattttgcagaagggaaaataagaggaagtaacgtgcccactgggctgggcaggagctgggctgcaaactcctgcactctgctaattcagcagccgccactttgtcccttctgtgtgggagtgcagagcctggtgccgtgagaggccctgaacatcctgcgtgccaggaccacctgaggcccagctcctcagcgtgctcaggagctgggccagtgggtcctcccttcccaccctccaggggctcagtatggcgatcgcttgctcttctggggctcaaacctgccatgggccacactgggttctcagtggaaattgaggctggcctccaggcctcactcccacccgcacagccacagaaggtctcttagccattggcatccccactagaagcccagtgggctgggacagaaggaaccttgtggctgggcctttcacagaggactgggtctctcctagtccttcacccggtttctccagactgctgtcccccaaaagcagcacccacacctgtcaatgtgcatcctggcggacagccacctggcccagctggttcgggaacctgctgcccactctgccagcacaccaagccattgtcaaccagctccagggttgcaggcccagccacccag

SEQ ID NO: 83901 - DNA, 1106 bp, Homo sapiens
ggtggacgttgcagtgagccgagatcacaccactgcactccagcctgggcgaaagagcaagactctgtctccaaaaaaaaaaaaaaaaaaaagcctgggcctccctctgatgagtgaaatcggaacccctggggtgatggggttattaaagtggtctggggtgcttggggactgagtagactaccgactaccatggtctgggggtcaggagttgaaggagtcccggcaggggcctaggctgtatggggcttcaaggcaagaaggagcctggggagctcatcttgctgtaaactaataagcagcttcagcctgtgggccacagtgaggatcagagaccttactcaggggtcagcacggaggcactgacagggcttgagcaggggatcaacgtgactggatttctggcttgaaagacaactgttgctggggcgaatgggttggaggggctgaggtggagccagctgggaggctgttgtccaagcagagactgtggcagcttgtgagggggatgggaagctgcagccggattcgagaatgaggattcgagactgagtaggaagtagatttgtctggtgactgatgtggagagagtgaggggagagggagctgggagtgtcagggtgtccaggcctctggtttgggcagcgggtggatggtgatgccagtccccgaggtgggagccccggaagagtggcagggagtgaggagggggtgcatgtttgagtttgaattactttgggggcatcaaaaagaaggtattgaagaagtagtttgctgtaccaggctctccaagggggtaccgaggcccaagatacaatctcgaaattgatggcatagtcattcattcattcattcattcaacagatgtttactgaacactaactctgtgcaagggaccattctagatggttctgcacttgtggagctttcattcttagggagttcttaagaagaggtcgagtgagagggaaggggtctgaggctgaaccctacgtgttccagactgtaatggttggggaaagaaggagaagccagaaaaggaggctatgacgaagggccagagaggtaaaggaagcggccaagcagggagatggcaggaggcagtg

SEQ ID NO: 83902 - DNA, 1073 bp, Homo sapiens
agggacccagcacaatgcagtccaaacaagaagtggaatgaggcctttccttgaactggccttctcactcagggctccttcatgccgctcacgcgagctgtctaggaggttcttgggattgaggatgctacagtttggaggtgtggctcttggtaaggaatcccttatagagtgattcacagctgggaaaaacagcacagaaaaacgccttttctagacccagccatctccccggcaggaccatgagaggacatacaggaagtctgagctcagcaagaaagacggagctcctgggaggagagtcttgctgctgcttcctgcccgctggcatcaaatacagtcagtctgtccagacgcctccgtgagattcacttggaatactctggatggttctgcacattcttgttttgtgctttgggctgatgcttctgggaacatctgatgcttctggccaagtttggttcccagatcctccacatcctgcctatcttgtgcttgtgcctggccatttcctcactggtccagggagaaagtgatggctcccacgcaacttctggaccagaaaggggccagcctggaaaatgatggtcccagatgcctctgttggccgctctgcatcccccagtgtcctccctgggtttccagagagctgcggccaggtgctggctccatagctcttcacagcgtcatttcctgcatcctcagtctcagcttggcaggacctgggtttccgtctttatgccatcttctgccctcctgcatagcaaggcaccacctcctaatctgtgagccccaaacatgtccgaacattagtgccgaagagacaggcagcctggcagagctgcaaaggacatgggctctgaagaccagctgcctgggtcagcaactctagcactcgccagctatgtgactttggataatccttacccaaattcacagctcctctgtgtatataatgggaatggtaatggtgcatatttttcaagtgttttttttttttgtttctttgttggttggtttttagggtgttagatactatgtgtgaagggtttaggcaggtcaagcacatagta

SEQ ID NO: 83903 - DNA, 1046 bp, Homo sapiens
ctggctatgattgatgcctccggcgctcctgtcctgccgacccaggccggcccacagatgagaaagtgattgccccttgagtgggttcccgagttggtgccattgcggcggcctttgtctacgtagctgtgcaccccctccagttctgcagactctacacccccaagaccctgctcagcctccctttctcccagccacttgattcttgggggaaactgccccttccccaccctgtcctcttggttccataccagcctctccatcacccaccccttctgtggaccacttcctgtgccaagcacgacttgatgctctttagccctgcctggttcacagaagaggagctggcctcggagaaggtggtgctgcctcccctgagcggcctctggcccttcccttgtatcctccaggcagcagatcttgagcccacaacgggctgtccgggcacatggaccccaaccccagcagggagggaggccggagtggagcagggaccctgctgggcctgaactgggtggctgacgttttcacatctggttctgttgaactgtaactcgcgttatgtactgaagccagggttatttttatcctgacatgtgaggtttcttcacgtcataaccacaaaactcaatccaaaacatcccggggcaggttgtttgtgagacgttctgtggattctcatgtcaccacatcaggtttcacttagtaacatctgcagggctggctccccggccgcccaccccgccagcctgggtttctgtgtggagtgcgtctctgtgcccctggccagccgccggtcacgtgcacttcctgccaggggctggcaggctcctcacttgcccaaaccagaaatacaaggcacagtggccttcagctgagggatggcactctccctcatgctcctgccctctgcaggattggggaatggaaatcccactctcctgggcccctcaaagagagcctgtctcccgagacacacagccgggttgtgggcccccctctccctcgccccctgctgcagcagctgcccaccatctacagggggc

SEQ ID NO: 83904 - DNA, 1157 bp, Homo sapiens
gaggagaagtgacaattgggcagtgtgggggaggcactggcactgtgtttgcattgacaggaatggcttttgagggggtaggccttatcttttttgtttgttttctagataaaatttgcccttttgaagcatagaattcactggcttttaatatactcacaagctttttgcaaccattacccccatctaattccacaacattttaatccctcagtaggagccctacagtgctaaccttatcttgtattcccatattccagccacctggccggtcctggcccacatggccctgcccatcaggctctgtcccactttccctggtccagggctgaagccccggttgccgtcgttattcttggcctgggctcagagtagcccaggaagaggcacaggcaaccacccagtcaactgatgtttgttgggcatctgctgggcgcagggacagtcctggagatacaccttttggggggacaggcatagtccctagcccagagcaagagaggagtgaggggcagaaagagcaggcgaccacctgcagtgtgaggagttccctgcaggataaacacagccagcagaaggtggccaggaagcctcagcagcccctggggcaggtgcatgcacacaggcacacgcgcgcacacgcgcacacacacacacacacacacacacacacacacacactgaagcccctcccaacagggcaggtccgtggcccctctccctattgcccattgcagcagagtggtaggctggactttgccgccctgccagctcttggtgccaggcaaagatgggtgctgtgcgaggagaggcagcttctaaggatacgggggctgtagagcagccctggggacattgtgacacagtgctgacctgcgctcacactcagcactggtcccacgccccactctgcctctgtctcggaagaactcagcaggcaggtggtcaggctggggcctcaccccacccacatctgtgcagggacactttagagccaccgaggaccacctgacatgtctggacattaggaagtcctttaccttggagaccagagtagcacgccaaatgtggaggacgctttagggtctgcagtggcctggtgtcacctctgcagaagcagctgttctgtggcccaatggtgggtggggccgtggcta

SEQ ID NO: 83905 - DNA, 1024 bp, Homo sapiens
acataccataaaattcataaaaacgactctattgtatactttaaaagtataccatagagtaacttttagtatttttcgcaagattatacaaccatcagtactaattccagaacattttcatgaccccagaaagaagccctgtatgtaccctgcacccgttaggagtcactccccatgcctccctccccacgcccctggcgaccacaaatccaccctctgtctctgtggatttgcctgttaatggagtcatcatacaggatgtggactttgtggctggcttctcggcaggtgttttcaaggttcatccacgtgtagcaggtacttcatttctttttattaccaaataatattccctggtgtggatgtgccacgttccatttctccttgtctccactgcagggcctttgggttatttccattttgtagctattaggaaaaatgccgctgtgagcatttatatataagtttgatgtgcacagacgtttgcagttctcttggtaactgcctaggagtgggagtatacctatggcagctctctgggtaactgtttgaggagctgttggcttgactcttgcctcactgtttaattttggatgagtcattcccccatcctccccccacctccatttcctggtctcaagtcccctccctggccgtgcttggacagtccagcaagcattggtgtgcatggcctttgtacatcctgccgtggcaggtgtgcaggggctgaatcgggcaggaccgcggcgtcattcattgctgtgccacttccccatcctgccctccgccctgtgtctttcttctgtggctgaagcaaagaatccctggaggctctgtcctcagtggaagcagaggcctcggccctccctacttctaggctgagacccacccagggctccccggctcctggcctgggtggaggggcaccccttgctcctgccatatgactgggctgtgtggcagccatgtgtctcagccacgtggattcatcagctctccactctgtgtgccaggccacgggcag

SEQ ID NO: 83906 - DNA, 1141 bp, Homo sapiens
acctggccttgtgtcatgagctcttgaagatctggccctgcctaccactttggcctgatttctggccataccctcacctctggccccattccccactctggagctggccccaaagcctagtttcctggaatgtgccacgtggttctgcgtccatgaatggcttatgctaggtaagagaatactttgaatgccattctctcccttcttactcccttggccaactcatgctcaactacttccagagcctcctggctcccccccaggcatcatcactgggtccctggcacccgccctgtattatcagtaaatgctcaccacctgactcctccgggagtccatgacctcactgaaggcagagcctgacctgtctggccttgtgtctcttatacccagcacaggactagcccacagcagctgctcagcagctgtctggagagggagcattgtgtggttgaagttaactggtccagggtcaggattggatgtcaggactgtctgaccacagcaccctgtgtagtgttatcagcaggctcaggtttggggaccagagctgggtttgaggtggactcgctgttaccttgagcaggtgactgtccaagtctcagttcccttgtgtgtatcctgtgaggtgagactggtgacaagtgagggcattcattgtggccgggagcgaggacagcctgctcctctggccctggagccactcgaagggtggagacaaccttgcacaggccaggcctctcggtggctttttccaggcctctgttctgacagggaagtaggtacctgccggatacccagcatgaatcagtttgtccccatggcacagggatcttgccgagtgctggcctggccccagccgccccgctggatcacactttctcctcactttcctcccctgctgcacgtggccaccagtgttggccgcccagaggtgtgtgcctctgtccccctgtgcagacagacctgggtgggatgggcagcatgggggcgagggggcaaagtgatgtaaagagacacagatctcctcaccgtgctcctcctctcccctggatcaggcgagagacaccagggagtgggtgagaccccaccacctcgggctgtgggcagagcaagagcaaatgggttaggaattaggttg

SEQ ID NO: 83907 - DNA, 1145 bp, Homo sapiens
ggcccagcacagaggctcaaagccaggtgcagctggaagagcagctccccacagtctctgttgctgggacccaggccccctgttgaggttgcctcccagggccttcctctcaccagggcctctcttccaccccaggcagaggcagagtcctggccaaggtgtgcatcgagattggtgctccagagcctcaaggtcaccccctgggctgagtcaggtttgctagcaactgggagcgaagcagcagccggactggaggggcacagaagccgggtatcagccggctccccacaccccaggccccacctcaagccattccttgccctccatcttggtggccccttctcctcacctctaggagactgagggaagatggggatggggatgctgtttcggggtcctgctttatttaaagtgctggaggggtgctgtgtgtgtgtgtctgtgcgcacaagcgcacacagtgttgtctcaggcagggctgtgggctttttgccagcctctggggaccagagacaaatcctatgatatgtaagcacaagaggagtggctgggattactgaacgaacctgtagacaacatttccggctttaattgtgcaattgaagtgtaatttgcattcatttgccatttggtgttaaactttctaaaataagagaattgaaaatgtaaaatatgcagctttgctggctgtgctctgcagtggggtgggaggcagtagtactgaggtgggctaagcacattctctgcaggggagaaagcggggttggaagcccttggtgtgggcactgctgtccatgctcagtcactaagcctgggccagggaacagctcagctgtgggaccagaaatcttggaatggaagtggtgagccagcctttcttgtgtgcccgcttttcgtgctttgcacatcaagtatctcttgtaatcttcacaacagcctggcaaggtcaaatctccattgcgcatatagggaaactgaggctcccatcctctgcaaaatgaagttcagacttctttgtgtcatgagctcttttttggtttatggttttgtttttttgttttgttttgtttttgagacagagtctcactctattgcccagaccggagtgaagtagtgcgatctcagctcactacagcctctgctca

SEQ ID NO: 83908 - DNA, 1095 bp, Homo sapiens
atacccccagctctcagccctggtgccctctccatgcagccctaggcgaggcagccaagccagggcccccggttttcaccccacttagcgttcctgcgtcctcagaagccaaaatttcttgcaagtcatgtgttgatttttcctcctctggagatggccaaggctgaatcagctggatttcccaggcacctccctgttggcaagtcacaaggcccacagactggcaggagcttgggtgagcctgggtgagcccaggtgagcccagagatgtagaggactgggaccgtccccccactgctaatgagacccaccattttcacactggcttgctctgttccacaccctgtgctctgccccttgtgagtgatcttagttcatcttcacgatcagacaaccctgtgagggtaggttctgtcattttccccatttcccctaagaggaaactggagaagttaagtaacttgggccagatctcacttatatgctccatgaagccttgtttatctgtccatctgtctgacacacacacacacacacacacacacacacacacaccccctcctcctgcacatcaaggctgggccaggttccctctgtgtctttatgtccccccgtccactcagaccctctcctagctctaatccctctccatcgtggcctgttagctgggagttctgtgaggacagtccattcagcccacagtaggtgctcagaagcgtcctctgagaaagtgaacaaatagaggagtttggttggatgaggagctcatctccttggacgtgccccacatctggggcctgtcctgctgcattgggccctcccacagcagattggaagcgaggcctatggggtagagcctgcatccttcgctcggggactgtgcgtagcttgcaagtaaaccacaatgaagcggggccctggagggaggcaggagccttctcctggctgccgtggcccctaggcttatctcctggtgacagagccatagcgggtatgagtgggcaccactctcgtgctgctctcagtgcagcaggcaccaccccgttccctgcccagctcatggagagaatttataaccctgagagtgtaccctct

SEQ ID NO: 83909 - DNA, 1053 bp, Homo sapiens
atctgtctgattccagagcatctaaaacctcacacaaggtgtcacctcactgcagagcagggacccggcccagggtggaggcactgccttatccaggcccaggccctccgctgaccccatagggttttgtccttggctgaccttcagttctaaatgcaccttctccctctgtgcatttaactttgacctcattctcctgcaccttccttcccaggccccatgggctgtccctggctgctcactgacctggtggcccctagcccccctccagggctcagtccagaagccctctccatcttccacctggctgaccttctcccagaagcgctgaggccggtggccaggcctgctgcagggtggtgtagaagccgcctgggtgcagatcaggagggccagcctctgcccccacgctgcccggctctccacgggaccaggcaggtcacatgacaccgcctcacctcggttttcttcccagggtactggggttggactggatggtctgagatcccttccagccctgaatctgtgtggtcctgactccactccctggaatactaatgctgcctgctcagaagcggacagtcttccataagaacagtacttgtttttcctcctcagattcttgcctcagtgttcacttccctccaattttcattccatccactctccaaaacaaacaaaaacacccctccacccccacctcaattccacagatatctttaaaatcagatcacgcagtaagatacggcctcagcccagagaatggaggggtgccgtgtcggtgcccaaagaacttgactcctcttgcaagagcccagcctgcaggggagaggagctgggtgggcactgatggcccggggaccctcttcctgaggcaccctcccctggccctgccgtgggcaggggacactgccctctgtcccctctccccgcggctgtccctgcagcttcttttgggggcttctgagaacaagtgagagggagtcatgtgccagggagaagggccaccgccagccagcaaagcagctagactccagccacggccctgagcct

SEQ ID NO: 83910 - DNA, 1050 bp, Homo sapiens
gggaacccactcactgcatgaagaacatgggccacccatcacacccactgtggcacggccatgactcaggaggaaaggatggtagggggcaaggtctagggagtggtgtaagggcatctgaaaaggagcttttgttgtaagtttcgtaaggtacaccatgggtacagcgatgtacccggtccaaggtggcccggtgcctccccaacccagtggtacctgggttgaggacaggtagcagaagtgcctgacccatggggtagaaccccaagggctgtcccagcctctgctgagtcctgaggggagaggaatggggcgccttgaggggctcttcactggtggcagatgccctatccagccctccttggtcttgggcctctcagcccctcaccagcagggtaggcgctgggaagcaccccctgccatgccctagactgtattttaaggtgcgatttgctttggtaggggaggaaggggagagttcatttgttttcatggtgcaggtcccaggagaaatggatcggaaaaactcaggaggttcagagatctgaaaggagagcactcactggggccaggccgagttgccagaaagagaagcagatcggggcttgcctaggagcccagaggaacggcccaacttgggctggcagtgccactgctgctgccacgcctgcctggagcctcagcccagcccagagcagagcagagcagagctggggtgaggctgcctggcttcctgcctcagggcagaagcagccctgtgtatcaccccagcgtgcccctttccttctccagcctcatgccatccggtccacagatgtactcccttaccttatccttcccaagcagtccttgtcaccgtggtcaggtgggttggccagctgggtcccagggctcatctgcctgctttaaagggatttaattcttgatgacacggactttggcctggggtcccacctgggggaagccccaaacccccgagctgtgctgtgaggaatggtgggaggaagcagagtgcccctaggttcccaggtggctggggctgctctctcc

SEQ ID NO: 83911 - DNA, 1269 bp, Homo sapiens
tgctaagcactgggccgggcccctgctgcacgctcagttagcgttggttgtgttactcatttcagctggactccattatgacctctagtttgaaattggacccttaagctttgcctttttggggccaccaagagctgctggtgcagagggagaggctgacccagatcccaggcagcaggagtgagccctctgagagagctggagtacagaggctggcctgggaggtggagggggcccctggctcttcctgtcatctgggcaggagtctgccccagccacacacacctttccacactccattctcagccatgcccattgcgtggtgttcctttaccgggttcccctgcctcccagccaagcggcagggtttgcagctgcgcgtgcccattgcacggcagcatcccatccctccatccataccagctcttcaggctgcatctcagatgctgacggtccaagctgagcctcagcccactttcctcttctgagcgccaaggcactgtgagctgtaggcagagctgtatctccatgaggcagccagctcgtgaatcaacagacctgcccacactgcagagagtggatgaggctgggtgggggggatgggagagggctattgctcaccagtccccatggagtgaggctcctcagtcttccctgggctggtgccaggcttgtggggggcccgggcagctgtcctgcagcctgaatttgctttcccgaacctgggctgaagagagaaatggacaggcaggtatcaacctctaggtcctctgaggttttctgtattaccagaaaaatccaaaacagatggtctgtgagtatgcccttggcctctcctgcctaccccccgcccccccatgcacacacacacacacacacacacacacacacacacacacacacacacacacacacaccctctcttcgtgcaccaccccctgcagcgcgaggcccaggtggacttggccccgttctgcctgcgagttgggagtgactcactgcacagtcacagccctcatttcaatacaaaaaagaagagcagaactttgctgattggttccttccctaggacttcactggaagcagctgagttttcagtcctttaaactgagttgtttaatcccatccagctttctgtgcttgaaattggtttttgtgtgtgcgcattgaaagggagcaggcggagatgcagtccattaaacagcgctgttcaggctgtggctgtggaaactcgatttgctgaagtgccaaatgttgtcagggttttgg

SEQ ID NO: 83912 - DNA, 1075 bp, Homo sapiens
acagtccagacctggtggttttgtttttccaagaaagggtctgaacttaatgccttgagcctggtcaggtcagctcagtgactgggagagggtttctcctcctgtgcaagccaggctggtgctggagaaagaaaaggaaaagtgagtgggagcccagcagactggtcctcatcccccaaaacatggttatcatggttccagcccagcagcaagctccaaacttctttggaaagggagagagagaagcccccttcaaacccctgggctgggctgagctgggatggtgggagaccagcaaggatgtgtgggatcaggttatccctgacccccgatccccctagacggtggttagcagtgtgtgactcaggatgtgcaggcccagggtggtgccatgactccatgggagagggctatggtgggcttcacctctgctctccctcccgatcttacccacagcactgaaagagccccagtgacccttcacctcgacgggatcgtgcaggtcctaaactgccacctcagtgacacggccattgggatgatgaccaggattgcagttctcaagtggctctaccacctctacatcaaaactcctcggaaggtgagccctgggcccctccaagccaggggcctcttctgggtccgccttggttttccagggcctgcccatagttggtagcattttggtcattgcccttctagggaaaccctggccggcagagaagtgacaggtgctgcgaggagccctcattgtgtcggggagggaagtggtccgtgcagaccagtgggtccgtgcacaccagcgggacactgcactgcacgtagtcccggggcgaagggagcactcacgggcacccctgcttctctgccctccagatgttccggcacacggacagcctctttcccatcctactgcagacgttatcggatgaatcggatgaggtaggtcaccaacgccacccgtacttatggaacatcggctgccctgcctccccttgttagtgactgagatatgcttattttggtacagtgcatccttcctagaggtaaagctgtgtttaatactcactttggg

SEQ ID NO: 83913 - DNA, 1014 bp, Homo sapiens
cgacagcaccacgttcctcatggcacacctccgggcaagaacctttgtgtgtgtgcatatttgcacccctgccccacctccgcatcttctccctcctcctctaaccacaggacctccagtcagggcagcccctcatctgtgcctcttcacttgctccgactcccccttggcctgccacttggggccatccacagcacagtgccgtttccctggttctgagctcttatggcactttgcgtgtccagcctggtcccctccaggacgtgacctgattgtctcaggaatggcagcagagattctggggtctgaacaacctgcctatgagtcctggctctgctgactttatatctgttcccctcagacagctgcctaccctttctgagcctcagatttcttatttgttaagtagggtaacaatagtaatacctaacctatagtgtggttgtgtgtttcagacaaaatttttgcatgtaaatcgcttagcacatgacaaacactaacgggtgcttcagtgttgttttaatacatgtttatggctgggcatggtgactcatgcctgtaatcccagcactttgggaggctaaggcaggcggatcatttgaggtcaagagttcgagaccagcctggccaacatggtgaaaccccgtctctactaaaaatacaaaaattaggggccagacgcggtggctcacacctgtaatcccagcactttgggaggctgaggtgggcggatcacgaggtcaggagttcgagaccagcctggccagcatggtgaaaccccatctctactaaaaatacaaaaaattagccagtcatggtggtgcatgcctatagtccaagctacttgggaggctgaggcaggagaattgcttgaacctggaaggcagaggttgcagtgagccgagatcacaccactgcagcataggcaacagagcaagactccatctcaaaaaaaaaaaaacctggtagaattttttaaacaagacccacaagcaaaaattattaaaaaaaaaa

SEQ ID NO: 83914 - DNA, 1018 bp, Homo sapiens
ggccctgaagggatcaggttcttgttgccctggaagggagtccagttctttccttgtcccagaaaacacctgagtttcctttaaagccagcagtgctacttccagcaatctcactttttctagccttttctgtccttccccatccatccccttctcccctgggcatccgaatttccttagagtcaaattgccattcccctgcacattaaacaagaaatgctgactgtccttgccagcaccctcctcccacatgggacacctgcactgcagggaaatgctgtctcagcagggtccccttcctacagcccagtcccagaggcttggtgagcaggaaacagggttctggagctgacttcccctcctgttcccttcccctggtcagatcctggttctggagtcggtgccagacattaacctgctggattacctgccggagatcctggatggactcttccagatcctgggtgacaatggcaaagagattcgcaaaatgtgagtggagtaaggggcaggaagctgctgcctcctgccacccccagctgtgcccatgtgcttcatgcccacagagaggccgcggcaggagggcaggaaatcacctcttcttcctggctcttgtgcttcccgctttgaggagccaagagcccatcaacccccagcatctgaaaatgatcacctgacaagtccaaaagccaagccgccctctgggtggctgacccagcacggaaatggggctggtttgaggctcctccagccctggctgaccctcgctgtttccactttcctgttcttgttcataggtgtgaggttgttcttggagaattcttaaaagaaattaagaagaacccctccagtgtgaagtttgctgagatggccaacatcctggtgatccactgccagacaacaggtgagtattgggggagggcccacagccacggctgccactgctgctgccactgccacctctgcagaagcccctttcaccatctcagcttcagtgagggggcaggggagattcctg

SEQ ID NO: 83915 - DNA, 1028 bp, Homo sapiens
cgagatcgcaccactgcactccagcctgggcaacagagcgagactctgtctcaaagggaaaaaaaagttgtggaggtaggaatcacgcatgagaaggaattagaaggaatttacctgctgacattcgacaacatgttgctgggcacagaatgaggggtcctgagtccttctgcgctcacttcgtgggatcatcaggaaaggcagggggttggatttgagctgaactttgagggctgggtagaatgtttaagggaccaggagcttttctagagagtgggcagatgggaggtgcagcatgggccaggcagggcgcagtaagaaggcaggcctggctggagtagaagcctgtgctgggagcccagcaggaaggctgcagaggtcagaggtcggcctggccctgttttgcttgccccaagtgtcagataagtagggtaggcttgattcgtggaacagattcttcctgccggtggcccaggggttgaccccaggcccggtgctctccagactgacatattggtaaggacgtgttccatggttttccctccagccattgtttgtctgcctgacgcctgttttcctggagatgaagaatattctacccttaagtgcaggggcggaaacagtagaaacttggagttcctggggccacagggcctgaatgggctgtcatttttgtagtggcctggggtgctctgaattgagtcctagtaggactctggtgggggaggccttccggctggtgccaagcaagaagacatttgctctttgcaaaggtgagggggtggggagggaacgcccagcacagaaatcccccttgcctccctcaggaggccctgttacttttgcaggctgtcactccgacatcagagccactttcctcgtactcttcaaagcttcctaagtgccattcaaacccataccacccactggggcagactgcccttcctaaagttcacatcacgtgcgagctcatggtcttctgcagctcctcacatccaccggggctaaatgccagtgcctttgccaag

SEQ ID NO: 83916 - DNA, 1054 bp, Homo sapiens
tattttatagagatgggggtctcactatgttgcccaggctggtcttgaactcctaggctgaaacaatcctcccactgcagcctcccaaagtgctgggattacaggcaagagccactgccccagcctggtgtctccttttatgaggacactgatcctatggaatcaagggccccacccttaggacctcttttaaccttaattacttccttataggccctctctccaaatccagtcacactgtggatcagaacttcaatatatgaatctgggggttgggggactgttcagtccatcacagtgatcatagtgaagcctgggagtgcacgtatataaagtgctgtctgccccattttggatggttgggaggatatagaaaagcttcctttggtttggccatggtatacccctcatctcatttattttgcatcgctgccctatgggcgtggtggtgttaccctgtttcacagatgaggaaacaggctccttgaggttaagtaatcttcccatggtttcacagctagaacctagcaagaaaactcaggttcatgtgtctcagaagacgtccccactgcatgactggttttccctaccagaaaggggacatacttataataaaaggaatttgatacttgaaattctccacagtggttttagctgccactttcagttctacagagctcaggtgacagagccagtcctgcctatggtgttccagtgaggcattaaaaccactaataagaggggattgtatcatgatgacaggcctctcagacactaaaaatgcagagatggatgcttgcctcaactgaaggacccccagatccagaatcttaagaccaccagtgtggtgttaagtgaccacactaactgtctaagtgttgggatccagttgtacaaagttctggagaacttttgcccctacaaccttattcccacaggaccacacaatttcctataggataaggcagtcaggttaggatttttatcatggctgttgccggttttgtgggttttcaattttaatatagtcattgatcagtcgtaatgaaaaggg

SEQ ID NO: 83917 - DNA, 1014 bp, Homo sapiens
cagttgggcgtgagctacacacccattaaagcacgtctcaaaccacactccagctacctggcgcgcagcgcgatagtgtgtgcagtgtgggtggagccttccgagggcgtggccaatccacctgcggcctgcggtgggggcgtggctggagaggggcgggccctcgcgacggaaggcggaagtgctgtagagtcatgtgactcgagtaacatggccgctgtctcgtgagtcccgctagtgccgggcgggagttgttaagcggccagggtcaggtgtgctggagcggggtccgggcccgggttccagggcgaggcggcggagcgtggcaggcaagcctagagcggcgtggtccatgcgccggcgccgggggcagagcggagccgcagactcccctggccccggcgcggccccggcagccgcgggctaaggagtcgcgaggttcccccagctgccaccatgaaccccgagaaggatttcgcgccgctcacgcctaacatcgtgcgcgccctcaatgacaagctgtacgaaaagcggaaggtggcagcgctggagatcgagaagtaagagccgccaggacccctccctggctatgcagcccctgactgctctgctccccagggggacttctcacgccttcccagccagggttactttcccaggttttaggcccttaccttagcgcagtgtttaagagcagattgggagccatatctgggagtccctgctttactcctgactggctgtgtgatttggtcccagctttttaacctcccggtgccacaaagggctgcagtgagaatgaagtgacatcatgtatgggtagtgctttgcacagtgcatggcacatggtgagtcttcggtgcggtgccacccaaaccagcaaatcagagagttgtctctgtggtgagagagaagtcagaagccggagaatttgcaggtgatgctgaccagcctggtttcttacccagcttctgagaagtgaaggagattgttagtgaccaagtagagaaatca

SEQ ID NO: 83918 - DNA, 1045 bp, Homo sapiens
tttcattccaaagataatggggaaaatgagaagtggtaattattttcaagtggatcattatggagaaataaactttctggaaaacgaggcagctggaggcttgatgactgctgagggatgcctggtcattgctccggacttttctcagcagggccacgttccttttttggctgttaggtagcccctttttcttgtcttttctggcttctagaggccttctgcactccttggctcctggccccttccttgcagccctctgacccctgctcctactatcacatcatcaccatctctgactgactctcctgcatccctcgaaaggacccttataattagactgggccccccaaaataatctgcccacctcaagatccttaaatttaatcacatctgcagagtccctctgctatggaagacaacacagtcacaggttctgagtaatctgatatgggcatctttgggggccactgttcagccacctgcagacagagcccaaatgtggaagtgcatggatgaagggacccccccacccctgcaatcagggatgaggcagaccaggcgccgtaccagctgccccacactaagaccctactccgcctgcttaggctgctagcgagactgagaaggacttttcctcaccttcccgtctctgttcccctcacagaacgcaagcacaagggagctcttgagaaagagaaggagcgtctccaaaacatggatgaggaagaatatgatgccctgactgaggaggagaaactcacattcgatcgggggattcagcaggcgctccgcgagcggaagaagaggtcagggccaagggctggccagagcagaagccattcccccgggaccgtccccacagagtgaccaggaccggggtgtgagcccaagccatcttccaggcaggcagcaggagctgcagaaggccctggaaggtgacctgcaaggagcagaaagatgcatcccgcccatcaagggtgctggctgctgcaccattcagggtttctcccactctccttatttctcactggcgggcatttgggac

SEQ ID NO: 83919 - DNA, 1202 bp, Homo sapiens
ccaagccctgcagctctgtgcaggtggcatggacccacctgtatccgctctgccaggatctgcacgagaagttcatccgggagcacacagctcatcagcccggtctcgcctccgacactgggactaacactgagccagcggtggatgggccccggggggagagggctggaggaaatctgttgagtgggagaaggatcaggagtcagaatctggccttgtatctcaacaactcctacacttaccagccacaggaccttgggaagatcacataatctgtcatttcctcatctgtacaatgggaactgcattataaaatggaaggaccctgtcttccttaaagaaccactgtaagtttcaagtgggaatagcatggaaggtacgttgtttgtgtactgaactgcacgcagcttttcattcattcgataattattcactgagcacctatcttgcaccaggcatgcttaggtactagggatataacaacaaacaatggcgctgcccccaggcattccaatgcaatccaccattgcattccaatggaagagagagaaaaggccaccttccttcacaaatcaatacaatttcagaaagtgatgagtgctaggaaggaaataaccaggtaagggaataaggaatcataacagggctggggaaagactatgtagagaggatgctcatgttacccgggttacgtcaaagaatgagacaagatcttgggagcagagcctttctgggagtggacagcaagctctttcaacgcaagtgtgctcggggaatctcgggggcacatggagcccagtggggctggaactgagtgagcaatggggaagacagtcaggctgaaggttaaagacaccacaccgccaggaccagaatacgcagggccttgtagcccatggtcagcaatttgtattttattccaagtattatgggaagttggtgtgtttcagcagacaaataatctgatttatatttatatttattttattatatttttgagatggagtctcactctgttgcccaggctggagtgcaatggtgccatcttggctcactgcaacctccgcctctcgggtttaagtgattctcctgcctcagtctcccaagtagctggaattacaggtgtgcaccaccatgccttgttaatttttgtatttttagtagagacagggtttcgccatgttggctaggctggtctcgaa

SEQ ID NO: 83920 - DNA, 1090 bp, Homo sapiens
tgattctcgtgcttcagcctcttgagaagctgggattacaggtgtgcaccactaagcccagctaatttttttattttttatttttagtagagacggggtttcatcacgttggccaggctggccttgaactcctggcctaaagtgatccacccacctcagcctcccgaagtgctgggattacaggtgtaagccactgcacccggcctaaggacctacatctttattccacccacctgctctatccaatacacaggtctcatttcccatgaagacctacaactcttctccatccatctgctcttcccagtggatgggcctcctctcctaccagtactttcacttctgctccatccacctcccccactgtccctatagcactctcaggctataacgagatccacccttaacccttcctgtttctcccattctatgttctcttcttaattccttctctactgaggctgggcttcccatactgatggcaccctcagctctcttgcccctcgttataagagcacaccccctctcctcaatgatgacattcttctctctccactcctgaatgggagccgccaggtccacttagagaaatcttgccaggtgtggtggttcatgcctgtaatcctagttctttgggaggcagaggcagagccaggaggatcgcttgaggccaagagttcaagaccagcctgggcaacacagcgagatcccatccctacaaaaatttaaaaaattagccaggcatggtgggacatacctgtagtcccagctacttgggaggctggggtggaaggattgcttaagcccgggagctcaaggccgcagtgaacaaagactgtgccactgcactccagcctgggtgacacagtgagaccctgactctagggaaaagggacagagagagagagagagagagagagagagagagggagagagggagagagagagagagaaacttcacaactatgaagttatagtttccagtcttggttgggccatgatcattcccaactatttattccttgtccatcaccaatttctgcttctatactggaagcagtgctctgccactcccctcgagcatgctctg

SEQ ID NO: 83921 - DNA, 1129 bp, Homo sapiens
atccccaagttcctgtcccctcaaagctccacatggcagccagagggatctcttaaagatgcaaagtcgattgggccacacctctcgttgccctcaggatgaagtccaaaaaccttaatagatcagccatctgatacctcacctcctgggctcatcttgcctctcctagcttcctgattctttgccttatctctgtctttctcttttctgtacctcagagaccatgtccttgcccctgggcttctgcacacagtgcccttctgcacacacaccccacacactgtgcacacagtgccctctgcacacaactcctatgcactctgcacgcaccaccctcctgcacaggcgtcccgtgcaggctggagctgtcttacctcagcaggctcgtcttctggcacttcctcagttattatgtcaaagtgatcgagcatttcacatttgttatactctttgtctgtgtttttcctggcttgattcaagaacatttcatacttttcatttgctgtaccagggtggggagtgggggttggaaggagagcagaatcaggaaggtcagaaaaatatgaatgatgtcgcaaacacagaccctcagctcctggtaaggtgggaagggaagtggacttttggatactttgtctgccccgctttccctgcttcagagggtgaggtgatgtgagagttgaatctgtattagagacctcactgagttcaatgagattgtgctttagtgaaggactggctagttctccagaacttgaagttagttacatttgaagacactcatagggtgacccacttgatcctggcttgcttggggttttcttggttctagcacttaaacccctacaccctggagctctcccagtgctggacaaacccagacagccggtcaccctttaagtcactttttatgtttattaaatctcaattaacaaaagatatgtttgggtcaagttgttttaattaacactaaatatgccacattatcctgaatcagggagggtaggtaatcggtggagagattcccacccgaatttaccactacgcccgtgcaaattcaaatcctttgaaaggcaaaggtaggaaagtcatttaaaatgcctactataggccaggtgtggtggctcac

SEQ ID NO: 83922 - DNA, 1097 bp, Homo sapiens
aactgatcaaatgcagcatgaagaaggaaatttatgaaccaacgatcacttaacaaaggtgcaaaaattgtaagtaaaatgttagctgagtgaatccagcaatatatatatataatatttaaatgcagatggtagcatacagagtgtttttcgtcttccttttcttttcattttacctaacaatatattttacgattaattcaatattagtacatctagagctgctccatcctttttagttgctacatattattccattacatagttttaacatatttttaaaaactagtttcctactgatagacatttagtttgtttctggtcttttgctattgccattacagattatacaggaaataatcttataaacacatcattttgcaaatgtgggaacgtgtatgtagaataaattcttagaaatgaaatttctaggtcaaagtataattttgatagataaggccaaattattctctatagagttgttatcaatttacaataactgcagcaatgtaaattcaaatgcttaaaaatctttagaaaaagggcaaggaaaacatagcaattatgataaaaagatcgaatagaaagaaaacactgagtaaatttaaaaaatagacaagatacgatgaaagaaataatagcaagcatttcagttttgctaatcataagaatgtgttaaatgttcctattgaaacttaaggactctcagagaagattaaaaaataaaatccaaataagtatgttttatgaatgataagcctaaaacaaaatgaaataagactatgggcaaattatgtaaggcaaaaagaaagcagcaatcacaatattaagaccaaacaaaggggaattcaaagaagagcattcaaagggaacaagaaggcaattgaaggtagacagaacacacagtccatgatgaacacttaatagtcatgagatcttctgtgtcaacacagaaacgaaagggtataaacaaaaaggtgtatgtatttgtagaaaacaatagagaaatggacaaaagttttatataccactcttgagtcttagaaaaattaaacagaaaaagatatagaagattttaatcttataattatttgggt

SEQ ID NO: 83923 - DNA, 1150 bp, Homo sapiens
tttattgaataaataactcaacttaaaaggatatggtcactctttttagagctcacttaattttaactttgtttgctctcttgctgcagtctcattcccactttgtttcttagaagcttttaaaaaaataaataatacatgtagacagtgtaacattcaaatggattcaaagggtgaagagtttttcttctgccagtgcatggtcactagttaccatccccagaggtagccattgttacagttttctaaggatccttccagatatactttatgatcaatatttgcatacgttgtttcttacataaatggtgcaatactctacagactgttctgcactgtgatttaaatttttaaagtttgtatcaaaggtatacatacacacaatttcaaaagccaaatggttctggaaaagttatattgtaaaaagcagcagcccttggaatccactctcccatttttcccattgcacgaatccttacctgtcaacacagtccaccactgtcagttcttttagcctttgctttttggatttgcctctatattgctaagtactctactgctacttcttaagttttcagtttgcacattattcatttatttttccccatggtaaataataatagcttttttcttgcccactctccatgtctctctctctctctctctttcactttcttctcttcatcctcccaatatagttaacatttactttttggtgagatagatatttgcacttgcaccatcatgagtatgcaaacactaaactcagctgagctataaaaaaatggtctatgacgacgtttcccttcttatacaacgttcaggttcccaggaattgttttcatgtggttttcatgtatctatcatggacatcacattcatccaaactcatccccaaactctcaaccaaagaggcaaattgcctctcaatactttcagaagcatcttctacacaggttccatcttcttggagacaaatctctcctggagctgcctgttctccaactcccatctggacaggctgccctctgggcctgcaatgtggctggcatcctaggactggcaggcagcaatatcctgtgcacccctcagcattctctcctgtgtttgagcccctgtttgctgaatccgcgccttcctaactgtggta

SEQ ID NO: 83924 - DNA, 1003 bp, Homo sapiens
aactgtgataatggccaaagcttagcccagatgattttattcaggtgttactgtaataacttattttctctaaacatcctaagacatagagagtaactagaagctagtttaatgtctaaatccttattttataagactataacttgtagaaaaactagatctccaaacagcatctgtatctataataacttatacatgctcactagggaaacactgatggaaatttaacacactctattatgctgatgtgttcatatcaacaaagatagtcatcagcatccaagacaggatctacttaaaaagctaaaaaggcaataggttaaaacttctgttagtttctacattcattataaatgtaccttacctaatggtcagtttcacaggctcaggtgacccattgacattgaccaggaactcttcttcaaagtttcccaggatggtagagctgaaggagatctggatagcttggactccacttggttcaatgatgccttccttgggactgaaaacaaagcaggcccccaaagctgaagttggaggggtcatgttgaagagagcatcgatgctgcctttgttgtacagtatcgcctatatcaataaaaggcaagaatgtgaaggtcaatgggcctctgacctattttcatataagcatgtgtctgtactgtttaacagcaacaaagggaaagttgcagaattagaaccaaagaagaacactcagggacaaatgaacagtctgatgccttgagtgtttgaagatagaactcccaagccagaaagtaattttacatttttagtctcctctttaacatgaaattagtcatatatattatgctcgtgctataaagactgatcataatcacatatactgatgaagagccttaaaatactcccttttttgctactctctataaagtaaccaagggaaagtaagtatttctcttatacgcatgagaaggctgaggttaagcagcatacttaaaaataaaaagcaagttagaatagc

SEQ ID NO: 83925 - DNA, 1047 bp, Homo sapiens
tgtagtacccagcaatcaaataaagtgcctgctggtgggcttttcgactctccgtaatatcaaaatgcatataccgttggaagttcgactcctagaatcagctgaactcacaacttttagctgttcattgcttcatgatggagatccaacttaccagcgtttatttttggactgccttctacattcattgcgggagcttcatacaggagatgttatgattttgcctgtactttcttgcttcacaagatttatggctggtttgatctttgtactccacagttgttttagattcatcacttttgtttgtcccacatcctctgatcccctgaggacctgcgcagtcctgctatgtgttggttatcaggaccttccaaatccagttttccgatatttgcagagtgtgaatgaattgttgagcactttgctcaactctgactcaccccagcaggttttacagtttgtgccaatggaggtactccttaagggggccctgcttgattttttgtgggatttgaatgctgccattgctaaaaggcatttgcatttcattattcaaagagagagagaagaaattatcaacagccttcagttacaaaactgaacatatgctttctgagattcaactttatgatttcttataatttgcccagtatttgcatcctgttgctctattaatttaaaaaccttttattttggggaaaggccaacatttgcatcattcaaagtctcattaattctggaaaaccatccattctgatctctagggtatatacacccacaggcatagagctcttccacgtggtggaatctatgcaatgatagatattcacactctaaatatgaggtgtgtgtatgtgtatgggtggccacagccatgcttacctatgccatttagttggtcttacttaatctgcttaagatttgcatctgtgtacctttgttcagattagttttttttttccagccgatttcctcttagtggctaatgctgttagtgaattttccaactaatttcctctcattggttaatgttgttaatgaattgag

SEQ ID NO: 83926 - DNA, 1065 bp, Homo sapiens
ggcagctgagtctcaggaaggttgactaccttccccaaagcaatgcagccagtaagtgaaagagaggctttaacctccatctgtctgactccaaaatccatgctttgcattcatctaagccacttatcctgggatgagatgagagaaaggtgtgggtgtttgtgtttgtgaatgtggacgtgggctccttgcgtcgggaccatcccctgaacctgctcttaccctctccctgtatttcctaggaaatgaatattcaacagctcaccaactacagaaagagcgtcatgtccttggcagaggcagggaagctctaccgcaaggacctggagattgtgctctgcagcgagccccccatgtaaagtggggacgggggctgcttctccacctcccccaaaccctgcttctgctgccctgatgcgtctacccagactcagagaccgtgagcgccccgcccccacccctacagcctgcacacacctgcctgcagagcaggaaatgagagatagaggatgggcagctggggggctgtcctgagccccctgcacccacccctgcccaggcagtctttgctcagtggatcacacacatggaaggtgatgggggcatgggtggagggtccctaattctcttcgctgtgatgcatgagctccctcgctgtatgatttaggcttctatgtccaacagagtggactcttccctctcgctcccctctgccggtcccccatgccaccacccaccccaaacttccaggttccatccaccaccttgccaatggtgtagctgtcctctcagaactcctgtgtgtggaaggcacccgccctttccttgccttctttactcggcgtgctccttttctctttgggtttcttgtttaccaaagaagagtttacagacaataaaatggaaaggtcctgctgtggaaacttacccaatcttgtctagtggtcaacttctctctacagttagcagctctgcctgacaaagggagggcctattctcacgtggatggaggagggtaatgggacccacccaagtggggcataggacccccaagactctatggct

SEQ ID NO: 83927 - DNA, 1026 bp, Homo sapiens
agcctttttgaataccggcacttggtgcgtcccaaattcttgtctggtgcctaagaggcatgaggtcatgtggacaaattgaaagatggtgaatgcggagaattttattgaatgatgaaagcagctctcagtgaagagtggagctggaaagggaatgggaagggcagctcactctcccttgaagtcaagttgcctccctgccactgtcttctgaagtcaagtcgcctctccctgatgtccagctgcttctcttctctgctcgctgagtctggggtcttcatgggcacaggatgggaggtgctgtaggtagttttggaaaaggcaacattcgattggtaaaaagacactcagaaagaaccattcaggagagagcagacaaacagggatggaaattctcactttgggccacaggtttcaggctttttggctcgaaggtggggttttgctgggcacctgtccctgtctgcctagaatttctctgcctcctgtctctatcaaaactatcatagaaaatatgcttccctctcacctttttcctccaaccacccagttcctgaaaccagacacaactattgttacggaaggaaagagttgaagtattctctttgaagtaaatagcttagtaatcagcttcaaatattttatgtgtagaatttttggtgcatcagcttatttggaatatagtgttaataaagccaaggtcataagggcccgagtgcgaaccagttaatgttgtgttctctggttataaaaggacactgggtagtgtcccagtcagccattatgcaaatgccagttatcagtcttgctggagagggagtgctgggggaaaagtgagtggaatggctctctcagttcgaattcatgatataaaagctgtggagataacatttcactaaagtcaagttgagtaggtagcatgattaatcatgggattaagagagcatgtaaatcctctgcagacagttaagccaactgagttcctttcctcagggaggcccagtgtacaatggctgcccacagcag

SEQ ID NO: 83928 - DNA, 3607 bp, Homo sapiens
gacagctttgctttaagttttgacctctaagattaaaagtctatttgtggaccggacagattctggagatttcatttcagtatataatttgcacttctcttttcctcttatagcaacagctgcgaatgcggatcaagcttacatataatcacaagggctcagcaatgcaagatctagcagaggtgaacaactttccccctcagtcctggcaatgagggtttggcaccattctcattctttatcccactcaatcaaaggaactctgggaaggaggttgtgattgctggcaagtcccccccaactgtaccacgggcatgaggagctgaagagaactgctgaggaggattttcctaaagttactgctgaccttgaagcattgttaaagactaatgtcctctcctccactgttgaggctggctgcttctggaggctactttgcactcttcctcttctcctttttccgcacttctccacccctcccacatttacagccagaatcaacattccctgggcccctgaggaaataagcagctggtctggaggagaggactgcaatccatggcgaaaaaacactcactttgtctctgcagcaaagagttgccccttctttctactgttgtttctctgtggactgggcaaggtggggtatttattcctcactagctgggttaccatcttcaggcacttttaacatctggcattcggaatggaaatgtaataatggacattagggagccctgcctttttctactggttcccccaatgtttgaaagaggcattaggctcctggtagccttttctgtgcattgctgtatacacacagacacacacatgtatgtttgttaccaagaactggtcagaccttgcgagtttatttgtaaacactggacagatggagttaaaaagagcttttgttgagatttggcatgaaggatatggtgctctatttgtaatagaaacttccaaggctcttccagctcccctttctcgccattctttagctgtagtcatgaatagtctccatgattttcaaaattgattccctttaaagtgcaaaatggtcaccttctaaaagatatattcatagttattaatgaccctattcccaccacaaattttaaagtgctcctaagcccataacttgcctgtttgaactatggtaatgggtggaagaggagttcaccagtttcaaagatcagactctgtatcaaaagtacctttgcccttaggaagagtgagtattggagtcatcttatctattactccaaacctccctttttatttcttgagcctggcttggaccttggcattccgtttgaattccttctaactggaacatttgtgttgtatctgtaacactggcactgaaataaagaccacacggttaaagaaatctttccatattgtactttatggtgttggagtgaagccttgtagcttccatacccctatgtcagaggaggtcttacggacaccatagggtaggaatagcctttcctcagtctgagaaattggtctcttttaaaagacgaatctcatgaatattcacatcaaagacttgagctttttaaactagtgagagtgccaagtgctttttagaaaggacccatatgttatcaaactttgaaattgagttgctggaatgaagtagaggtgactctctctgtggtacacattgaatgtactatgtatgttcaagtattcaggcgccatgtcttatatactgaagaaagaaaaagtgaggcccaccttgctcttacaatgtttgcaattgttactgtattgaatacagtataatgactactatggcttcaatcttaaacctggaaacaaatatccctttttttccccttcatttcaccaagcctttacttaaaatcttcagtgtcttgtcaaatctagctctgtatcagatgctggaatattcctaacatttgacaaactggagttgaactaaaggctccacgggaaagtttctggtcttactagtgtgtatgagcaagatctgctaaaacttactccactgggtaaatggttgactgagtcaagaacaggataatatctcctgcatagttttcagtaatgtaagtgtggactagtgcatatttcagacaactgctctgcctgtgcaatgaaaaatagcctttaagggtttctttgcagactgatttcattggatggatacttaatgctgtgaaacatgataggattaacataatgttggtggatttcttgaatagaatttgtcttaacattcctctttgtgtagaggctttattttctctcttatatttgtagctaaccagctcaggtttttttatttgaactgggttgaatctctgaagaaatctgttcaagaccatgctataagacactgtcagctaatggagctgggaagggtctactctgctgacagagcatttccttgggtgatcatagtttcgaggtagagtttatgatcattcatagctttgtctagaaggagtaaaatatcatggccttaacacaaagggtgctgcgtagaatatgaattgattttggaatcagaacacaagcaccatactgaaggactagcagccaaataactgcctaggatactgatggttgtgaagactgtttcaaatgattggatctttgaaagcttcagcgtgccttagtttctaggatcagaattagttttcctctcacttggccttgcagctaaatggagaaatgtttcaatttctttgaatacttgcacatttcaataattcctttcccgagtataaccactcaagggggagcaaatttggatggatttacgacttcacaggcattgtgaggaaagagcattttccaaggctgttttgataaccctggggtgataagcagtgagccctcacacacttactttgacaatttcacatgcacttgtacttcattatttccctcttcaagagtcgtttctattctagtttctgccccatcccggggaatcctaaaggagaattaattcatctaagtaatctcaaaaaactgtaggaagggtgctctccctgagaagcttctcccacagtgctttggtgctgttaccttgaggtggtttggacagtcacggaagttttaggctgtgcatagtgatcatctgttaattttaaggtctttatcatttaaagaaacattcctcagtgtaacatttgggaggggattctttcctcttgctagtttaaaggtgtgatttgtactccttgtttgtcccattcatatatgaaaatagacttttaaaactgtccaacactaatggtttatataacatgcttcccattttttttatgtcgtagaaattggaagttagggagtactgctttcaaggttcaacttcattatcttctgcattggaaaatatttgggccatgagaactaggggaaaggagtttgaatgtgtctatttttttctagtgaatgtattttaaccacagtgtcctaaactgagaaaactagagaggaaaaagtgggtgttcatgaactttgtagttgggagagtggttttacatgtctgtgtattcatgactttgggagtgggtaggatcattggagagagaattgcacagaaagtcctgaagtttaa

SEQ ID NO: 83929 - DNA, 1066 bp, Homo sapiens
gctcgttttaaagtacttgagtttttagttctttctctttgtggtctatgctttttgcatcttgtttaaggaatctttccttaacctgagaccgaaataattttccctataatttcttggtaagctttgtcatgctgcctaaggttaactttccattaaaatatttcctttaggtgctccagctgctgctcctgcccctgcctcagtcccacagatatcccagccccccttcttgttggatgggctttcatcacagcctctcttcaatgatattgctgcaggtacgatgactgttgttaccatcattacatggagcactgagtaatgagatgtggttattaagaaaaagaagtaataattctgcaagcattaggctgactacaataagacttatcttcctgtactttctcaggcatcccctccatcacagcatacagtaagaatggcttgaagatagaattcacctttgaacggtcaaataccaaccccagtgtaacagtgataacgatacaggcctccaacagcacagagctagatatgacggactttgttttccaagctgcagtaccaaaggtactacaatgtcttctttagatgtttcctttgattaaagattggctggcttttttttttcatgtgtttggtaaaggatatgttttaatgtttacagattaaatttgtagacttaattcaaactaacaataatgtagcttatggttcatggaagcatatcatttttagtgaataatttttactaggttacaagtattctgatggttagcattgtaggataaagaaaaacaattctaatagtagtgagagcagaattctacgaggtgatcagttaatgctcagggcattgaggataggttaggctttagtaatacagtgttaaagacctaaaaacataaaatatggcataggattaaagttaagtaagatgagagactttgtctatctggtattatcttctagttaaccagatcagaattgaaattttttctctcttgatacataaatgagagaaacattcctccttcgttaacatccaatttattatagatac

SEQ ID NO: 83930 - DNA, 1313 bp, Homo sapiens
gagccaagatcatgccactgcactccagcctggcgacagagcaagactctgtctcaaaaaaaaaagaagtgggagttgtattttttcaagacaaataatctcattcaaattcttttactgttaacattctagtgtttgggtcatcttttattcttctattatacagtatcttcttgactgttaatacctatggatttacctttctttcatctcagtctctctaccactgaaatatatgctttgggatttagctgggcagtctgtttattcaagatttttttgtctgcccttaatccagccaggaatttaggtcatgtattcttgtaatctaccttctattttagtgtgtgtgttggatggggaggggagatagatctccatgcttgggctcaacatagttaatggtgattattttgggtagggaatctaggttaactgcctagaatttaaccacttcagattcttctaggtctgccctacttgagagaatgcctgtcatggaaaaagtgaccacaaatggccctactgagattgtgcagacaaatggagagacagaaccagctccactagagaccaaaccgccaccctctgggccacagcccaccagccaggtagccagcctttcacttgctcatctggggcttcttacgattttatagtcccttacagcttgtctcttagctgagtccctttaatgttcctgggttggttgatgatttccttccttatttttacatattgaaagagctttgcattagatgtatactagacaaatcaaataataatgaattgaggtgttgttaccttgtttaggccaatgatttattggatttgttgggaggaaatgacataacacctgttattccaactgcgcctacaagcaaaccatcttctgctggtggagaacttcttgatttgctgggagacatcaaccttacaggtgaggcagtctggagctatttaatacctgggaaaagatagaggcctcagggaaaaactaaactgaacccagactttccagcacgtgaatcatttgaagatgggagaggctaaatcagaagcaagagtcaaatcttcacaatatccgggttatatgttgtatactaataatgctctaaagataatttatacggatttcttaaaggcaaactcctaattttgggtgaataaattattcatagtgttttaagatagaaactacttttcctggctgggcgcagtggctcatgcctgtaatcccagcactttgggaggcagaggcaggtggatcacctgaggtcaggagttctagaccagcctggccaacatggtga

SEQ ID NO: 83931 - DNA, 1037 bp, Homo sapiens
gtaataaaagtagaatatggtgacttaacatgtcacatttttaaggaatgaggcagataggtattattattgggtaatacatttatttgttgcccctctttttgagactctcaggtattctaacttccacctttgtagaacagcctgttgaacccaagctgcatgtttggacattagtggtatatctcgtagggacttttgaagaagaatattgcatgaagattcaaaatatcaaaactaactttgattatgtaagaatacatctccttggttatttcgtgtgcaaagattgggatcacaagatcgtgcaaggacgtcagcacatctggcagtacttggtgttcacagagtgcatacctgggtctttgtttcatttccactataaatttcttaactgtttttaatttttcccttctgcaaggcgtgcaatggaattgagttttgccctggtaaatgggaataatatccgaggcatgatgaaagaattactttattttctggattcgtgtgagccagaatttaaagcagactgtgcatctggaatctttcttgctgcagaaaagtaagatttaatttttacctttattggtaaagtctgcttggaacttttggaagtgtctttaaaacatggggagggggctgggcgcggtggcacacgcctgcagtctcagcagtttgggaggccaaggcaggtggatcatgaagtcaggagttcgagaccagcctggccaacatagtgaaaccctgtcgccactaaaaatacaaaaatttgttgggcctggtggcacgcgcctgtagtcccagctactcggcaggctgaggcaggagaatcacttgaacctgggaggtggaggttgcagtgagccaaggttatgccactgcactccagcctaggtgacagagcaagactccatctcaaaaacaaaacaaaaaaaaaaaaatggggaaactactttaaatatgtttaaaacacataacatttatttcaaaccctcaattataaattagcttggagaaggctattatagccagcattt

SEQ ID NO: 83932 - DNA, 1077 bp, Homo sapiens
ggagaaaaactatcctgaattttacattttaactctgttattttgcaactgtttcatccagatatgtggctctgacatctttgttgaagactgtacagacagatcataatgcagtacagaggcacagaagcacaattgtggactgtcttaaagatttggatgtctcaataaaacggtaacaaactgagagcctttctcagtctagtgtttttggtaaattgagtgacagattattgatagctctatgccgctgccatgtgatactttgttttcagagcaagagtgttgacatttatgtatttagtcattgtgttcacagatggactctgctcagtgaatcctttttttagaaaggattggcagggagaagtttaggttgttaaggaggccaataagaatacttaagtgcacactgaagttgtccttggctctttgataaatacaacaggcacagataagctaggcaaaagtttacctagtggaggtactgtgctttgtgtgttggaggatgaaagtacggagtgatccatcggctaagtgtcttgtcacaatgctgacactcaaactgctgacagcacacgtttttcacagtacttacgccccaggatcctgaaggcagcatattgcttagaacagtgtatcctgaaatgactgttaggcagcaggtagcactctcaaaaagcataaatctcttccctcagtggagtaattctactggatgtcttcttagaactctagatgtttgtagaatatgtagaacttagctaaagttggcctctgaacttttggttgtatgttcaaatctagaacaaagtatatttaaagtgatctctgaaaccattcagttaacaaacatttattgatggtgagttcctttgatttgcacagaacaggtacaaataaaaggtgctaagtgcttgagcaatctaaagataagacctaaacttaataacaccaacttttatatagtgctttgcaaaagattttataagtaccctctcagtgggttctcagagcaggccaatgagagagcctaagcaactacttctatccctaattaacagattagttacaatt

SEQ ID NO: 83933 - DNA, 1923 bp, Homo sapiens
tctatcttaagagaagagatttttttctctatttgaggttgtatgttttaaagctataattttaataagatcactagttgtattttggcatgatgacatgttacatgcaaatgtttgaatgggtgaaaactgaacatgtttttgccacctaggcttttcaagttctacagaactagaaatgcggtatgccccataggcatctgttttacctggttcccataggctttctgacccaatattatttgtaatatctttacatataactcttgcataaaaaagtctggtttggttttatccagataaaatacatactacttcttgaatattgccctaagttactcctaagtttatcaaacatctacaatacactagtatattaaatcagtagaatttgcttggactgggacccttacaccctttttctaaaccaaaggacctgcttattcatgagacattcttcaatattcactgttttttgatgcatctttcttctctgcagcttgtgccccaattagttcgtattttaaagaacctcatcatgtccggatattcaccagaacatgatgtttctggtatcagtgacccctttttgcaggtgaggttgaaagaacgttttaaataaatgttatatgaatttaatatctttaagtagacaatttccttcctcttaagtttgtgttgagtagaaatttggtagttaattgattaattatattaatgaatagtgacacaattctatattagattaagaggatacaattacaggtcttgctctgtcacttaggctggagtgcagtggcacaatcttgcctcactgcagcctcgacctcccagggtcaagtgatcttcccaagtagctgggatttcaggtgcatgccaccatgcccggctcattttgtatattttgtagagacagggttttgccatgttgcctaggctggtctcaaactcctggactcaagtagcccgcccccctcagcctctcaaagtactgggattacaggcaagagccactgtgccccacttcaaattacagttttaatagtcaaaatcatttattatttgaattatttaatatagctctgcaggtggtagtatctggtagtatcctttagctgtggagtactgaagtgtgggttgttttataataactttattagatgtagaagcatatatagcttctctaaataaagaaaatgttttcaattcttctgtttgatttttgactatttctgatatgaataaatggttccaaatgaatttctaagacttcatttagttatttgaatttcataccaagtgagatttctttgtgtgagacataatttgttgacacctctcatcttttgcacgttaggtacgaattttgcggttattaagaattttaggacgaaatgatgatgattcaagtgaagctatgaatgatatattagcacaggtgagtagaccaaacatattaaatatatatttattttagtttcgctgggagtagaatgattatggttatatggagcagtttttatttgtgtttcctcattcatagctgtaatcacaaaatgcctcttgttacctgtgaatatgttttgggagcattgtttttatcacttatgtactgccctcgatatgtcttttcaggttgccactaatactgagactagtaaaaatgtaggaaatgctattctttatgaaacggttttgactatcatggatattaagtcagagagtggattgcgagtaagtctttttgaatcttttcttccccccctaaatgtttcacttagaatggttgacttggacttcagtacttcagaattgtattccatttggaactcgactttaagaaagaatgatgcaaaatgtggaatgctggatttttggtatctgaaatattccttcccactgaaggcttaacattgattataa

SEQ ID NO: 83934 - DNA, 1004 bp, Homo sapiens
ctgaaaaatgaaactgggttccaagaattgtatgctgaacatttagtcatttgtgctctgtgtcccagggtaatgttatgtgatgtgctggcctttttggcagtggataaaacaatttctgaatttagtagcccaaggaaaaatgacttttccaagaaataaaccagataaaaaataactagggttatatctagtacaaaaaaaacagaccattgggaagtatgtaagataaggttggtaactacttggtcttcattttattacaaaaatattgatttaaagtggttttaaaaggtatattattatctctaatataactttgcccatagttgacagatttaatgaatttacagatctccatggcttagatttgtcttatttggagttgtccaaagtagacttttgtttaggtgacttataagttacttaattccaaactgttatggctcaacttatttaaattcttacatactgtgttttcttgtgtttataagtggccttaatgttttgaatgctttgagtgcatgccttggatatagcttggcttttcatttcaatcttgatccccttttaggcttggggagtagggaagggacagagtctaaatatagtgagaaaaaataactgagttgcagcagagttgtagctaaaattgcctgcaaaagagatggaatgcaattcactttgcacactatttaacttaatttttggtcattagagttgtttatatagctaaaaattgagtttttagttggaaacataaaaagttcctattgtggcaaaccttttgttttaatatcaagtaattgatcaacagaaatgaaatgagtgccaatatttaaaacatcttcggcttggcagtaaaattgcctttactatgtgttaggactcttaatggataaagtaaaggaaggataggaaggaaattcctgattataaggaatgtatagtctcattgaaaagacaagaaaacaggccataaagccatatatataaataagtcc

SEQ ID NO: 83935 - DNA, 1087 bp, Homo sapiens
agttgcaatgagccaagattgtaccactgcactatagcctgggctacagagccagaccctgccagactcaaaaattgtgagaattcttttgggttatttctgacagaagcttgtattaggtactcagaatctttgtataaaacagaggaattaaatggaatgtgactgttcttttctcaaacattttatttttatttgaagtcagtgaaataagttctgaataaagaaaattcatgtggcttaaatgctaagaggaaaaattgtatggtatatttaatttgacaaattcagtgctgtgcccagaatgctcaaaatatacttgttgaacaactgaattatttggagcacgtatttattatttagtgaaaagcattgtgagattgtttttactgactctggagcagttaaatttactttgtcatccaaagttttctcagagttttgatgcgttttatctggaaatgtaaaatcttactaagatttttgcctcttgaattatctgttagtactcagataatagcttactgattaagtatagaacagatcatacctagcttgcattgtgtgtttttatggatattctcagatggagagacatatgtattggtcgtcactttttcataattattttgatcacataattgttgaaaacattccgattttaccaacttggccagttttaaatcaggcatctattaagttcttcctttgtattcacttcaatgcttagatgctttgggggattaaaaagcaaaagtagcaactatccttttggaattgaccttcaggaactcaaagtcctgttctataaaattgaataataggcctcatttttagttttcctttgatcttttctttcaggtgtcctccacacatctgtagtcctcctcacagaaatgtgtgagcgaagcccagacatgcttgcgcatttcagaaaggtaggtgccattctgtatgcctaagcctttcttgattgaaaaatgattttcctgaaaagtacatgattttcttcttatttttttttgaaagcaagctatggatctgaataagggatttaactagccctgctatgcaattggcctggaag

SEQ ID NO: 83936 - DNA, 1058 bp, Homo sapiens
tggagatgaggtttcaccatgttggccaggctggtctcgaactcttgacttcaggtgatccacttgcctcggcctctgaaagtgctaggattacaggtgtgaaccacccctaccctgctgccaagtttgctgagttttctaaagtgtgtgtctgacatccagtagataacatgtttttcaacttccactgctttggtacctggaaacattggcttgtaagcctataggagggactgtcagtctgtttactatattgataatttgtaataaagttgggataaacattttctgcaacaaataatcctattgtttttgttattggagaaatcttgagtcatcctgaactagtttgaaattgtgaagctgcttcttggggagcaccaggcttgttcctaccttcctcttttcttttgcagtgatcttaatcatagcacgcaattcgtacaggggttagcactttgtaccctcggctgcatgggctcctcagagatgtgcagagatcttgcaggagaggtagagaagctcctgaaaacctccaactcttacttaagaaaaaaggtaacttttaatgaaccaaatgtctgtttggattagggagtattatggagatgagaaggcagattactcatttttgaaagatctgatgataatgtaaagtcattttttctgtgtagtaaatctgttttacatgattatatattaaccttaattcctcttttcttaaggaaatgatttataaacaaacaaatgttactggatatatcctaggtggcataccaaattcctaagttatctgattctaaacagtattacagcaaggtgattatgaacagatttttatgaatttacttttgtcctaataattaatacccatatctttgtattagtgcctttgtgtctctggaagggcagttctattgggacctagataattattagggaatgatgtagaacccactttctgaatggattagtaatagaagagaattattcttctatctgattttatttgttgatataagcattttattgagtttttaaaaattgcttgaacccta

SEQ ID NO: 83937 - DNA, 1044 bp, Homo sapiens
ctgtttgtcctcagataataggtaagtttatattcaaaagtgggatactatgtagcagtgagttatgactgaattagatcttcttgtcttgatgtgagtaatactcaaagctgttgagtgaaaagagcgggaatacagtttgatatttgtttaaagtttaaaacatttaaaaccacctgtctctccatgtgtagtaagaatatatggcatggcagtcatgagcagcagtttagggttctgattacttctgggatggagaaatgagattgaggcccagtacacagaagacttcatttgaatttgtaatgtaaaataaatagggtgaaatgttaagatttgataaagctgcttggtgtgtcagtgacagttacgtgatttttatgtattttgagtggaatatttcataattttctcaaaagaaaaaattggattcactaggaatgtcaggtttttgttttttgtttttctgccagaagaatgaagaaacagactctggtctatatagattttatgttgtcaggcctacatagtggtagtgcagttgtaacaagcttgcttttcaaaaatgatgattttaggtgtgtgtgtgtataaaccaggcagttatttctgaatattaaaaagaaataggttgggtatggtgccccatgcctataatcccagcactttgggaggccaaggcagaaggatcgtttgaggacaggaattcaagaccagcccaggtaacatagtgagacctcatctctacaaaagtaaaaagttagggtagggtacagtggctcatgcatgtaattccagcactttaggaagctgaggcaggcggatggcctgagctcaggagtttgacactagccagggcaatacggtgaaaccccgctccagcctgggcgacagagtgagactccagctcaaaaaaaaaaaaaaaagtaaaaaattagcctcatgtggtggcatatgcctgtagttgtagctacttgggaggctgaggcagcaggatggcctgagcccaagagttagaggttactaactgtgaactaacagtga

SEQ ID NO: 83938 - DNA, 1036 bp, Homo sapiens
gatctttaacctttctgtgtctcagtttcctcatctgtaaaatggggacaatcttaatgcctactttatagtgttattatgaagattaagttataagtgttagacacattttgtatataaaaagcctcatgttatgcattttaccatttcctaaaggacggcaatgttttttgaagcactgaattctaagagattttttatatggaccttttgtctaggagtctcttaataatgtaagagacagtatcctcagcatttttataacaaaagtggtgatagatttcctgtagtgtgtgtaaccttttgcgtgtgtaggttaagcacaacccagaaatattaatgaattatctaaagataagtaggtagattgcaggagtagaaaactggtggctcggggccaaattcttccacagatgtgttcttttttgtcctgtgtggtatttaaaattgtttctgccagtacataaaaaagaaaaaagaatttccatagaaatctggacttctagtttctcttagaaacatagtaagatttgtggaatggaaatctacatttccatatgtcagtagtgtgctgcttttaggctgggcctgattctgtttttcctcagttctagccttgcttgccatacccaattacctgtgtaggatattcttcccttccatctgtgtagcataggactgcacttctttagcttctctaaattttacaatgttttctgtacagtcttatacatctttttaaaaaattaaaaaaaaatttcctttaaaacacaggatttttaagtcttaacacatctttggagaaatatatttgtaggttctttagagctcttgtttctgttgcaaatagtatcctttaaaattttaaataattatgttgtagatctgtagtgatataattgatttttaataatatttatctactttgccacattattgaacttggttctaagagtctctgtggacgtcattgtttccatgtagtcaatactactattgtctgcaaacaatggcagttcttttttttcctttgata

SEQ ID NO: 83939 - DNA, 1039 bp, Homo sapiens
aagcttagcacgctttgtttagcttcgctaagctggatttggcaagtcttgaattcttaaaaactagtcaaaaatttaaatgggaagttgtgtgaatagctttggtagtaaaaaatgtgaacatctctatttaatgtctttccatatccagaggatgccagcccccatcagattgcgggagctgatccggaccatccggacagcccgaacccaagctgaagaacgagaaatgatccagaaagaatgtgctgcaatccggtcatcttttagagaagaagacaatacataccgatgtcggaatgtggcaaaattactgtatatgcacatgctgggctaccctgctcactttggacaggtaggctgggctgagactacatgtagcaagggtattctttgacattgttgctcagggattgtccatctttttctggtggggaggtacttttgatagccttgtagtctgatcattgtggaactgagggtaagattgagagagcaagccacagacctggaaaggcatgatattgctatcaattatcctttccactgggagtctcattatacggatgagagaatgttttgatggtggcagctagcttgcttaaagattgaccaggattatgtggtggttctgccagagtacctggactataatgaatatttaagaaaatgtttcttgctgggcatggtggcttgtgcctgtaatcccagctacttgggacactgaagtgggagaatcacttgaggccaggagtttgagatcagcctgggcaacatagtgagaccctgctcttaaaaaaaaaaaaaagcatggtgtggtagagcatgcctttagtcccagctactcaggaagctaagtcaagaggattgcttgtgccccaggagttttgaggcctcattgagctacgattgcaccactgtactccagcctgggcaatagagtaagatcctatttcttttttttttaaaaaaaaaagcttgctaaatgtcttcttaattgctttatctgggcacagcgttgtgtggagaagttcacaat

SEQ ID NO: 83940 - DNA, 1077 bp, Homo sapiens
tccccgcctcctgggttcaagcgattctcctgcctcagcctcctgagtagctggggtcacaggcgtgcaccactgcgcccggctaatttttgtatttttagtagagatggggtttcactatgttggtcaggctggtcttgaactcctgacctcatgatctgcctacctcagcctcccaaagtgctgggattacaggggtgagccaccgtctccggctatattaagtaactttctaatgtttctgcttgtcatcctagggaagagtacacttagataagtttttctggaatgaatgacaccttactaggtttgaaagtttacagttgctttatttatacgtttttgttaatttgtttgctttttttcaaagcaagttttattccaagttttacatgctcattacttgaaagatagcagactatatatagaagttaaaaaggcatccatatttacatcagataacctccttcaacattaattataccctttgggtcatgtctttaagccaaattttcgttttgagaatttgatgatacttcttgaattgagagtactttagtatggttttgctaataagattatggttgggagaatgaaatttttttttatttcattagtgtcagattagatgtttgtcttgtttagcgatcattgtttacttggcctttattgcttttcatgcttatatacatatacatacatatatatatatatatataattttttttttaagagtcagggtcttgctgtgttgcctaggctggtcttgaactcctggaatcaagcattctgccctcctcggcctcccagagtgctgggattacaggcctgagccactgtgcccagtctgctttttatgcatctcagtgctgttgaattgttcagtaggcatgtttgcatttatagacatctgctttttagatctcagttctggtgaattttggttatggataattaagcataaaataagattcctgtaattactgtgacaatttagggagaattgaacttaagtcctcttagagggatgccagctggctgcctagacagggtggggtggtatctcaatgtgatcct

SEQ ID NO: 83941 - DNA, 1358 bp, Homo sapiens
ccactgcactccagcctggggacagagcgagactcttgtctccaaaaaaaaaataaataaataaaatatgtttatcaaaatgtagtagcatttttacagttgcctttttgtatagaaaattttatttcaatgaggtcaagaaatagaaaagggaaaagaggtgtcttttttttttttttttttgagacggagtcctcctctgttgcccaggctggagtgcatcggagccatctctgcttactgcaacctccgccccctggttcaagcaattcttctgcctcagcctcccgagtagctgggactacaggtgtgcgccaccatgcctagctaatttttgtatttttagtagagacagggcttcaccctgttgaccaggctgatcttgaattcctgggctcaagtgatccaccagccttggcctcccaaagtgctgggattacaggcatgaatgaggtgtcatttttactttgaagatacgtgttaagtttttttcttcactgacctagtaacacaatacacttaatatggcatgagttttggttgctggaaaaactggttaaagtttgaagggtccagaagtgggagaaaaaaaactcacttgccaaatgtgttgagtcagcattaactaacactttagcataaaagggcaaggtttaggatgagatgattgaaatgagaaatgctttttttcactaggtacttggaaattttactttaaaaaaaagcctactcagaccattggagagatttaattagtaaatcataaatgttggcaacaaattaagtaggtttagaaggaagaagtcatttttttaaaagatgaggaaaaaatacatgtgacttttgtaatttataaataaaaacatcttattatttatttatttattctttttgagacagagtctcactctgtcacccaggctggagtgcagtggtgccatctcagcttactacagcctctacctcctgggttcccgcgattcttgtgctcagcctcccgagtagctgggactgcaggcgtgcaccactgtacctggctactttttgtatttttagtggagacggggttttgtcacgttggccaggctggtctcgaaatcctgacctcaggtgattcacctgcttcagcctcccaaagtgctgggattataggtgtgagccaccgagcctggctaaaatattttaaatctttcaaagatatgtaaagatgttacgtgttttctcaacctaaaaataaacttcgctggccagacctggtggctcatgtctgtaatcccagtactttgggaagccaagtcagaaggatcacttgaggacaggagtttgaaaccagcctgggaaacacagtgggactctgg

SEQ ID NO: 83942 - DNA, 2594 bp, Homo sapiens
cgccgcccccggagctgctggtttcattcgaggtttcgggccggtgagtgtcactcccggcgctgagagcatattgctgcttttgccccgccgctgccgcgggcgctcgaccggaagcttcctttcagtttcaggggtccagtcccaggctgtgggtgttgagaagagaagacagagaagctgggccaggagaggccgggagccccaggggctgctccgacttctggagggccgaccccgaggcctcggaccgggaggttccgcgcgccgcggcgttccgtgttgtggcgttgccccgccggtacgggcctccttgaacccttgactttctcaggctgcgatctttgagggctcattcagggagcctggggtttagcggggcgggccccacccccgcgtgtcttctctgagccacgtatcagcgttcttgtgtcttgtacccgtgtcaggtctgtcagataactcccagcatatccaaatgcccagttaatcgctgcctgcccctgcagtgccgtcctctcggaaccggacatcggcctcgcctctctctaaccttccgaccaacttctttcccaatttttcgtgtgtgtgtgtatatgttgttgttttgtttttttcaacctacctgcgagtatactgtttacccttttctcagctcctggccctgcggacgtcagcgtctaataattctcccggtcttcctgattgcctgaaagagtcgggacggttcggttgattgtgtttcccggttaggactcggtgtaggagatccatcgaaccactcgctcagggtaatgtttatgaagcagattatgtttatgaagcagattaaatggcttttgggaggcaagagctgtcaaatgttttctcatatgtggattccctccctgtgctgaatacttagctttttggtgcttactgacacttgtgtggtatttttttttctcccctattatatatccctgagcacggaaatctgtccatggagaaaaatattaatctgaggtaggtagaaaggagagttgggctgctttacagtgattagttaacagaagggaggagttagtgctttcttagtgaccttaactttgaagtgtttgtacagtaatgatctttgctgactgattctaaaaaatacttgtaatgatttcatgtattgggtttttctggggatagctgaattttaaatattcacttccaccgttccctagaatacttgtcaaatacctaacttgtcacacaccctaactttcacgtttgaaaaatatgaaccctctaagtactcgtaatctcgtcacttttattctaaaggcatgtttgcagtctagcatgcttgaataaaaagtatgtctttatttttatttatttattttttgagacgaagtctccctctgtctccaggctggagtgcagtggcacggtctcggctcactgcaacctacgcctcccgggttcaagcagttctcctgcctcagcctcccaagtagctgggactacaggcacacgccgccacgcccggctaattttttgttgttgtattttagtagagatggggtttcatcatgttgcccaggcagatctcgaactcctgagctcaggtaatccgcccgcctcggcctcccaaagtgctaggattacaggcgtgagccaccgtgcctggcaaaaagtatttcacagttattcactgatacatttcctacgtttcaagttaggcgagtgtgattgaatcacccttatttcatctcagcctgggttttcacatctgcaaaagagaaattaacttatttgagatcacagtctagtggttgaagtttaaatttataacttgaattgagtcaagctttttaatattgctaagccacttatagatgcattattattatcaggttattgaaatgagattgtagataaattcctctataggtcatatgatgtctcagaagaaaacaatattttcagtttaaatactcagtgatcttgttatttaagcagatttttcaaaaatatattagttactattagatacgtgagttctgtattaccctgaagcaatggaattttctcttttggtttaaaggaactgtcaaacactgaacacctatgtaatgctcactcatttagtaagtatgccctcgcagttactactgaaatgttccatttctgacttagacttttcaagtaaggtgttagaagagctatcacatagatgttagttaactcagtgtttttcatgctttaatatattggtatttaaatgtcattcaggcgggcgctcagtggctcatgcttgtaatcccaacactttgggaggtggaaggtggatcccttgagcccaggagttggaggccagcctgggcaacctaatgagactccgtctctaccaaaatatttaaaaatattaaacttttaaaaattcattcttagatagtttgcattcactgtagaaagggtccttttgccttaacaaattcctagcaaagtgttgtttagtgcaccattgatcagtgcatatttgaatgtctgctttgcgtttaggaaacctccgttttcttttgggggcagttgcttgttctttggtctgacctctgtcattg

SEQ ID NO: 83943 - DNA, 1367 bp, Homo sapiens
cagtttctcagagcactcactcatctgtactgccttctctgttttcagaggttaaggctccattctttctcgctttgcgtttctggcaagtgtagattcacatagtgatggtttagtggtagttttgtttcaccagtgttagccagctgaggaccaaggcaatattttcagtttctttcatacctgattcagcacttggtatactgtcactcagaaaattttacatacacacacacatatgctcatttttttttaaccctgaaaatctcttaataagtcttctccttgagtgactcccccctgacctctttttctgccccagaaacataaataattgttctttttcatctactgctgctttttttcatttaaataactccacatttatgttttcataggcccagaataaaggggaaatccatagagttgatttttcctgcttcccattgttcatatgggaacagtgttaaagcttccatttttatttgtgcgtttatctgaaatttggattggagcaaatttaacctttggggaacaggcacaggtagatgttagggaaatgatgttacggaaaaccaatgaaatttgatacatggaaattttttttcagggatgtcttcttacaagttggagcattagaggtgtttttctctctgttcaactgcctgggcactctgggtaaatgtactgtttacctgtggagaagaagatgaggcaaggacgtgtatactctaatgctttggaattacctttcatggtgaccctggggagaattagaggtcaggcagccgcttactccattcctgtttctatcttctaggctcccgagccagccgggaggacacttactacagctgctcagaagcaccactggaaactcaggtaataccggcactttgaattccttgtttcaggaaaatatctgggatgtcacagtggaaaaacagaacagaatgtaatatagaaagctcttttcagatccaaagaactggaacctggttggaagaaataggcagcaaagttcatgtgcactgaagtgttcagaccaaaaagttgctttataacaatggacaaaagcatttgtgaaaggtgacaataagagaaaagggaaagagaactttcttatgaatcatacagatacggggaaaaaaacaggcatgtttagaggaatggaaccagaatttcatggagtggtgcctggagcagacctacagtggagaaggagctattggtaaaagaaagcacaaagaaaaaagaaagggaatgaatagagaaggcaaattgaaggtgatcattgagaagaagccttttgagactagggaaccggaagtgtacgtaaggtcagaagaatttagaattttgttgtt

SEQ ID NO: 83944 - DNA, 1035 bp, Homo sapiens
aacctatcccatcatacccccgaccatcagggtgaggggcgagggtcagccaggaaccctgcagagctggcagagaaaagtcaggcccgtgggttctaccctcagtcccatcaggaaccagtaaaacatagacctttacccaaagcaatggttgtagccaatggcaacctggtgcccactggaactgactcaggcctgctgcctgtgggctcggagatcctggtagcatcaagtctggacgtgcaggccagagccaccttcccagacaaggagccaacgccgccccccattacctcctctcacttgccttcccatttcatgaaaggcgccatcatccagctggctacgggagagctgaagcgggtggaggacctccagacccaggattttgtgcgcagtgccgaagtgagcggggggctgaagattgactctagcacggtcgtggacattcaggagagccaatggcctggatttgtcatgctgcattttgtggttggtgagcagcagagcaaagtgagcatcgaagtgccccccgagcaccccttctttgtatatggccagggttggtcctcttgcagccctgggcggacgacacaactcttctctctgccctgccatcggctacaggtgggagatgtctgcatctctatcagtttacagagcttgaacagtaactcagtttctcaggccagctgtgctcccccaagccagctgggtcccccccgagaaaggcctgagaggacggtcttgggatccagagagctatgtgacagtgaggggaagagccagccggcaggagagggctcccgtgtggtagagccttcccagcctgagtccggtgctcaggcctgctggccagccccgagcttccaaagatacagcatgcaaggggaggaggcacgggctgcgctgctccgtccctctttcattccacaggaggtaaagctgtccattgaagggcgttccaatgcgggaaaatgaacctcttccccagaccaggactggggctttaccccagagcctcgcctcgccgcc

SEQ ID NO: 83945 - DNA, 1102 bp, Homo sapiens
gagggtgttgtgatggggagcagcaggcctggggcaaggaaggaagggggtgcacacaggagaagaaacattccaaaatcagggcctccctgttctttcctccccatccctagctcctgcaagagaaagtccaggctttgggagcagatggcagagggagggagtaaagaaagagccaaaaatgatgatccacagcttatagtagcagttaaactgtcagaagttttttttcttttttgtggtagaagggcaggaggccccaaggttggaaataagagggttcccacccagaacccttcttgtgagagatgcgcactttaaagggtgattttgttccagatgtctatggctgggtgtgtgggggaggagcactctcatctgcaggactctgcttgatcctctgcttcatagcccttccccatctctcctcaccattctgcctacaaggcttctagcagcacgggggcccggagggagagccccttcagggttcagagtgaagtactaccttgccagggactcagtcaggggactttgggagaaagacttgatagccaggctgactgggttctaggcaggccctctggaaaggtagctcacctaacaaagctcctccatctcagcatgccagacccactttgaaatctcacagaatcttgctggtaatggtgactttagaactagtagaccctttttcccaggcactgaccccccacctttgtctgtgttgtgcccaagtgcctgcgccacccccaccctcctgctgcgctgaccgctgcatggtgtcgtgacctgggcctcatttgtagctgcactgcctttccttgtctgcaaagttggttttgtccactctgaccaagacctctagtttttggtgggtagggggtctctctggtttccccttcagctataatctctatttttaaaatctcaaaatcatgtcccctccacttccactgccaaacagcttggtgaagaaacaagaagggaactatgccctgggccagggcgaatgcgtggctgggcagtgcccatcatggcattttcacatgtcccatatgcccctcctgtcttattccactgcttctcccagcattctggt

SEQ ID NO: 83946 - DNA, 1746 bp, Homo sapiens
ggattggccgagacctggcctggcatcaggagtccaaacctctgaggtctgatctctgctctgtcaaggactttcggcaagtctcgtgacctctggctctttcacttcctccccacctgccaaatggggataaataatcttacctacctcctggggggaggggaagttctgagaatggagtcattcttagtgttcaggtgctaaaggttgttctcctgggggaacagagtgactgaaactggcttgtttgctacaagccctaccctccactctttcattccttgaaagcagtttgcctggtcagtcagcttttgggggtccatcaaaggaggttgctgacctgaccgtgagtgcttcagtatctggtttgtgtcagaaccagacgccaactttgtactgcatttgggatcatatctttccccttctctgtcccccattctctgaatgctgctttctctggcttgtttcctacagtgggggcctgtggggttgagtcttgaggaatcccctcaaatgagaaggccttgggagaaggcctcatctctggctgtttcatgagcaactcattcctagagttcattgtttgcatgggtttctcacaagcgtccttcctcataggaaggctcatcaactgaatttagtgacatgtacacagtagatgctcaagcagtgtctgcaaggacacaagctgagctttctccttatggggcaaacctatgtctaaccagatacagaccaattagtttagatcaaatcaccttccacttgggctacttgtgactttccaacctggtaacttccactgaattctggaaagagaaattcttgaggaccctggcaagttgggccctgacctttctgttgctgtctcttgctggtgaagcaataccagcagttcctgtaataccacaatatcgttccatgcatatataacatattaatacttgattttgctgagctgcaaaggtatctgtcataaaatatggtccccaggaaaagaatctctgtgctctaaatctcggtcagagctgtggcctcccccttgcctttaacctctagtttagtcttttcctccaggcatgaaaaatatgactaacctgtggtgtgtccattcttccttataggaatttcctgagtttgcaggagacatgagagcagtttttagcgagtattttagtgggaagttgccaactttttaagaatgagcagttgacaagggccagagcctgtcccttgtcagcagtaggacatttccagctcttaggaatagaaaggaggactgctgactgtctggcgctgtataaaaatgtgtataccaatttgggaataggggaacccagtcatggatggataataagccaagtcttgaatcattcctatcaagattagtatacatgaggaagaggtggcatggggggaaggggctctgggagttcagagctgagtacttgtacctgagggagggcccccagccaatctgggctggtccttctatattcttggtcccagttggtcataacaccaagggctttgccctgcgctgctttgccactgctgctgtccgctcactgtcctgcctgctgtcctctacagctccctatccttccatgtctttggccatgtagattaagtgtaggcgtccggttcattcttacctgtgttaggccatgttattttatagcgaagtcatgttcgatagggatggtatgaaatgctgctggtgggctggtaaatccaaagggataa

SEQ ID NO: 83947 - DNA, 1410 bp, Homo sapiens
ttagctgcagaccatgcacagtgcctggggcggaaggaggagaggtgttgcggtttgccctgctgcctccccagcaggaacaatagtcataaatgcacttttcacactaaaggtttctttattagttctccagttaaacctagatccctccctggtagattgcgaactcaaagttttgtgatcccaaagccattccactgcaaatgcccagcagtgaagatggcctcaaattgggttcttgcctgcagtgtgtgtggcagcagcccatgtgcctttacctgttgtcaaacttgcaagcatttatttgtctttatgactgtcatggggactgaggttcttcagagaaagagtgtgagctgatgacacagtggttttacacccaccccctgggcagggagtttgcacgtagttgtgagctgtgagtggttagtgcattgctggtattgctgaaggcagggttgatccctcacttgactgatacttgcattcaagagaatctagattgtgttgggggagggactgactgtactcatggctaacttaaagtattaaaataaggctgtcccctacaaccttcttagtcacacaggatccctgtagccaaaacagtatatgatccagctgcagagagcagactgctctcagcttgcacagcaccttaggcgagggaagaatatacggatagggaatggggtggagaaaggatgggaatgttgtcatccaggtggctttagggtcctaaggagtggagaaggatggcactggggaggtctggatggatctgtgtaggagttccctgtagataaattactgatcccccatctactatccccagtatgtaatggctgaattaatatgtaatcaactgcattgtatctaaagccttagaactagtcaggtgctccctccacccaataccatttcttaccctctaatcctacctgatctttaacaaagcattaataattctaaggataatctctattttgttgtgcttttttgtaactgttttaaataaatcaatttgtactgtatatttgtacttttgtgagatcctttttgctgttttaccattttaagtctctgtacttggctacacacagattgtatttttattgttaatgctcttcttatggatacctgcatttaacttgtggactatgtaaacacaatatctatcaatatctatatatctatatatctatctatataaactactagcttttccttttggtgtttgcgccttcttcctatcccagccttagatggtggccatggggtgggggatagaaacctttgtgggagcagttgtaatggaacacaaatggtggctttatttgtgcggtgagctcaagggagatggcatgagcttgtcctcaagcatggtctttcccctctgttggtgtggat

SEQ ID NO: 83948 - DNA, 1067 bp, Homo sapiens
aactgaccccttgtggtgagcgtggagccactggcctcataggaaaagaataaggcagggctggagtcccgactcttgctagaaggaaacactaaccatccaaaatgtttcctttccagtgagaaacttcctgaagtactaaatatggaatccctacccacagtccacaatgagggtccctccagtgctgaggggaaggatattgcctttagtcctccagtgtaccctgctggaattctgcttgtgtgcaacaactgtgctgcctaccgtaaactgctggaagcccagactcccagtgtacgcaagtgggctctacgtcgacagaatgagcctttggaagtacggctgcagcggctggaacgagagcgcacggccaagaagagccggcgggacaatgagacccccgaggagcgggaggtgaggcgcatgagggaccgtgaagccaagcgcttgcagcgcatgcaggagacagacgagcagcgggcacgccggctgcagcgggatcgggaggccatgaggctgaagcgggccaatgaaaccccggaaaagcggcaggcccggctcatccgagagcgagaggccaagcggctcaagaggaggctggagaaaatggacatgatgttgcgagctcagtttggccaggacccttctgccatggcagccttagcagctgaaatgaacttcttccagctgcctgtaagtggggtggagttggacagccagcttctgggcaagatggcctttgaagagcagaacagcagctctctgcactgaaccacaccctcctgcctgccctccttcccacctacctacccacccacccacacccacagccacgaggaccagtgctgctgccacccacgaggccctgtccttgctgccagaggcaggcctgggtttattgcaggtggacctgagcagcccttgcatatgggaacaggatgatggggtcaggagggacctggctcaaggcagctctggacaagggagcaggcagtccagagaactggcctccccagcccactgccacaggctgtgcttctaggactgtggggcccctgtgtggc

SEQ ID NO: 83949 - DNA, 1136 bp, Homo sapiens
gtgacgatggcccctgggtccaggtccagcaatgccctacccttctgcctgccctgatgctgctcacccctgtggcacagtcttgcctctgatggtctcctgggcctgcatgggaggcctcttccttcatggcaccagaacccacacctcagactctcagttctcgccacactcagttttccttttccatccacgaatcgctgcgcctgtgcacagctctctttcctgcagctccccacgtctttccagacatgagagaaactttgttgaagtagaaagctgacttcccaaggtggactcttgaatgtgcttgcaaatctaagtcaaggtgtcacctggagtgccaccttctcactaacttgtttcctgaggattcctgaaaggaacatgacaggaaaaacgctacccctgtctgcagagtttatcttcagggaaaaaaattgattggctctctctgaggcaatcctgtgtcctcatggctgaaagccataattccctctcaactattactttttccttcagcccacaaagggaagctaagaataacatgcgccatcagtctgggttccttttaacaggataccctgtttaaaaagctggggcagggaagagatgagtaaagagtcctaatgagttgcctatttgttgaatcacaggtcacagggaatttgaattctgaccccttgcttgaactctgccagtgtcccctctgccagctagactgcgggagccgggagcagttgattgctcacgtgtaccaggtatggatgggggagctgtgtgctctggaacacaagtgtgggcagcttgtctgtagcccagatcctggtttggcctttgtctctctctggctcctgaaggagtcttgggttgtcacttctattaagattcgtcttagggaggctgggcgcagtggctcacgcctgtaatcccagcactgtgggaagccgaggcgggtagatcacttgaagtcaggagttcgagaccatcctggccaacatggcgaaaccctgtctctaccaaaaatacaaatattagccaggtgtggtggcatgcgcctgtagtcccagctactcgggatgctgtgacaggagaattgcttgaacccagtaggcggaggtcgcagtgagccaaga

SEQ ID NO: 83950 - DNA, 1046 bp, Homo sapiens
taaagtgctagtaccttgaagatcacaagaagtagccaagcctagggaagctgtcacactccagccctatcttaaccccacctggatcctggacttctgggcctgatgtgagcaagagagaaatatagggcagagtctcaccaggctgtccgcaggaaactcagatttcctagctaacagtgtgcctgtcttctctactacccttgcataatatctaaatccaccagtatgagagcaacatatttcccttcttcctgggcaaaactagttatattccctttcttcatgagaaggtctaaccaaatcatctgctagtagttacatgtgtccttattagataaatactccaggcaactggtggactggatttggggcctggaaagagctatggtttgtgtgtcttatttcccagcccaaagctcctttcatttgaatccaactcaataatgaaggattggcacagattacatcataccatgttttctccccagcttatctgaaatacttgtaaactttatataatataaagtgatatatcaaacatatttttgtaattttgcaataatccaaatatatctcgctactagaaaaattttttaaaaatgtgtactgtctagagggatagtacatccttcagaatggaaaactattagatgtttgcagatattgtaattcccacctgctactcaagaaagtggtggcttccataggttttccagacatgtttgggttcatttttttgtgcccgagcaattaattgctaagttattttatgttgttgatgttgcttaattattagcttgggtggaaacaagttcctagaaggttgcagagtcctctctccattttcacccaacccagcctcaaatgtggtgaaaaattggaaaagtcattctgaattcatactaataataaccaatatcaaatggatgaggtggggaaagtgctgaaatcttcctaggaaaacacatctcaagacgtgtttgttcagacaggtcacaggacagacagacaatccatgaggctcaacttgtaacagctactgt

SEQ ID NO: 83951 - DNA, 1746 bp, Homo sapiens
ggatttaagaggagcaagtgatgctgtctagagcatctggcttactgcccaggaagagcagctgcacccagaagctgttggaggcagcaagctgacttggagatgaatgactccaccacagggtacctgcctgtctcctacctttgaatggtctgaccttccaaccagcttgcctggggatatgctgcccagctggtggcctgactatttttccttgtgaccaccaggggatcaagtatttgctgggctagaagagcaagcccgccaggcgatgatgaaaactgattttcctggagaccttggcagtcagcgacaagctatccaacaactaagagatcaggactccagtagcagtgagttctgcaccttctggtaatgactcagggcaatgggagaagaattatcagagtgtgtgtgctctggggattgtgcatgggggttgggagaaagacatgaaaaaggagatatgtggatcctcagtgtccccaaaggtggtctaaggtgtgtgggcatgtgtttatccagaaaaagaggacaggtttggcattttatttatatatatatacttttttttttttgtgacagagtttcgctcttgttgcccaggctggagtgcattggcatgatctcagctcactgcaacctccacctcccaggttcaagcgattctcctgcctcagcctcctgagtagctgggattacaggcatacaccaccatgcccagctaattttgtatttttagtagagacggggtttctccatgttggtcaggctggtatcgaactcctgacctcaggcgatccactcacctcggcctcccaaagtgctgggattataggcgtgagccactgcacctggccgatatatatatttttaacttatggactacagtacttggcacagtgccacatacagataggtttgttggttgtgataggcaaggatataggaataaatagtgctcaagcagtccctgggttaggtcaaatgaaaagaaaaaaaatccctgtctcctaggatctatgtatttgtaatcaataaaatataagggtggcattaatgaaaccttgcttgaaggcccagttttaatgttaaacaagaagatttgcttagtaatgaggttatgcagtgtataaaatgctaacgtcaaggtcttcccataccaattccctaagaagatccctgtggttacgacagtagctgttacaagttgagcctcatggattgtctgtctgtcctgtgacctgtctgaacaaacacgtcttgagatgtgttttcctaggaagatttcagcactttccccacctcatccatttgatattggttattattagtatgaattcagaatgacttttccaatttttcaccacatttgaggctgggttgggtgaaaatggagagaggactctgcaaccttctaggaacttgtttccacccaagctaataattaagcaacatcaacaacataaaataacttagcaattaattgctcgggcacaaaaaaatgaacccaaacatgtctggaaaacctatggaagccaccactttcttgagtagcaggtgggaattacaatatctgcaaacatctaatagttttccattctgaaggatgtactatccctctagacagtacacatttttaaaaaatttttctagtagcgagatatatttggattattgcaaaattacaaaaatatgtttgatatatcactttatattatataaagtttacaagtatttcagata

SEQ ID NO: 83952 - DNA, 1042 bp, Homo sapiens
tatacttggccttctggtttctagcctctccctcttgtgatccatcccacaaattgcttcatagtaccaaaacgctgtattctaaatgtcactcccctctccctgcttaaaaaccttcagtagttccctacggactatagaatgaactttgaacttggcctggcattcagccttccacgtgtagagttaagcatctctaacctcacatcttctgacttttgaacaaatgagacctctgcttcatataaagtctccttgtcctctgaacatgtggattcccgcttctgtctttgctcacttcactttccctacctgatgttccctctccctgcctcttgttttttaattttttttttcaaatccattttctaccctctaaggcccagttcaggcgcatggtctagaggcttttccattaagcattccccttgctacttcagtccactgagctcttttaacttccttcctccgaacttctctagtacatacagtctgcagcatctgtttggcaattagcatatactatcattcatatttatatatctgaggttacaatacggtcttatagatcttatattggtttagagccctgacatctagcacaaggatctgcagagagtaggtatcctataactgtttgttaatgtgatattaaagatatatcaagtgtacatacccctaagataggtttccaacacctcccccagcaaccagacacactttaaatccaccatttccaacatttttaaccctttttctttctttctttttttctcttctgctcagcaaactgtgttttacatttaaacttttcttcttcacaaattagcgtgagcttctcccctaaattcaggttactcttccattccaccccttagcattcccaggttccagaagacaaagcccgatactcacagtgaactttatttggatttgtctgtttccgacgggacatgtttccctgatgcaagagctctggtctttcccagtttcacgactggatatgttactacctccttgcaagatgctaacctgcaataaa

SEQ ID NO: 83953 - DNA, 1762 bp, Homo sapiens
cccaggatggagtgcagtggtgtgatctcggctcactgcaacctccatctcgtgggttcaagtgattcttgtgcctcagcctcccaagtagctgggattacaggtgtgtgccaccacacctggctaattttcatgtttttagtagagacgggatttcaccacgttggccaggctggtcttgcactcatgacctcaaagtcatctgcctgcctcagcctcccaaagtgctgggattacaggcgtgagctaccatgcccgccctgggatcatatcttttaagctttggatccatttctgccctttgtgacttttagactgagtaccttttttgcagagaaagggacatactctgttgttgtggcattaggtcacctgactcttgagttggaaatgtcaagccacatgagctatattttctcacctagacagagtagcaaattctacagtagaggggatgggattagatttgctaaaggagaggagctaggatatagtagaaacacccagttcttcctgttggggggagattggcctgtaggccagatgcaagtgctctactgctgtgagatcggagtgggatttgtgtcttagcggaactggcccagaaagcaaggaaggagattgctgactatctggctgctgggaaagatgaacgagctcggatccgtgtggagcacattatccgggaagactacctcgtggaggccatggagatcctggagctgtactgtgacctgctgctggctcggtttggccttatccagtctatgaagtaagatattttgattcagagacctaaatcatttctggaatttgagaaaggagtaatatgatctctttctgcattaagggactatttcacatgcccaaggatctgctgcctaacagttgctgaaaggcctgttaaaaagaaaatacagaatctgaaactgagaagcctaaatttgaatcttggctcgaccattttccgagttcatggccttgagcttgttgcctagttttgagttcctccaaaagtaaaataagatcacgaaaatggctagaagcctagagttattgtgagaatctagtgagattcacagaatggctttggaggctataaagtatatgaaacaaaagctaggattttgttggtttgttttaaagaatgttatattaatttttttccttgattagggaactagattctggtctggctgaatctgtgtctacattgatctgggctgctcctcgactccagtcagaagtggctgagttgaaaatagtgagtacaagtagtttcagtgatgtctgtagcttttcatattgttagaaaggttggttaatataagttacttctgctgatttgaccagatattttgtaccattcttatgttgcttttgaaataggttttgtaaatttgtttctccctttcagccttatatcgtagaatagaacagtgttttgcaaacttgagcagtttttttaaggagcaaagttttgtgtatctccagttttgtcttaatgttatttaactctatgcaaatagaaaagttcttatacaactgtaaaccagtaaagttaaaataacattaaggtgacagatgtttttgctttatttattaattccacaaatatttattaaataaattgtatgagctatgtaagtgctgggggtaacagtggtgaacaaaatatggcaccagccatactcctgtagcttagagtctagcagaagagacagacattaaccagaaaattgcacatcacaacatggatatg

SEQ ID NO: 83954 - DNA, 1021 bp, Homo sapiens
gcttaaatatgttacaaaactcaaaagccataaacagagtgataaattaatgtgaataaaaaaatctctgtgtagtataaaccagccaaaacaaaaaccataaaagacaaatgccatttatatcataggtgtcaggtacccctgaaagtcttcataatgaacagtgagaactctcctactgggcttctggaatgttgggaccactctggtccaatgctactgtcgtttcctgtctggaaatgagagtagcttcttgaatattcttcctattcctactttggcttcttttaatctattcacaccattccatcagaaccacctgagggttttgtccaaaacacagctccgatcctgtcacgacctcttgctttaaagcccattagtagctttctgttgctcttgtgatagaaacaaaactccctgatacagcctacatggtcctgcattgtctggctcccacttccctttttcatttcttaccacactccttggcctctgcactagaggctcactggctgattgcaggcttgagaactgaccatgtttgtttctgccagaggcctttgcactgctgttttcttttcctggaatgtgcttccttccctatttagttaactcctagtcatcctttaatttattatttgagacggtcttgatctgtcacccaggctggagtgcagtggcacgatcttgcctcactgcagcctcggcttcctgggctcaactgatcatcctcccacctcagccccctgagtagctgagacaagaggtgcgtgccaccatgcccagctaatttttgtatcttttaaaaatagagactagggttttgctgcgttgcccaggctggtcttgaacacctgaactcaagtgatcagcctgcctcagcctcacaaagtgttgggattacaggcatgagccacgatgcctggccttagtcatcctttaaatctcagcaaagcatcacttccctcaggaagccttacctgacttttctgatcagatttgattctgctgttagaag

SEQ ID NO: 83955 - DNA, 1048 bp, Homo sapiens
gtggggtgaggaggacagctgtgtggctggcagtgtggtccaatccttacacctgcccaattcctctggttactgtcattcctgactccacttccccactttgtatgcctcgtgtcatttgtgaaggttggaagtgaggtggggagaagggtggatgaattgaactgtggaaggcagcagtatcatcttttgccagcatctgggtcatgtgtaatgagaatgtgaaagagagacttgggtcctctgatgtgtcttgtgactctgaaaaaaatcatttaactgctctgaacctttttttccctcaatattacctgtaaaatgagaggagctaacttcgcatagtgaggtgaggattaggctggttggtatacatgcatcttagccctgggtctttttacttacagctaatgcacaagctgagtgtggaagccccacccaaaatcctggtggagagatacctgattgaaattgcaaagaattacaacgtaccctatgaacctgactctgtggtcatggtaagtttatcccagaatacaaagaaaaatgagtttgtaggtatgaccttctttggaaaacaaaaaaaacattctttgcactaacttaaatttgtgtgagtttaagcctttgtccagttagtacctttatgacaataaatgtgcctgcatatctcacagggtacttaaggaattagatgaatgacaacactttgagaaggtcaaaaccttgatacaaatgtaaaatggcactattattgctactttttggtgaacttcaggaattgagaaacctcctgttcatagcaagaaatgccccaagacccaaacagttcccgaaacatttattgggtacccaccatgtgtctgatagtgcacagaaagctgaggatacagggataaaaaatcatccaccagttggccaggtgcggtggctggctcacgcctgtaatcccagcactttgggaggccgaggcaggcggatcacaaggtcaggagatcgagaccatcctggctaacacggtgaaaccctgtctctactaaaaatacaaaaa

SEQ ID NO: 83956 - DNA, 1001 bp, Homo sapiens
gatatattcaagaatgctttccctttgcccaaaggtgaaagtatcattaaagttgtcttagtatggtaaggatttttttttctctgcttggcagttaagagttcaacatggggctgggcggggtggttcacgcctgtaatcccagcactttgggaggcttaggcaggcgttcgagaccagcctgggcaacatggcgaaaccctgtctctacccaaaatacaaaaattggccaggcatagtgctgcatgcctgtggtcccagctatgcaggaggctgaggcggggcaatggctggaggccaggaagtggaggctgtggtgagccgtgattgtatcactgcactccagcctgggtgacaggagaccctgtctcaaaatcaaaggagttcaacatagtatctacctgattggaaaaaatgcaggggcagtttctttggaacaggctctgttgcatttggtgagcaacttaacttttggaaacacaggggcttacaccagtactttctccagtgacactattgctgtctcctctggtaacaatctttgtgtttcaggtagatgacattaatgctgataagaatatctcttctgcacagattgttggtgagtagtatcaatcagaaacctgcagagctcagtgctgaaccctctgctgttttctcattattgttcctcccttagagactgtttccatgtccatggacttctatctgcatgccctgttctcttcccaaatgctaaaatagaactcaggatatcctgcttctaagtacaaatcctaagtgatagctcagtgatttttttttttttttttttgagatggagtcttgctctgttgtccaggctggagtgcagtgttgtgatcttggctcactgcaagctccgcctcccgggttcacgccattctcctgcctcagcctcctgagtagctgggactacaggcgcccgccaccatgcctggctaatttttttgtatttttagtagagacggggtttcaccgtg

SEQ ID NO: 83957 - DNA, 1057 bp, Homo sapiens
cagtcgattgctctgtggatgtggccccatgtatcccactttgatttcccttaaacttttttctcaccacaggaaagtaaaacaggattcaaccctaattagaaaatgtagatattaactgtcattcaaatgtttattagcctctagaattaacttttttttagccagatgcggtggctcacacctgtaatccagcactttgggaggctgaggtgtgtggatcacttgagatcagagttcaaggccaacctggtgaaaccctctctctactaaaaatacaaaaattagccaggtgtggtggcatgcgcctgtaatcccagctactcaggaggctgaggcaggagaattgcctgaacccaggaggcagaggtgcagtgagctgagatcacgccaactgcactccagcctgggtgacagagggagactgtctcaaaaaaaaaaaaaaaagtttgtgaactaaggttttctcctgtgttttgatcattttatttttactgccaaaggggatctgagtcatttctctggtatttgtaacgttgtgctccttgccctaattaggtcctggacccaagccagaagcctctgcaaagcttccttccagacctgcagataactatgacaactttgtcctaccagagttgccatctgtgccagacacactaccaactgcatctgctggtgccagcacctcagcatctgaagacattgactttgatgatctttcccggaggtttgaagagctgaaaaagaaaacataggtctcttaaaccaggcaactttcacgttttgggagttgagactgagcaatttctccttgtaacaaagaatctccatgaaattctgtttcatctgttaaccgtcactcagcacaacactccctctgggctctcttcctgctcctccagattctgctgctttccagttctctgttgatcctgagactaacaattggagactgaggccagagcaactggctcctggcagctgtgcttgtccgtttcctgtcagagtgatcccaggtttcctcctggcccgtcccatggtccctccacaggag

SEQ ID NO: 83958 - DNA, 1056 bp, Homo sapiens
ccctctgtacagggggattgtggtgagtgagaatcaaggccaccttgtgtgttttctcactctcgaatgcaagtgggagagggaaaatgactcgggacgccattgtaacggttcctggaagctgggccctctcattggcatatacagtactcctcgctgcagggcactgtcccaccgggatccagttgcaaagtttgtcttgacagttgaaggcctcgcttagttgtactggattctcagggagccctctgtggccttttgctttgcgtgctgtttcccttgtaccagagggcggcaccgtggaaattctgttttccctgtagcatattgtgttggattgcattactggcagagaaaggacaaggtgccattcaagtcctagggtgggcttccagctgccttaatagaagtactcaagtcttttgggtagtgagctggaaagcctacaggaaaagaggggtacctgttttcatttgaaaactttgattcatggaacctttaaaactaatctcagaaaaatttttggtgcccatgcagctgtagttgttcactgctttcctggatggatgggactcttatgtcataacttctgttactcctttggcccatagctaaggtcatccttccccacaggggtggctttgggattggatgatacagcttttgcttctgtgtagtatacctgtacatacttgtttcaggcagcctttctttaatgttttcagttggtttgtattctgtagctcagtagctgctaataaagttaaagatcctgtgtcctgctttctctactgtttggtcagatgatgaagtataaatctggattttagtggagaatattttaaccaagtgatccatgtaaaccagcccttagtttcaggattcctggagcagtacagagctcattttgatctctgtatttagatagcccagatagcatctgtgaatttccttggtcttcctcagtggcagggctccgcatctgccatgcctcatccttggatgtttatttttagtaagttgcagtgagctcacttctgactgcttcatttcccg

SEQ ID NO: 83959 - DNA, 1293 bp, Homo sapiens
ttactatattttctcatttcagtcaagagcatcagcattctctgaaaaagtcggagtacataatcctaaattcctctgttagtttccacatttagtcaccatgctggagagtgcctaccctctaactggctaaggctaactggcctaccctctaactgactagggctaacttatcacctggatgaacctcacaaacacaatcttgggcaaaacaagaggttgcagaaaaattggcacaatatcttaatcatgtaaaaacgatgcatgtcttgacaagaggttatatatgtatctcctctatgcatttatagataaagtataaagaaatgcatgggaatgataaactccagaattcaggaaaggactacctgtgagggaaagaaggaatgccatcacagaggggtacacagcacactttatgttggcagtcacttattcttaagtggtgatctactgctaagcagtaggcactccattccttgtgagatgaaaaaacttaatctgactttaaactgccttccatttgtgaccagcctggccaacatggtgaaaccctgtctctactaaaaatacaaaattagctgggtgtggtggtgcatgcctgtaatcccagctacgtgggaggctgaggcaggagaatcgcttgaacctgggaggcggaggttgcagtgagccaagatcgtgccatcgtactccagcctgggtgacaagagcggaacttcgtctcaaaaataataataaattgccttccttgcacttattttgtttctctgtgcattctgaactgttggtttctctgcctaaaagagacttttttccccttatcatcacccttgttcatctggagagctctgattcatccttcaaaacaaatgtcaaatgtcacttcctctgtggcgccttctctgactttcttggagagatttatttgctcactcttcactgatcccatggtgcttggaacacacatgctggcaagtttcatgccctcctctagttatttttatttttatttatttatttatgagatggagtcttgctctgtcgcccaggttggagtgcagtggcacaatctcggctcactgcaacctctgcctcccagattcaagcagttctcctgtgtcagcctcccgagtagctgtgattacaggtgcactccaccacgcctggataactttttatttttagtagagacaagtttttcccatattggccaggctggtcttgaactcctcagctcaggtgatcagtcctccttggcctcccaatacatatataaataaataaataaat

SEQ ID NO: 83960 - DNA, 1040 bp, Homo sapiens
atcaccacaccccactaatttttgtatttttagtagagatggggtttcaccatgttcaccaggctggtctcgaactcctgacctcaagtgatccgcccgcatcagcttcccaaagtgctgagattataggcgtgagtcaccacacctggccaaaagactgtagttctttactggaacagtagtaatccagagcccagggttgtatcactggtcattttctttcaaatcatttgtgactctagtttcatcatggtctcatttgtaaaatattaataatagatcctttagaagagaggttcattggtgtttttgttccatttgatatacaagtaagcactcttctttgttctaagatgaggagtacacgtgggtgctgaatccagagcatctgcagcacgggattggcacctactatataacagctgtgctgagtgagaggcaggagggtgctcagcagacacccagcttggtctcggtcatcaccgccgtcactcagtgttactactgggagatccacaaccagacatggagcagcgccggatgccaagtaagaaactgagccgcttcttgggcctctcttctgccatagctactgttaagcccaatgcatccgttatctcatttggggcagcccagaaagaaaaataatcaggtggtttgaaataactctgcctgggcaaaaggagggaggagggttgtgtgtggtgggcagggcaagtgtgcctcttcgaagcaggagcagctttgtgctttatctttgtgatttctttctcaaacacagtccagggtggatctgacaagtgtggataaaatagcgtgtggaagccataaaattctacaagtattaaatatgttgtgggtgggtaaaatgaaacctcttgctaaacgaaggagaactttcatagctcaagaaatacattctcagattcttttacgttccaggccaggtgaggacaggttgtcacttttgtaattatcaccttgttcctggtgtccaactgctttaaaccagcactattatatttgcacactcgtgattc

SEQ ID NO: 83961 - DNA, 1024 bp, Homo sapiens
catgcccggcctcaagaaaatgttttaatttccttaaaaaaccttaagaaaaatcaacttttaagttgaaaaagtttatatattaacatattcatctttatatcaacacagcagtaaaatttattttttaaagtgataaaaactgtacaaatatttctggtgtgaaacacagtgttttgatgctcgcggactcttggattcgaggctgcggtagtacggacaaacaccgtgcagcggcatctcatctccgccaacagccggcgatcaagcgggcaggctgggagagggcgggcggaagaggcgtggccgccgctactgcgcacgtgcacccaaccagaacctgggggtggtgccgggccttccccgctgcgcggaggcgtcctctcaacccttctgcccggcgactggtgggttggcggctaaggggcggagacaagaggggccgccaccatctcctccaatggaagggagacaggggcgggcttaatgacggaaggagcatggcgtggagacacctgaaagtgagtcccgcgagtgagcagtgtggatgggggaccagggaccggggagggcgagaacggagagtcaggccgggcgaggcatggaccgaaggcggctccgggagtgtgggcccccctgggacgtgtgcgtgtttccggggtctcctgcaaatgctcgtgcgtgtgcatttgcacgtggactcggtcaggcgtgtgcagacagcgcctgcaggtctgggtgggtgctgatctgagtgtctgcgcctgggccatgtttttgagcctggcacaggggtgcttagtgaacacatgaccgcctagcgttgtgtgccggatccaacggggaatgaaactagagtaggacatgctcccaacccttttaggtaaagttttgttaggggcgggggtctctgtgaaaagttcttagctgtatccccgtatgtaataggtgttcagaggccgggcgcggtggctcacgcctgtaatcccagcactttgggaggccgaggcgggtggatcatgag

SEQ ID NO: 83962 - DNA, 1011 bp, Homo sapiens
ttagcatttgggaaaatattcttcatgagttgttttggaaactcatttttggttcgggacagttcacacctgtaatctcaatactttgggtgcccaagttgggaggatcacttgaactcaggagtttaagaccagcctgggcaacatggtgagatcccatttctctaaaaaaaccaaaaacaacatgcttttttttttttttttttgagacggagtctcgctctgtcgccccaggctagagtgcagtggcgggatctcggctcactgcaagctctgcttcccgcgttctcactattctcctgcctcagcctcccgagtagctgggacttcaggcacccgccgccacacccagctaatttctttttgtatttttagtagagacggggtttcactgtgttagccaggatggtctcgatttcctgacctggtgatccgcctgcctcggcctcccaaagtgctgggattacaggcgtgagccaccgcgcctggccacaacatgcatttttgaagacgcctccggcgatgcgggtgttctctgtggcctctgcctcacttgctctcaggatgcacttagtggtcgcagccctctgttgtcctgaccctaatgcccctgggaccctctgggattgtgtggggttgtggctcagtagcgaccattttcttctttgggtccctctgaaactccttccaggatgtcttagtctcagatagtcctggtagcaggatgaagaaaccaatggatatgggattcatttcaggaagtgaggtggaaagggctgaggcactcagcagtgtcagatttggggaataggaaattatcttttggaaacccctgggttgggtggaaccagaccccgctgtactgcagagccgcccacctggggagctttggaggtcatcacaggacttgcatggtttgtgatgcttgcccgccttcgtgcttgctttttcttctcctcggtgtctgcagtgcagtgtcctggctttatctcctgttcttcctcacccagc

SEQ ID NO: 83963 - DNA, 1021 bp, Homo sapiens
taagtgcttgaaggagtttttctaatgcctcttcctctcttttgtcaactgcatccagcaagtttaaggcttgagcttggctccttggccagtcttgactgggactgaaaattctttctctcactcctctctccagcctgtctggacagcgggtctctgtggcataggagagtagtggaaacagactgagcccggccatcgtgggttcaaatcctggttccaccacttactacctgggggcctcagacaagacactgtaattgggttgttgtaaggactggaccctgtcctaggggaatgttgtgggtggtcagcgtgtgatggctgctgtcgtcatgttatggctcattctaaaacttgttgaggaaaagatgagtagtgaggtctggtgtagctcttgctttgggggctgtaggtgtgggtacctggcccggctgctgccttcgacctccagagaagcgcctctgggtccttcggtgctatgactcatggctttttctctatctcgcactgcagttgggcatcgatgggctgattgttacgaacaccaccgtgagtcgccctgcgggcctccagggtgccctgcgctctgaaacaggagggctgagtgggaagcccctccgggatttatcaactcaaaccattcgggagatgtatgcactcacccaaggcaaggtttcccgtgtttgtgtcttcagatctgcgtgtggcttgggctcctgggtcgtgatgggaatcatcattccctaatctgtcttgattgtgggggactctggggctgaagccacatccttctttatggtgtcgccatgtgcttctctgtaggccgagttcccataattggggttggtggtgtgagcagcgggcaggacgcgctggagaagatccgggcaggggcctccctggtgcagctgtacacggccctcaccttctgggggccacccgttgtgggcaaagtcaagcgggaactggaggcccttctgaagtgagtgaggtcatgtgtggcttgaaacagaagtta

SEQ ID NO: 83964 - DNA, 1030 bp, Homo sapiens
acctccaaggcaatggtgtttctaaggtggagttgtccatttgctcaagggaggggagcctgaggaatcccatcagcattcccattaattaagcaacactggttcaatgttgggagctgtcaatacttaaaagcaatttccttcctgctctgttcctacctgggtagaaatatccctaggtctctgggtgaagagtgtagaggaaaccagatgtgcctgggccgggatgatgcgtttctgggtgaacgtgggcttcctgtaagagcagggcctgttctccactgtttgctgaaattgctttgtttgctctttttccagagagcagggctttggcggagtcacagatgccattggagcagatcatcggaggtgaggacagcgtctgacgggaagcctgatctggaaccttcccaaggactcaggcaagcctttgtggctggatcatgagaggagggactccatcttgagccatgtcccccagccatggcatggctgcactgtaaacgccaatcggggggtcaccaggatcaaccgcaggctttcttcagtcccttggtcagaccataaactgcatttttgattctttgtggattcaaaccctaggatccatcagtcttgcaaggacattgaatattaggaggaaaaagtcatggaaaaaataaagccatttagaacctgggtttcaacgctagccctttctggtttgccataggccctgccaagatactgcaggtccatccaggcctctgctatctgcatctgcagtgggcttcccaggaacttgactgtctttcatttgatctttatttttgtttatttaatattttaaactttattttaaaaatatttcaaacataagggcggggtgtggtggctcatgcctgtaatcccagcactttgggaggccgaggcgggcggatcacctgaggccaggagttggagaccagccaggccaccatggtgaaaccctgtctctaccaaaaatacaaaaaattagccagatattgtggcaggcacttttaatcccagc

SEQ ID NO: 83965 - DNA, 1041 bp, Homo sapiens
ccagtaattacacttccaggactttaatatgatgttgcagatgcacatttaacaaatgaaagaaatatatgtcagctagaaaaaagcatattactgaataatttgtatgacataattcccaatgttgggaaaaaagaagtttgtatctgcacatacacacacacacacacacacacacacacacacacacacacacaagattggaaggatagacactgaaaagtgacctctggcctcatccgtgattttatttatttctttaaaatttttacagtaacatacctggtgtttgagatacttttctaaaaaatcaattttttaatacctaccactcaaaaggccatgaatattgaatgggctttgcacaatgcccaggcaaaagcaacaacagcaaacgaagaaacaatgtgcactccaacacttggtgaaatctgcttgatgatttgagaagtgataaaaatagattttgtgattacaatagcttttgaagctaaagctttgcacatgacagagctttcatgctagtggcccacagcactgggttgagtcatttactaaatggaaaaaaatgattgaaaaattaatgttgggctttatttctgaagtctcattgacaagaagaaaataacaaagctgtttttcattttgtttatcctgaaagtcttcaacaagtgattactcaaagttcttagagcagttgtttctcttctatgctgtctagatctccagatcacactaagtttgtgggaagcttcaaaaccaaacaagacttcatagatttgattgaagtaatctatcgaggagcaatgagggggaagcttattgtccaaagtcctattgatcccaagaatattcccaaatatgaccttctctatcaagacatttagtacattaattgctgtcaaagatgaagaagaaggcacatcttgacacagtacctgaatccagctgtgctgtgtttctggagtcctttggaaacatgtgtcccagaggagaagaggtttgacttgcgtgtagaaaacccggcccctgaggaaaaga

SEQ ID NO: 83966 - DNA, 1038 bp, Homo sapiens
gacaactattgagtagagcctgtatatctttaccttcttgtgtggatttcctcacatgcgcacagatgtcaccaatatgcagctttctttttttctgttctgcctgatggcattttcaaaatgtaactcttgtttctgcattaatattatgtgtccagtctgtttggcaatactctgtagagctgtgcatttaattagagtttggtaaacaattctggattctggtggcatctcctttgctttgctaacttgttggaatgagaggaattatccaagcatccagaactgatatatgttgatgagtggcagatgtgtagtgagaggtaaagaggagcttgttccaacttgagtgccagaagtcttgtagccacttaaatacttctcagtaacaccttttcctaacctggtgtttctcataaatatttttggtgaacatggattgttattaaactgattttggctgctgtgagtaaattgttttctgtaaaacgcagctaggccaagaaaagccactaaagtatggagaacatggacggtagccttctgccccatctctgtgctgctgtacctgttgtttaaagagaggaagaggtagaactcatgtaaaaaaatgggtgagggaccaacagtatataggaggatagcaaataatacaatgtagcagttacatttatgttaactgttatggttacataaagagctactctttatggtttcacatacactttttgtttgattctcacaatagcttcatggattagataaggtaaaaattttttccatttaatagatatgaaattatggctaaacaaagattaagttatttgcttaccatcatacaggtagaaagtgtcaagagcctggtttctaattgaggtttctgattcaaatttagtggtgttttccctacatccctgttacagctgctgacatcaggctctagaaagtgtcccttagtgagactttttattgcctcttggatctttgtgggggctggggaggaatgtatggggtgtgtgtgtgtgtgtgtgtgtgtgt

SEQ ID NO: 83967 - DNA, 1059 bp, Homo sapiens
acgggcatcgctctttctccccactgctgcagccggagccggtgattccagtgaaggatgctacttctgacctggccatcattgctcggaaaggcagccagacagtgcggaagcacagggagcagaaggagcgcaagaaggttggtttcttggtttcgtggctgggaagtttatgtgtatttttttcttttttcttctcttcataagtcttactaggcccacagatagaagttaggagtcccctctatcaagtccttaggcccgacagctgcggggcctggtgttgggagagctggaggcttgaggattggaatgtggctcggtgccaccagcactctgggggagtttaccacctgcggggtgaagtctgctctcccgtgggattgattttccattgctcgcagtcatgtggcaggatggagcagactgacctttttccttttcaggctcagcacaaacactgggaactggcggggaccaaactgggagatataatgggcgtcaagaaggaggaagagccagataaagctgtgacggaggatgggaaggtggactacaggtgggcagcctcagccagcagcacatcagccttgctccaaagatgggggcccatgtgggcagttgcggcagaacccatcgactttgtggctcctgagtgggagactcttaggatacctctctgcatcttccattctctctggtcccttcctcctggtctcttcactgtcctccacttttcctatatgtgattcctcctccctcacactgcttcctctggtgctggtgttgtgagaggaaggaggcccagggaggttaagtaacttgtctgaggtcacccagcttgtcagtgagggagttaggatcagacccaggccgtctcacatcagagccactctgctgaagtacctcccaggtgttcagcatgggcagctgggttttagtcccttagatttgagttcactataagaactatttttaaaagaggttccaaaatagaaagggttatcttattggccagtgacttctctgctcatagaggcatctaagcagatgctgagt

SEQ ID NO: 83968 - DNA, 1402 bp, Homo sapiens
aacggtcatctgagttaataattctctccactcctgtgtgaaatgtccatacgagaagttggtactattgatcagcccttattcttctctagttaacttaattcctcaggtattagttattgggtgaccaggagggactgggtgaaattagaaataggaagctcagcagagcatggggcggcacatcagacaggaagtctctggggagggggttggggaggggtgtgtggactgtgtggagcactgaactggtgtctttttgccaggcagccttgagaaagtgacagtgctctgcatctcgggtgtgtacatgtgtcagacattgagagctttcagtagaggttgcaggttactgtttagtggggctgttttcacagttctttgaaaacaaaaccgtacagactatgctttcctgctgtcctgccaagaggagggaggaagtttgacccatgtcccgtgctctgcacccttacctcctcacaaggcctgtgtggctattttagccctttagacgttgtgctgaaattgcccgagggtattttctacaagttagtgacctggggattgatttccactcctcttctgctcactctgttttggttagagggtttgctaatatggtgatctgtaaatcctccgatccatgttcagctagctctgttggaccctgtggtgtcgagtgtgttgtggatgatggattctcaagtagcagtttcagtcctgaggtcgatgagaaccatctcagattccctggctgctttggtgtctcagactcttgccgaagtcctcattcctgagcgtaggaaggagggcagcaacccaatcaggaaggacagcatggggcaccatgcagggtgtttaggctgctgtgtgttcctaggacagagcagaagtttgcagatcacatgaagagaaagagcgaagccagcagtgaatttgcaaagaagaagtccatcctggagcagaggcagtacctgcccatctttgcagtgcagcaggagctgctcactattatcaggtaacttcacccggggcccaggaatctagtgtcaagtcaggggtgcccttggtctcccatgtttacccaggagctctttttcttttgtgcattgcacccagtggagaagggaaatacttttttcctctgacctcatgcctggggtacactgcacaaagtaacgggatggcaccattttgttttagctcacctgtttaaacctcaccgtattccagatgtttcaggtgttatctcagtaagaggctgttgtcccagtgaaattctcccttctaaaccggcatgctccctggatagctagtcatggggataggaggtagcggagtcttcttggaggctgggtgttggccttccacttcggctgataagccctttgcctgcttgtcc

SEQ ID NO: 83969 - DNA, 1459 bp, Homo sapiens
gcggagaagtttgctgccttttttgggaatgtccccatcttccacatccctggccgtaccttccctgttgacatcctcttcagcaaggtattgaggccaccatgttacgaactgacccttccatgccacgcacttctctgatgcgaagccggctggagggtggagggtgggtaggggactgggttggagaagatttcctggggaccatggggcaaatggggcagcctgcagctctgggactcggggacaaaggactctgctctgggtgaggttttgtttcattatttctttgaggctgaagtacagggcccagggaggcactgtgccctcttgtagaggcctcgcagtcaggcccatgtggaggtgtggtggccctcaaagtccatggctccattccagagcagtgcctgggccactgggctcccaggagatgcccggcctgcgcttctagtacctccctctgactgtgtccccactgctgttgcagaccccacaggaggattacgtggaggctgcagtgaagcagtccttgcaggtgcacctgtcgggggcccctggagacatccttatcttcatgcctggccaagaggacattgaggtgcgtgccttggtcacgactgtgatgagcgggtgtgtcttgcatatgagaggttagggttccagtgtctcacagctcctccctgggctctcaggtgacctcagaccagattgtggagcatctggaggaactggagaacgcgcctgccctggctgtgctgcccatctactctcagctgccttctgacctccaggccaaaatcttccagaaggtgtgtcagcaggaatgtccaggagtggctcttggagttctctaaaggaagcgagaggggatgtgactgtcctggcagggggtgggctaggaggtaggcttttccccctcgcggagcctttcctgtctcgagggactcatttttcccttcctgtatgtcctgctctaggctccagatggcgttcggaagtgcatcgttgccaccaatattgccgagacgtctctcactgttgacggcatcatgtttgttatcgattctggttattgcaaattaaaggtaagagaagacatgggaggcaaggcctgggtgttcaccagaagctaacttagctgcggggtgggaagccagggcctcgctcctggccctgggatgtggggagcgcgtggaagtggtggtggtggtgggaggctcacattgactcactgtgcttggtttgtttaacccttgtaatactcgatgaggtagataatttaacagtagagctcagagagctggtgtttgtggggaagacttcttcaggtgttcatgagaacatttctagagcctcctggctcttcctctgccatgtgtagcaaccagggcttgcctttgtctcaggcctacttccactttcccctcactctgtccttcgtcagctctttgccgtcccc

SEQ ID NO: 83970 - DNA, 1093 bp, Homo sapiens
tgttagtcctttcatcctatgctactgagtggaaggaaggagtggctttccagggatttcagaggtctgaggccaacctacgtggatgtaggtacacatgcaggtaattacagcctgcctcccttcagagggtaggtctggacagatgatgccattggttctttttatttctattgttctctttccccattttctttctttcttttttccaattagagacagggtcttgctctgtcaccccaggctggagtgtggtggtgcaatcacagctcactgcagccttgatctcctgcactcaagtgaacctcccacctcagactcccaaggggctgagattgcaggcaggcaccaccacacctggctaatttgttcatattttgtagagatggggtcttgctatgttgcccaggctggtattgtgaactcctggcttcaagcgattcttctgtcttggcctcccaaactgttggcattataggtgtgagccactctgcctggctctcttccccttttttgttccaattaaaaaaattaatgtattcactatagagcgttagtgaatatagaaaaatatcaagaaaataaaacccagccatgattctagtcccaggcccattggttctagaaatgaaacagatggctgggtgtggtggctcatgcctgtaatcctggcactttgggaggccgaggcgggccgatcacaaggtcaggagtttgagaccaccatggccaatatggtgaaaccccatctctactaaaaatacaaaaatcagctgggcgtggtggcggatgcctgtagtcccagctactcgggaggctgaggcaggagaatcgcttaaatccgggaggcagaggttgggcaacagagtgagactctgtctaaaaaaaaaagaaatgaaacatgtaagaggctccagaagaagggctaaattggcagattggagttttgaataggtggaagtcagtgattcactgaagtagtgggtggggagaagaaatgagaatttcctccctccctgtgggatttcatctgtactggctgctgtggggtttccttgtggtgagaagatggggtcttctccccggcaggctc

SEQ ID NO: 83971 - DNA, 1119 bp, Homo sapiens
gacctgctgcagttccacttcatggacccgcccccggaggacaacatgctcaactctatgtatcagctctggatcctcggggccctggacaacacaggtgaggcggccccgggagcctcatgggtgctggcgcttgacttccttctttcctctactgtcccgtcaaatatccgggtttgctcatctctcctaggtggtctgacctctaccgggcggctgatggtggagttcccgctggaccctgccctgtccaagatgctcatcgtgtcctgtgacatgggctgcagctccgagatcctgctcatcgtttccatgctctcggtcccagccatcttctacaggcccaaggtggggcagcggctggctcccctctccccggagggctcgaggaagtgttggggaggggaatggcttctctctgtattactgaaatggaacagagggcagaatcagagtttctgaagaatgattttgctgttctcggttaagcaggttggggtaggggaaaggaagggctgggccagtggttctcagggaatgctttggaaatttgcaagagcattttttatcttctagtatggttgctcttgagccctcatgttttagagtagacctttttaaaaattattttaatttttctcaaattgtcagggcaacctattgacatgtttgaagttctatgtgtgggtaggtggtagtgttagaacctctgggatgtgctcagtgggcctggacccccctgtacttagagtgaaggttctttttcccttcctagggtcgagaggaggagagtgatcaaatccgggagaagttcgctgttcctgagagcgatcatttgacctacctgaatgtttacctgcagtggaagaacaataattactccaccatctggtgtaacgatcatttcatccatgctaaggccatgcggaaggtagagtggtggatgagcaggatgttgggatgaggggagggtcgagaggaaaggagggctccctcctggtgcctccgtctcctgccctaggtccgggaggtgcgagctcaactcaaggacatcatggtgcagcagcggatgagcctggcctcgtgtggcactgactgggacatcgtcaggaagtgcat

SEQ ID NO: 83972 - DNA, 1052 bp, Homo sapiens
acttgagtatgtgtctctgactaaaaggacttaaaattttaaatataacctctgtgccgttatcactcataaaaaaatgaatacttaatgtcacctaagtctccagtccgcatttggatttctccatttatctcaaagataacttcttatgatcgatttgcttgaattaggatccaggcattgcaactgcttatgtgtgttaactgtttcattctagaacaggctccaccccacgctttttttcatgacattgatttattggagcagccaggtcatttgtcctgtcgaatagtccatatgatgtatttgcctcattgcttgctcacagcggtgtttaacctgtgcctgtgtttcgtgcacttgctgtaagctggcgatgagtccaaccgctcaattagatcccggctgagctgcgtgtggcagagatgcctgcatgtggcactgtgaacctcctcttagatgccttcaggaggcatgtgaggtctggtggccccacctttgctgatgggaggatggatgaggggccccagtggtggcagcctgcctcttccctgataggtttccactgctcctccatcttgaggttttagcgtctgttgatggccattgcctagatccatatttagggttgcaaaatggtgctgggctttggcttaccccttttcgtagcataattctccccataccaggctcccttgcatcttatgcctgtctcttccagccagcaggtaatcacatcttccctgtttttctgtacttcctagcatagttgtgaacttgatttttcaaaaaagaaggaaatgtaagtacttcctggactgagggatgactgagttaggactgattgtccagtgtcttgagtcagtgaaaaaagcaggcctcagctgcagaagagaaggcggctttggtactggggcaggcagccatgtggagcactggcctggtggatgcagcacctggtttgtggcagggacttgggtgccgacgaggcctccttccttagtggtccccagtaggctcagccaggtctgtccctcttcaataggagaacc

SEQ ID NO: 83973 - DNA, 1023 bp, Homo sapiens
tttactgagcctctaagcctctctaccatctgacccaccattccagggtggctaccgagacaaaatggagctccaggccattggagccacagcgctgccttcctcagaaagcttgtattccttccaactctgaaacataaagtaatgggaaggactcatcttttccaatttaaaatcccctttctacaggcatatttttaaaatgttgagatcacgtgcagtctgggtgataacatgattcacatgaagttcactataaaacttttagggaggtaagcatttcctagcctcctttgctattgttacttttagctacggtaatcgttggcacgttgagttcagctaaaagcagtgcgccgggaagcgatgattaacagtgtggactctcaaaccaaactacctggatttgaatcccagctatatcacatacaggcaatatggccttgggcaagtcagttaacctcctggggccttagctccatcatctgcaatatggaaataacaataatcacacccatggactgttgtgagtttcccagaaagtggttagatcaatgtaaatgcgcattacaaaggccgtatgcatttcagtgcattgttcctgatggtgagctgccagcagtatcaggagtgacttatctgtggagctgccctcctggaatgctgatgtcatggccacgagtgagcatcccagtggttcctccaaatcttggctcacctacaaaagttgtaaagaggtgcaggtcacagaggctcctgaccagaaggtgcctttcattctattgtcagacattctatgaggactgtcacaggcatgatctcatttcaacttctcaccaacccataaaatgaaacagaggctcaaagagaccaagaaatttgcccaaggctcacagctagaatgtgagcccagatctacctgtacattttaactcatgcctctgcttctgtcctgtctctgccagaccttcccaagtcactctcactcacttccccagacccctggcccatttcccaatagca

SEQ ID NO: 83974 - DNA, 1124 bp, Homo sapiens
gctatacagtctatctgtatgggagagtcttggaggcttgactcttccagtatgatctagagaagtgttctcgaatagaaatgtaatggaagccacatacaaattttaaaattttctaatagctacctttaaaaaaaggtgaaattcattttaacaatatattttatttaactcaatatattccaaatattatatcaacatgttgtcaacattgtaaatttattaatgaaatattttactttctcttattcatagtaagtctttaaaacctgatgtgcatcttacccctacagcacatctcaagtcacaccagccacatttccaatgttaaatagccacatgtgaccaatggctaccatattagagagtacagctctaaacactttattgctcccccagatttgaatgcttctcctacggactggaacttacccactggtaagaccacttctcacccagcaaggtgtttctggtaccctttcccttccctgacctcatcttcatcagccttaccacttgaaaatgcccccaagcaatgcttctcaatgtttactgtgcataatactcaactgggaatcttgttaaaatgcatattctggttctgtaggtaaaggatggaacctgagattttgcatatttaagaagctcccaatgctactagtctaagaaccatactgaagaagcaaggattgaaaagaccactccaaagaagatgaccataactggaattgatggcctaccctcctctaaaaatctatcaggtctaatcccaaacttgccaaacatccctgttaggtcaccaccagaaataaaagcttctagaaaggcagcactgtccagtagaaatgtaatttaaaattttctagtagccacatttaaaataatttttaaaaagtgaaatcaattttagtaacatttctttaagccaaaatatcaaaaacattaaacaattaattaatataaaaattatttatttttaacttctattttaagttcaagggtacatgtacaggatgtgcaggtttgttacataggtcaacttgtgtcatggaggttggttgtacagatgatttcatcacccaggtattaagcctagtacccattagttatttttcctgcttctc

SEQ ID NO: 83975 - DNA, 1061 bp, Homo sapiens
tgagcttacattcttgtgggaatagaggagatagacaataaacaaataaagaagtaaaatatataatatgttagaaggtgacaagtgctataaaaaaaaattcaacagtttaaaattgtgcttttatctttttaattatatttaacaatgataatgcaaataatcttagtaacctcttataacaaaatactccaacctgggcaacaaagtgagactctgtctctatgaaaaattagctgagcatagtggcacgggcctatagtcccaactactcaggaggctgacctagaaggattgtttgagccccaggaggtcaaggctgcagcgagcagtgttgatggccctgcattccagaacaattatttggtattttctctagaaacacaattatttggttgtgtttggctagataagagaatgcaaaaaatgtcatcgtacaatgtaaaactgaaggtcccatagtggtttaaagaggattgatctgtaacatagcatgtggtagtaaaggcaacatgaacccaaatgaacactgctgtctttgttaccatcttgaatttgaaatagtcattgtattgcggagaccatatttttgtatgtgcctatttgaaacaattctgtggtgccaaataccctgttccaaatcccatcagattatttaatgcaaattgaaataataggaatatttaaacttacctttaaataaaagttctataatgttaacaatgacactgatacagtttggctgtgtccccactcaaatctcatcttgaattcccacatgttgtgggagggacccagtgggagataattgaatcatggggggcggtttcccccatactgttctcttggtagtgaacaagatctgatggttttatcaggggtttccacttttgcgtcttcctcattctctcattttttgcctgtcatcatccacataagatgtgacttgctccaccttgccttccagtatgattgtgaggctcccccagccacttggaactgtttaagtccaattaaacctctttcttttgtaagttgctcagtctcgggcatgtctttat

SEQ ID NO: 83976 - DNA, 1036 bp, Homo sapiens
gtgctgggtgatagaatgaatcacctatgtggagactgtttaagataatttttactgtacattaagattaaaggagatcagcaaactgcacactggcagaactaggtgacaagtagtcacgtagttttcttggctgttaacacctgggttgttttcaggagtgtatatcatatttaactattttttattgttattaggatgttgaagggaaaatccatttttatctaccaatacctgtttgcattgttggaacatggcttgggttaagactgaatttagccatccaaaattgctttttagtgtgtgcttaactgtgaatactaatgatatgtcccttgctaataagtaagtaatattttattctctctttttaaaataaggcttacctaaaacagatcttaaatctacttgtatttccaaagtattttgagaattccatttgacagcaaaatttaaaccaataaacacatttacactgctttttcttaatataagtcatttttaacctcttccttcagcggttatgggatattgcagtaaaatgctgagatcacctctctgtgttctccaaataccctgcttcctggccatgcacactgcctaagggttcaataagcaggttaattcttccttcagggttggcctgagggttaaggttcctgatgagccaagttgagcttacaagtaggaagaaagtgggcggataaagtgtacatgaatgatgggggagaaaaaccactcccatgcagctgaggtcacacagtgatctctattctattttacatgttttatgcgtttctattttcttgttgatgctttgttttcagcttatcttataactctattataacacagctctttcaacatctgacaaaggattgttaggaaaacattttccagtgttttcatccagctgctttggtgaaagttttggattctgttcttttttgcttttttgtttatcctgaacctgtttcttattttctgtttttatgaataagatgaaataagggagggaaaaattgtgataatatgg

SEQ ID NO: 83977 - DNA, 1031 bp, Homo sapiens
acatatgccattttggctgatgcactcaccccatggaacctattgtttaccaacagggcctaagaatccgtatctttttttgaggattaactctataaagcagatcttgtcccttcttaccatgtgtacatgggaattatcaaccttaaacctgtatctttttctgagaccctattgggaataagatagctccttctgtttcagtttacagagagaaacctgacattggcagtcattcttcagaaacaatagctttatcctgatatctggttttttcctaaggacaaataagcaggtacaggcttaccttaaagggcaaaatggagaaaacaaataaaaaccaaagaagaaaaatctatcgtcttcagttatctatggatatttgacttatccagttgttaacaattggcttttaggttcctaatacagctcctagaattacagttttagtctgtgctttttatttgcactgaagtgaatttatctgtgtcatattgagttgaaaactctgaagacacaagaaattggttctcaaacctactagtttactgtcttcattaacttaacatcttctttcataatagcactttaaatctaagccaagattgaaaaaaaaaaaataaaagaactggttttcaatcctgttactcattttgggtttatttgttgagactccacacagatgaatattagttgcccttgtggtttggaagtgcagaaatacataaactgagtcttagtatattccttcagaatagtgcaaaatagcaacaactttcagctgttgttttctgcagtagatttgttacctataagactgtaggtaaagatgttaacatcatggtttttactgtttgagttacaaaataataacccccaatttcagagttgggttttttctttaaagctgttagatttaaaaccttgttaaattttacatctattaaagtgtcttaatatacttacttttctccactgaaacttaaggaagactccaagtaacatttataataatatacgattgctctact

SEQ ID NO: 83978 - DNA, 1048 bp, Homo sapiens
gacctacttcaatataattcctattagtaactccattgaagtgttaaatgataaatcctttgaaattttttccttggataatcctaacttaaccatattatgaaaatagaaatagctctctaaggaggcacagcgtgtgtgcgtgtgtgagtgcacgcatgcgcatgtgtattagcatctagtctttatgaagagcagctactttgggcttccttttgtctcacagaatgttagttaaagctgcagttgacattttcctgcataatgcaaggatttatgagaacacctcttcatttcagggcatgtatataagatttaaatataatcacaagacttaaaagaaatgatccagtttcttattctaaagcagaaagacaacactactttatcccaccactaagtgtcacgatgagggtgacatgttccaattgtgataaatcttgtcagaaacaaaatagtttgtctctaaaatttaagagtatttacaccttagttttcagaatggaattgtctgcaaatataagcgatcgactaatggttgttctccatttaaagcaaagataactgtttatcttagctgattacagaccaccaaacctaaggatactttgtagatcattatagctgagaagggatataaaaaatgaacaccaacaaaattgcataaaggaaatggattcttatcatcattataaccaagtgtttgttactgactgccttctctcttctttttctccacccccacatctccctgtacatctttccatttcgggggaaactgtgaacatttttatgattttttttctctaattaagctccattctctgttaagtggacaatgacatgataacttagttggactaatgtagtgttacatggtggagattctttatcatgcctattgaggttctgcttttttaaaatctcttttagctgggaaagaattaattcataatttaccataatgttcaaaggtagggtagaagtttcttttttaaaaataaaccatgatattttcaacagcttaaattaggtgatttactttttg

SEQ ID NO: 83979 - DNA, 1041 bp, Homo sapiens
tctgattcacctttcttgtgaatagatattgaaaagaatgcaatctccaaatcaatagatacacaccatgtaccaaaggccgtgttaatttgctaattatgatttctttactaaataccacatctggcacaacagctacattcagtattactgtttggctaaaattacggtagttcattgttttctgccataattcatccagtttttgtagaaatctgacttgtgaattaaatggggatgagatgaggactacctgcctatattattcacaattctccagagaaacaaaaccaataagatgtgcatctataaagagatttattttaaggaattagctcctgtgattgtggagacttggccagtctaaaatctgattgaggagcccaataggctggagatacaagaaagagttgtaacgggagtctactgtagattcaggaagaattgatgtgcaaatgaggtctgaaagccgtaggagagagaattcctcttgcttcagggaaatcaagtttttgttctattcaggccttctcctgattggacaagacccacccacattatggagggcaacctacattactcagagctcacaaatttgaatgtaaatctcattcagtaactctctcagaaacatcctgaatagtgtttgatgaaatgtctaggcatcatggcccagacaagttgacatataaaattaaccattaatcctatatcctttacatttctgaaggtatgtctgatctctgcatatcctttagggatacaatgctattttttacttactatcttgggaatggatgggacatttttaggaactttactaatgaattatatttgctttgactccacatgtcagggcaccaaggtaagggttctaccaaccgctaatatgtccattctagttttgttgtttgtttttattatactttaagttttggtatacatgtgcagaacgtgcaggtttgttacataggtatacacgtgccatggtggtttgctgcacccatcaactcgtcatctacattaggtatttctcctaat

SEQ ID NO: 83980 - DNA, 1079 bp, Homo sapiens
caggttaaaatgtatgtacattttattggttttctctgtaatgtctgtttttctatttcaataattttcactcacatattctttcctctgctttcttagatttaaatttgtactttttaaaacttagatgattttaaacttttccccctaatgtaaacattaagagctatagattttccttcaaacactgttttagctgcacccttaatttttgatacgttgtatgtttattattcagttcaaagcattttataattgtggtttcttatttgtcctatatgttattaagaagcatattactgtaattacaaatacttggggcttttctaaatatctttttgtaattgatttccaatttgattctgttttggtcacaatacaaacaccgtattagatcagcttttaaagtttattgagactttaaaaaaattattgagatgcattagaagaattggtgaatgttttttctgcacttgaatgtatgttctgcagtttctcgatttactcttctagaacttaattaggtcaagttgattgttcaagtttctattccctccctccctcacttccttccttccacccttccatccatccatccatcctttttttgtttttacttattcatcttacataactgcaactttgtaccctttgatctacatactcttatttattctaatttcctcttccctgccctaccccttcccttggtaatcaccagtttactttttgtttctatgtattatatgtattttttccagattctacatatgaatgagatcatgcagtatttttctttctatgtctggcttatttcacttaatataatgtcctctgggttcatccccatgttgtcgtaaatggcaggatctcattttttaagactgaataatatttcattgtgtatgtatatatgtataccacaatttctttatccattcactcgtcagttgacactccagctgtttccatatcttgcctgttgtgcataaagctgtagtaagtgtaggagtgcagatatctttataaggtgatgatttcatttccttcgggtatccttcaaattaaattaaactaca

SEQ ID NO: 83981 - DNA, 1023 bp, Homo sapiens
tgctaagtaatgatggtatttataaaaagttgcttactttattccacatttggttttaagtttttttgtttcgttttgtttctaagagtcagtctctctatgtcgcccagcctggtgtcctcccacctaagcctctcaagtagctggaactacaggcctgcaccaccgcacctgactgaaaacactgattttttttcacttttctctccaaacttgtttttccatttttcttccagcctcttatagttcattttcatatattagtttttattactttgtaaaggcagtcgatttctttttgttctaatttatattttttcagaaattagattttaatcttgatattttttagttttgtttaatgcctacctattataaattagagatttctatgccttacttgtcaatgggaaatgttataccactattaagattaaaaagcatagtaatgaatatttttacagatgtatttgttgttcctccagaccaatatctaagcttcaatgcaaagctcagtttgattttagaaatatttcacatgttctcatacttccttatccaaacattctgaagagtttctatgcttttcatgtcctctgcctctcaactgtacttttatgacattaatgtccttagagttgtagtgttggactagttttccagaatctcatggtctttttaaaacttattttgattccatactgttagctttagatttttcccaagttcactaaatgggatccttcagggaggtgaaattgtagttcatgggaaaatcatgagacatcattcagtctgtgcttaagtatgcaacatggtccggcatttcggtgaggacaaatgaaatatctcttagcttcaaggtaaaaagtcgaccattctcttgatattccagtaaataccaagctacaaacaaccagacaccacaaggaaatgtagacattgtactacactatgagaaaagttcaaagatgggctattgtctttaatttacatgaagatttatgtgacagaaatgtatct

SEQ ID NO: 83982 - DNA, 1008 bp, Homo sapiens
tctacaaggtaaaaaaaaaaaaaaaattagttggaagtccagttgctaggtatatcttataaggcaaaaattctagtaattcttagtagctaatagactgaattctggtctgaggctattggtaataaaagatcaaagactcttttctttcatctataagacatgctttttctccagagccttcacagatactatggattaacttcaggtttggctaatttgaaggaaactccagtccagctttttattaacagataccataccaaatagttcctaccaaagggtcaatgtagttggataactctgaggggaaggcaaactatgttttaattatgaaaccattgatgatttggagttctaggtgagggccagttaatcttggtagaatccatggagaacattttccctgctctgcttattctgattacaattaaacagttttgtcttcctgtgtataaaattttaccagaagaaacaaaacccatacaacataatattcaaatgtgagaaaactgaaagcacaggccctgtgcttctcaaactggcatctagatatcattaccacacttcattcttcttaactgaggataaacattccacttcctaagagcatcactttcccttgatacttacaatgtaaaactttattttcatctggaaacaaaaatgcatatatcttgtagtagaaaaaaatattcttacataaaaatatgctgttaatatgcaatgattttctattgttttaaaataatctagtaaattttttaaatttttgttttaatttttattattatactattaattgttataaccacacaagcaagctctttggagtcctgaatactttctaaaagcataaagaggtactgaaatcataaagtttgacaactactagaaaaagactactccctaccaactaaactggcatttaaaaaaattcttacaaccttgttcatggacaatatctgtaacttcttgtttcagtttgatttttacagctggacgcag

SEQ ID NO: 83983 - DNA, 1016 bp, Homo sapiens
aaagggagtgacacatagctgcattcttagatatatataattatatatagcttcttaaacatgctcttcaaaaggttgttttttatcatagatacagacttgttaaatatgccccctccctcatccctgactccgatccttaacttaaagattctgagggccgggcgcggtggctcacgcctgtaatcccagcactttgggaggccgaggcgggcggatcacgaggtcaggagatcgagaccatcccggctaaaacggtgaaaccccgtctctactaaaaatacaaaaaattagccgggcgtagtggcgggcgcctgtagtcccagctacttgggaggctgaggcaggagaatggcatgaacccgggaggcggagcttgcagtgagccgagatcccgccactgcactccagcccgggcgacagagcgagactccgtctcaaaaaaaaaaaaaaaaaaaaaaaagattctgaatattgattgtctgagtcttatagtttttggactaaaagattctgactcattctgacagcactcacaagacactaatgtataactcagaaaacaaattattcaatataatataaaatgtatttgcccaggggattaaacactatatcctctaaacagcacattcccttcttttaagtaagccatagggtaagccaaaatattatcagtaaattgtcctgtacatgtggaaccagaacagggggctagttatgtggttcaaacagtgaaaggttctactctcttacaatcagaccgtgataggcagaataatgacccctctaacaaccttcgtgtcctaatccccataatctgattatatagcaagaagaattttgtagatgtgatttagtcagggatctttagatggggagattatgatgggttatctgggtaggcctaatctaatcacatgggtccttacaattagagaacctttttgtgatgaaaacgagatgaaactatggaagaaccagagaagcatcagcctgagaaggactcaactgat

SEQ ID NO: 83984 - DNA, 1061 bp, Homo sapiens
tccatccatgtgtgctgagctgttcaagtcacagccccaaactcagtgtttttcagtaatgttttgtcagagaaaggtctgtcctttttggtgagattgaaatgagtgatatgctttcgacactattggcaagtggctttcacggtccatggcagatctaatgagttacacctgcttgcttggaaaattcagcgttcagtggtctgaaaggatccctggaatatgggctttagtgcctgcatgcattaaaacaacaacgacaacagtaacaacacaaacttataaatacactataaattgctttgtaagctattttgtaacctaacattcaaaggtttttagtttcaactgcaataattggtttttgcagaaacctggtaaaatgaatattatgaactatttgacaaaactagttttgcatcagacaatgaatttatgatatgtttgttctacaaagtcagttgtatattcatatttaagagtaactaaattatataaaactgctttctacagtgtcgattatgtacactaatcttttctggggccgtcacccttctttctgcctatacaactaggcataccatgaaatgggaataaattgttatgcatgaaagtatataacagagtatgctagatttgtggttcagtagaccatctagtgtataagcacagttttacccaaggatcagggttgcaacttcacttatttctgttattccaatatggagagtgatctcttatatttataattctcatgtagaaaagtaactagactattttgtctgaattcgtgtgaggtaagtgttccatctcaaagtcgaaggaaaccctgtttatggtatcttattaatctaattaaactgctttactatatcagttttaagaaagttttctcttgaaatggcttgattattcagggagacatttgggggttatataggtgattatttttatatcaactataagaatggctcaagcaaaacatttcctgacatttgtaagcaaaactgcctacctttgaaagccggtttttgctttcctatgaaaaaggggggctgtca

SEQ ID NO: 83985 - DNA, 1050 bp, Homo sapiens
tgtatttttcacaaactactttgtgactatgatatgcatgagttgtggtttggtagatcttttcaggaacaaatcattatcagggctatttaaaaactactttcttggctgggcctggtggctcacacttgtaatcgcagcactttgggagtccaaggcaggaggattgattgagcccaggaattcaagaccagccatatcctgtttctgcaaagaatattcaaaaaaattagccaggcatggtagcacacacctgtagtccttgctcttcaggcaggaggattgcttgagtccagggatttgaggctgcagtgagctacgattttacaattgcattccagctgggtgacagaataagaccttgtctctaaacacacacacacacgcacatacacaaacccaaaaaacctctcctaagtcattggaatattattagaaactccattacgaaataatagacctaaatgtagtgaaacatgttccattgctctagtatgtctaactggaatctatccttaaacagtttagcttggaaagctgaaaaacaagtgtgaaacttgatcaaatgggaatctgaagtatagcttttcttggagactaagttcttggggcagttgactagaggacatgatgtttcttgatcacaaagcttttttgatgacaaagattcacatattgtaagtgtacagtttgatgaatttttataacctaaagatacctatgtaactagcaccttgatcaagaaacaaaacataactgctactctttctcttagtccttgcatctaaactaaacatcgggctctatccacctagctaaattttagttgagtattatgtaatttagatttaaaaactatgtgaagagcaagactacttagtatttatgcaaaatatccaggtagttatattattttcatctttggcatactaactatggcatactactattcaatttaattctacagaattttaaatgtctagtatttcattaattggctttgtgattgctgaaaaaagacctagactgttttctgagtgctatcctgat

SEQ ID NO: 83986 - DNA, 1045 bp, Homo sapiens
aaaagaaaacatttccaccaaagaatacaggaataggcaactgccaccttcaaagtacttgtaagtttttatctgtacagcaatactattagcaatagtaataatatttattgggaattaattttgtgctactgtattgtactaagcattttatgtacattgtgtcattcaatactcatgaaaacactgaggtaggtactattatccccattttacatactggtaaatagaaaattaatgaggctaagtaatttatctcaaggttacattcttgataagtggtaagctgagaatacctcagagattttcctcatatttacaaatagaataattgtcacaggttcctctgataacacttagtgaggtgaatatgatttaaacatgagactttaggaaggagtgcatctgatgacttgtccaaaatggcagtttgtaagttctcagatttgatcactgccagttacatatattaatgatatggtcataaataatagcttttggaaaattttacaacaccacatgttttctgaagagtgagtaaatgcattttaagttttagagaagcattccttttttattttattttatttttttgagactgagtctggctctgtcgcccgggctggagtgcagtggtgccatcttggctcactgcaagctccgcctcctgggttcacgctattctcctgtctcagcctcccgagtagctgggactgcaggcgcctgccaccatgcccagctaattttttgtatgtttagtggcgatggcgtttcaccatgttagccaggatggtctcgatcttctgacctcgtgatccgcctgcctcagcctcccaaagtgcagggattacaggcgtgagccactgcgcccggcctagaaaaacattctttagagttggggatgtgaatgggtaagggagagagtgtgtgtgtgtgtgtttgtgtgtgtgtgcacatacacatgttcatgcatctgttggtagctgtagattagggtgactgtctcagtttgcccaggcttgaatttctggatcatggaactttc

SEQ ID NO: 83987 - DNA, 1048 bp, Homo sapiens
cccctgcagctccggccgcccttttttgtttaactccgcgcccctccagctccggccgcccttttcgtcgctctcccctcgcggtcgctcacccctgagatccctggttccactgagacgctcagcttcattcggcaactcgcggacaccaagcgccacaaattcaaatacgagatctagagacgctgggtctcaaacgtctcccagagtgaaagacagaggaaccaatcgaggctcggctgacctcagacgtctaaggcgataggcgttgctaagaaaagggggtgggacgatacccagttgccaagacgacggcttccgggtgggcggcttgaggtggcttccggccgccaggcgagactccgcgggaaaactccctgctagagagactaggagatttggggctgcggccgtttcctccggagcacccacgggactgtgtgctggggtccctccaccggctgtgtcctttattcttctttctcacccaacgatttacctgaacggttataaagtgcacgttatttccctaaggtaagcgtgtggtagcgcctcctcctcctccaacaggggggtaacagaaacctgctgtcaactttgttacccaacataactgtacttaaccacaaaaagttgaaattttggatctttaaacattcaataacctcttgctgtgtgaggttttttaactgcactacatacattttgtagtctttaaccattgaatgcgatttaagtttacaatgaaatttaacgttctggttgtttctgaccccaaatttcatctgaaccagttaatggacgaagaactgaaattttattttctgtgacagtctcataggttctcagacttaagttcttaatcgcccataaatctgaaggcaggtgttaaagatgagcaggtgatttgagcccagtccatgccaacactcaaactaattcagctgagactcctttcgttaggagcattattttaattttaaaaattttaaaccgaatggtaagcatggctgctttagtttcagttgtgtctcatttgatgatgata

SEQ ID NO: 83988 - DNA, 1071 bp, Homo sapiens
aatacaggttccattggtcacctttcgggcttctttccccagtgctgaagccactcatcgactttgcaaaagactggagcattccaagatctgaaaatggattttttttctttttttcttttttagccgggactattttatttttatgaatttgtttttagtttaatgaaatagtagatcctgaaatgttgtacatatttctaactaggctgatgcacagtgcaaattccttttttaattgttttttttaagtagaaatactaaagaaagaataccatctaactattcataccagtatccagttgtagcataaggtgtcaaaagcaagtacgcaaaacatttactgttttaacaagctatttccttttaacaagaaatcttgtatttcttcctgtgtttgagatgaacatttttaaattttaaagttgtacagttttttgttttccattattttatcttgtttgtaactctatgaaatatatatatatatattttttgccatttaactgttgtatgttactctgtgtctgtaccatatagaaaaaaaattgtttttgtttttggttctctatgtgatatcagttaacaatgtaacactagctttacctgtcaaattctgctaggtcttctctgaaaacgttgtttttaaaaatgatattgcttggtaatagtgcaatttctatccttttccctcccccctcaacttttaagttcttttctttataattttgctgccccctccctgatggtttgggtttttgtttttgtttttgtttttttttttcatggagctactatgccatcctccctctgtgaggcagagtgactgtcagtgttttgttatgccatgccttgagctgtgggtgtttggcgacaataaggtggttgaatagattggctgagcacacttccacccacctagtgttctcagaggggttatgtgattgtttcaacctggagtgggttgcacccttaatgctttcctctgcaactaaaccgcccacatatatgttcattgaaaaaagtaagaataattctcagcactaacccagaagtagcaaagcagtcagt

SEQ ID NO: 83989 - DNA, 1038 bp, Homo sapiens
taaagacaccattggaagccagctggacaaggagaaagaatactttgacccagccaccgtacgtcagttgatggctcaacaagagttggaccggattaaaaaggccaacgaggtccttggactggcagctcagcagcaagggatgtttgacaacacccctcttcaggcccttaaccttcctacagcatatccagcgctccagggcattcctcctgtgttgctcccgggcctcaacagcccctccttgccaggctttactccatccaacacaggtgggttctgctctaggcgattgtttcagggctaaatagctgcccagtcagcattctgttatgtggataccacccaaaccctctgagtgctgggcagatgggaagcttacctttctagttctttaaaagcaacaagacttcagttcgttcctgttgagtctcccaagtactggtgtgtcagggatgggacctcctggtcggaacagtctcctttgaaaccactcttatcccctataatagggaaaaacttgagggtcctggcatactaatttctggaatatttcaagaaacaagtttttatcatagaccctttcattcagtccttgtggaaatgctgatcctgtctagatatttgttgtaaatataagacacctgagttagtcctagctaattctggattatgccctaagaaaactggtccaagagcatttaaatcaactctttgccctcacctggggtccctgccttcttgagagagctacggtggcaaaagaactgctatcagggccgggtgcagtggttcatgcctgtaatcccagcactttgggaggccgaggcgggcagatcacaaggtcaggaaatcgagaccagcctggccaacatggtgaaaccccatctctactaaaaatacaaaaattacccaagtgtggtggtatgcacctatagtcccagctattcgggaggctgaggcaggagaatcgcttgaaccctggaggcagacagtggtttgagattgtgccactgcactccagcctgggtgacacag

SEQ ID NO: 83990 - DNA, 1036 bp, Homo sapiens
caagtctggtttcagaacacccgagctcgggaaaggaaaggacagttccgggctgtaggcccagcgcaggcccacaggagatgccctttttgcagagcgctcttcaaagccaagactgctcttgaggctcatatccggtcccgtcactggcatgaagccaagagagctggctacaacctaactctgtctgcgatgctcttagactgtgatgggggactccagatgaaaggagatatttttgacggaactagcttttcccacctacccccaagcagtagtgatggtcagggtgtccccctctcacctgtgagtaaaaccatggaattgtcacccagaactcttctaagcccttcctccattaaggtggaagggattgaagactttgaaagcccctccatgtcctcagttaatctaaactttgaccaaactaagctggacaacgatgactgttcctctgtcaacacagcaatcacagataccacaactggagacgagggcaacgcagataacgacagtgcaacgggaatagcaactgaaaccaaatcctcttctgcacccaacgaagggttgaccaaagcggccatgatggcaatgtctgagtatgaagatcggttgtcatctggtctggtcagcccggccccgagcttttatagcaaggaatatgacaatgaaggtacagtggactacagtgaaacctcaagccttgcagatccctgctccccgagtcctggtgcgagtggatctgcaggcaaatctggtgacagcggagatcggcctgggcagaaacgttttcgcactcaaatgaccaatctgcagctgaaggtcctcaagtcatgctttaatgactacaggacacccactatgctagaatgtgaggtcctgggcaatgacattggactgccaaagagagtcgttcaggtctggttccagaatgcccgggcaaaagaaaagaagtccaagttaagcatggccaagcattttggtataaaccaaacgagttatgagggacccaaaacagagtgcactttgtgtggca

SEQ ID NO: 83991 - DNA, 1027 bp, Homo sapiens
ctgggacgttggtcagaagttccctctgatgttgtataccttgggcagagactccagaagaaatcgtggcttaagtgagtcacaaaaaaaggcttgtttgtgcttgatgtcagcttgtaaagggttacaaatgttgttttcctggaaaatctgccagcatgtctgcgtgtccctagccttccctttgttctcttcttttcttcttaccctttccttcactcttactcccctcctcctcttgcctgaatacgttctgaaaacagtactacaatgctccctgcttcaagattacagtgtactttactaggtatgatttaattagggcccttattatgttttcagcagcttaaggtgggcctttcaacttatctacctaattggttgcacaagaagtttcacagcccatgacaaaacattgtcagtgatcaaagtcaaaattctgcataaaggaaaaatattaataagaagattattcttcaagtgtgcactgctaattatgtccagaatgtaaccgtagaaacacttttgactgatgtgagctttgtctaataaacatgaatcttcagtgagctatgaaaagtgagacacctctagctttacactggtgaaggctaattttgcttattaaataatttttaaacatttcctattttgtgtcgctttcctctccatttgactctccttgctcttgctcctcaggtgaccacccctgagatggtgatgccaagcagcatgttcctcccagcagctgttccagatcgagatgggaattccaatttggaagaggcaggaaagcagcctggtcagtatcattattcttgaccccaagaaattgaaacaagatggaatgccaaaatgttcatggagaaaggttttcaggaattctttacaatactcttaaggtgaatgtaactgatcaggagatgaggggcactgtcatcagctactttatactctgcttcttggcatgtatttgtatattactcacatggtttaaagtgagagaaaattagtatgagaaccagtg

SEQ ID NO: 83992 - DNA, 1045 bp, Homo sapiens
tagaaaagagaaattagagaggtagtacaatagttcccagatatcgggagagatacgcagggcgggtgatgtaccactgttcagtgtttcctgggagacacagagagggccatactgcagccgaatgaatgggcagcacaccaggtggattctactgtccactgtgcttagcattccccttcagactggcctgtgtggtgtccagaagcctaaactccagaaaacaatgagggtcaaacaccctaggcgatgtgtaaggtaggaccgaggagtggaggatggacatctgtgctcaaaggaaggccctgaatgtagtgggggacgtatcctcctgtggggctttgcctggaccaagatcccagttttgcctcaacgttgaatgagagctaaacaaatggttcacacggcaattaaacagatcgccaggtgagctggggaaaaggatttcacaaacacagtttgaagactgggtgaccttctgagccatctgtcctttgttgtcacgatttgggtgcttgatttctaatcctggctctgccactcattagctgtgtgaccccactcaaggtaccttgacctttctgtgcctcattttcctcagatgagatgaagattaaaaatagtacctatttctgtaggattgctacgaggattatttgactatgggaagctccgaacagtgcttggcatgttgtaagctctatgtaagttgtttgtttgtttaatggtttagtgatatataagatgaggaaaactggtagcagtttctctttgggtcctctgttgcaaggcagcatgtggctcctgggaattttgagctgagggagaagcaacatacaagcatttaatgggatcgtgcgaatgatgtttggtgcgtatgtttcgtgcattttgtgtgctaagggcactacggaaataataaacaggagccaccacttgcaaagtccctactctatgtgctgccttatgctagccactctatatgtgcctctctaatccttccaaccagtttagggcagcctttgttgagagcagttcaattaaa

SEQ ID NO: 83993 - DNA, 1049 bp, Homo sapiens
tgagatggtgccactgcactccagcctgggcaacagggcaagaccttgtctcaaaaaaagaaaaaagaaaaaaaaaacaaaaaaacaagttgctcacttatgaaagtttggggacgtctgaagtaaggatttttctgtcagcgggtttctagtgcttccgccaactgcagtgtgtacacggaaggatctcagcatcccagattatttctttaaaatgtaattgtgtgctacaaatttctatagatcccttatttctgtgtcaagtaccaactctttgtcactaaactgcaccttctgcccgatccctgatgactttgtcatctcatggcaacattttctttctcttaggtttcatgtatttgttgttttcgaatattcccaccactaaacaggatggggtgtgagtctagaatttaaattacttttgttcaagtgtttgtcttgatgactatcactgtgtgtttttgggccttgagagatattgctgtatacatttgtggaatggaatgtattgcttttcaagggttgctagcctgttcttaggtctgagaaacacctcacaggaggaaaagctaaatagatacacagcgagtcctgaggctgagtctacagggcagtttagtagctgtgggagatttgaggagcgctgctgtagctaaaatcattgtgaaagggatgtgggggtggcattttgttaaaccctagcaaaagaccgtttcattgtacaggatccaaactttaaaaaaacagaggctttggatccaactactggcatcactttctaagtttctaaagaggaggaggatccaatattctttctccccttggacacagaatagctgtacaaggtgcctattaaaaatgacaagttagcaattccatctgctttttcccccattaatggaggaaagctcttgaacgtaaacctttggattttctctgtacctcagcttcctgcttcactttctttgcagtttcccaggaaatgtcaactgaaacatgttgcttctgttgcctgtttgtttcaaactgatgcatgcttggggact

SEQ ID NO: 83994 - DNA, 1126 bp, Homo sapiens
gggaggcggaggttgcagtgagcagagcttgcaccactgcagtccagcctgggcgacagagtgagactccatcttaaaaaaaaaaaagtgaaattggaatcaaaatgtgcagaacccttgtggtatttgggagctccccagagaggaatttagacaccattatattaatactgtaggaactctagtcagaagtacactgggacttttgccgttgcaagaacccaagagtactctctctggaagactcgccgtggtgttgagtggctgatgaagagccccttgtcggggtatctccctgtcacccacattgggtgacctttgcatagaatgtgcaatcctgtttcatgtaaagtcacttcgtggattgcagaggtcttggcctccccttggaggcctcttgtccctcttcttcctggtatctgttggtccccaccctgagagtgtaacatctggctggggcatctctctctggtccctgccctgtctgctcaggactctcctctcctccgtactgtgaacatggaagtgatgacgttccatgtggaaaaaaatggcactttctatttataagtgaaaggaaatatttctgctgtttatcctagaaaccccgagccatgctttcagacgctgagaattatgtccctgcaccgcagcctcagtcaggctcctgggccctgtcaccacttggcccaaagctactttctccccccaaccccatctgcttcccaccagttttcgttgcttgcaccccctccccttgagtcaaatgttcctgcttgcagagtttattaatagctctagcatcattgagtagtgatttttcttccttttttgatttattattttttttaattttaggcttttagaaacaaatctggaataatatttcaagctgctcccatctggggcaaactccagtcaatcctttgagcccaaagcacatcttagggggaggcatcctccacgtttcctcccaaagctgtgggcctggcgagcccggcctctttgctctggtgttaatgccctggtgatcactggtcatcagtagtccagctctaccatggtccatggttctgtggacccaccctatatccccagttccttgagcctcctctaatcaatgtcc

SEQ ID NO: 83995 - DNA, 1172 bp, Homo sapiens
acctgcgggtgtcagtgtggagttctccttactggctgccctactggcagaatggccttgctttttgaggtctgtgtacttttggtgggtgctgtggagtgaaaactgatcaatcttcctgtctgtatttataagccaggccccactcacttgacacaatccatttcaccaagggtggagatggcccaggctgttcctgcaacatggtttagtagaaggtggccaccttctgtcttcaaagctgatgtgtatagggaagaactaatttcacttcattttgcagctcttgagcattgaggttgatgattgctgggagccacagaggagttttccatgtgctaggaagattagacattgaagtctcccctaggaatctaagcccttggacctacacgtacctctgtctgccctgggcagctgtctccaggtggtgtaaaagcagcaggtgaaaaagtagattgctttcttctcctcccagaggtggtttgggattttgaaggcatctaagctcctgcgtatccctcttagttaaaagaggcacagagtaagctagctgcacctggcctgtgctttgatagagacgcagctcttcacttgggaacaccggaagcctcgtgagccccccaggtcttgcatgacactttgaataatctcttctgttcagccatgagtagtacgatgttactgatggcttgtggtctgaccacgtgcgtgctcattgtcagtctcattggcttttcctttgttctagaacatggcaggggagctgcagacagacaggtacagcgcctagctttacagttacatgcacgctgtgtcatcagtttctttccccccttcatagcagccagagctctaaacactcattgctaaactaaccccaaggcgctggtgaagtgttggactatacagggagccaaactaacttttatgtaattgtttaattaaaaccttggttttctaattgcagtctaaacacaagcgccttttgttaatgaaaggcaacctctgtgcttggtgttctcatacacggcctttcttttccactgttttcaactagaaaatcgacatttaagttcccaccacggggaaggtggcagttggcgtttcttgccattgggggagatgttccacaatcccttttgtcagtccttgtcaacaacttatctagg

SEQ ID NO: 83996 - DNA, 1006 bp, Homo sapiens
gaaactgaatcatgtatcttgtaggatccctgcagtcgggatttggatgttttgatgattatagccccacagcattgttgaacatgttcttctgtacccctgtgttttctgtgaactgatagttaaatctagacacttgatctcatttaggagcagttttactttttctccatggctgcttcatgtgtgttagtcagtgtatctgatcaggagatacatgtctcactgattgttttgtgatgttattagccattgatgatcattgcccaaatctcctatttatttggagctggcaaaatgatgatattctcattctattatttcttcacttattagctgggctactccttatcaagggaaagctttcctcattaaatatttgtttaccctgaatactgcaaaggcaggttaaatgctaaatctttaaggtggtaacatttaggctgtgacctgacttgaccttgaagaaggcagggaacacagcaggcttagggcctggttggtgcaaaggccctggggcagaaggtaggccagtgcaattggtgtcctagggagggctgaggtgggtggcatctaccaccagacccacctttgtaagcagggtcctaagtttggggtttcagtgctatgggaaacccttggaggtattcagcagtggcctaacatgattgatttcccttgaagttgcatggtatacagtgtgtcacacagttcctccccacagagcatatggtctcagggagcagaggacaccgacaatgaaacagaaaattccagttctatctattctttttattttgagatggagtcctgctctgttgcccaggctagagtgcagtggcatgatcttgactcattgcagcctctgcctcccgggttcaagcaattctcgtgcctcagcctccctagtagttgggattacaagctcatgccaccacacccggctaatttttgtatttttagtagaggtgggatttcaccttgttggccagactggtcttgaact

SEQ ID NO: 83997 - DNA, 1030 bp, Homo sapiens
tactgtgttagccaggatggtctcgatctcctgaccccgtgatctgtctgcctctgcctcccaaagtgctgggattacaggcgtgagccaccgtgcccagccgtttttttttcttttttctttttttttaaagacagggtctagctctgtagctctgtcacccaggctggagtgcaatggcgagatcttggctcactgcaacctccacctcctgggctcaagtgatcctcccacctcagcctcctgagtacctgggactacaggcatgcatcaccacatctggctagtttttgtattttttgtagagatgatgtctcaccacattgcccaggctggccttgaactcctgggctcaagcaatctgcccgctttggcctcccaaagtgctgggattacatctcacctggcccatattctttaatctagcattgttcctctgtcttgcccttttatgaccttgacatatttgaagagtgtaggtcagctgttttgtcaagtatccttcaactgggttcatgtgatgcttccttatgattagaatcaggctgtgtattttggtagaaatgccaaaaaagaaagcgtgttctttctcgtgtattgtttcatgagatacatgatattgatttgtctcttgattgcgggcatcagctttggtcagttagttatggtggttccttctggggttatccattctgaagttactatttttccctttgtaattaatgagaatctagtgaggatatgcttggagatgatttaataaggaattgaactgtttaaatgagattgttttgaaaaaatggctaataaaaatcaatagggagaaatatttggcaaatgaaagtggtggtcattaaggtttatttttagcctatactccccttcccggttttctagatgatcaggaaattcagcaggccagaactttagaaagactgggaagaattttctaaaatgtcactgatcactcatggtgtcaaacgaggaatggaggctttgggaagtggacaaagaaactattacagaataa

SEQ ID NO: 83998 - DNA, 1006 bp, Homo sapiens
gcctctaatctgagcactttgtgaggccgaggcgggtggatcacttgaggtcaggagtttgagacgagcctggccaacatagtgaaaccccttctctactaaaaatacaaaaaattagccagacatggtggcgcgtgcctgtagtctcaggtactccggaggctgaggcatgagaattgcttgaacccgggagacggaggttgcagtgagccaagatcaccccactgtgctccagcctggatgacacagtgagactctgtctcaaaaaaagcaaaacacaaatacctgaaaactcctatttttctcgtaatctcctaaacaaattgagaacctagagagtactttcacatgttgaattctgagtaaaaagaaagccttaaagaggggaataatatgttgattttggggctatttgtattggaggggaactgcaagtgctgataggagctctgttttcattgaacattttcctcaatatggaaacaataagtagtaaatgaaatttgcatatcatctgaaatatgcataatatatataattgcaatacttaagaatacaaaattatataattggactggggatgttaggaatcttattttaatttcaatttgtaattccttgaaattttttttttgttttttgtttttggagacagagtctcactctgttgcccaggctggagtgcaagtgcggtggcaggatctcggctaactgcaagctccgactcccgggttcatgccattctcctgcctcagcctccccagtagctgggactacaggcgcccaccagcacgcctggctaattttctgtatttttagtagagacacggtttcactgtgttagccagtgtggtcttcatctcgtgacctcgtgatctgcctgcctcagcctcccaaagtgttgggattacaggcgtgagccaccgcgcccagccaattccttaaaaaatttttaaaattttggccaggcttggtggttcacacctgtaatcctagcactttggga

SEQ ID NO: 83999 - DNA, 1363 bp, Homo sapiens
atcaacaggttaggcagccccctttcagaggaagagagacctgacacctctcctgtccaggacttctgtcccaggttggactggatgaccccagcagttgtggtgtgtaggtcttggtccttgtttttgaagctgtatcacaggctatgaagacagcagaaggtgggggaaaaaaaggttattcttttgtttcacaccactcagctatagatcacagaaacactccaaagtggctttaatgagttaggagggcatggtgtggtggcttacgccggcaatgccagcactttgggaggccgtggcaggaggatactgggagcccagaagtttgagtctaccctgggcaacacagcgagaccctgtctcaaaaaaaaaaagaggtttcatttttccttatataagcagccttgggaggagggcagtcaggtgcagaagtgaaggttccactgagtcagcagacatccactttccttctatgtttccatgtagccattctcaccaagcgcttgttgcctcctcatggtctaaagatggctcctccaggccaggcgcggtggctcacgcctacaatctcagcactttgggaggccgaggcgggcagatcacgaggtcaggagatcgcatcctgactaacaccgtgaaaccccgtctccactaaaaatacaaaaaattagcctggtgtggtggcgggtgcctgtagtcccagccactcgggaggctgaggcaggagaatggcgtgaacccgggaggcggagtttgcagcgagccgagattgtgccactgcactccaggctgagcgacagagtgagactgtctcaaaaaaaaaaaaaaaaaaaaaaaaaaaatcaaaaaatcctccatctgagctccaggcacaagaaagtgaggctggtgagagtgcatgcgtcacgaaagaccacctgtttaaaagtttcctccaaagccccgcccacttgctttatcttacatctcattggctgggactgcatcatatgactgtcctcgggcacaacagacaacaggttttggctgagggtattgtgctttgaataaagtgagtgttctgttagcaaggaagtatgcttattacgaaggcaattagaaacatcagccatacgccttttaaaatataagaagattaagtaaactgtgttacgattatgtggtggaaatctgtgtagccattaagaataatgttcttgattaatatttaaggatatggaagcaagctccgtagactgaggggtgggtagcaagacccaaaaacacatataattgtcacagtttcctttaaaatatctatatgaagacagcactgattatggacaattttcgtcttcatactttctctgttttcaagatt

SEQ ID NO: 84000 - DNA, 1065 bp, Homo sapiens
ttggccgccagctgtgtgctaatagttaggcttctgtgcccatgtggccctgccatggcggagctctgcccttatgtcagtgggcaggccgagtcctgtggtaaattgtctttggttcagtgtgatggtctttgtcgttacacttttccacccctaccccacaatagacacaagcacacaagcctgctgggccttcctgttttaaaaatggcttggaaatacatctctcaaagacagtaactaaccaggtgaggttcctcttccaatccccacaatttatttttattggcttgagtgttttttctgcaagaccaagtagtctctggaattggttgggatttcgtctcggcatttcatacttacccacccacaggtagaaaccactcgtcatcactggccaatgcactgggccagagctctgagttgctggcatctgccatttgcttccctggtttaccagaagctcttgaaaaatggagagctctcagaggtgggtcatgtgtaggatcagcttccctgtttgcttatttaaaaggcatttctggctcctgggtgaaactgtagttaacttcattctatcaagtgccctgggctttgagaacacaggccctttgtgtttctgctgtcggcctttctccttctcctcctcctgttttctctcttactcgccttgtcctaagtactttttctttcatgtagacatagacctccaaattttacatgcatgtaattaaagttcaacaattctttattgacgacctattatatataaggctttttatgagttggagaacatagctgatcactgatctcctctgcactctcaatatggacacactgatgactagaccagctcaggcattggaaataattggacccggactcagtttacagagggtgcacgatcattcagaatttaagagacttgttttgcttggagcaaaaagcagtatcctccctttacagatacgtctttggcattcatagtagcgaatttctggggccagagaggtgcacacagcttgccaagtgataatgtggttttggtgacagcctttactgcaa

SEQ ID NO: 84001 - DNA, 1084 bp, Homo sapiens
tacatcgtgtgtcctgcccagtattaagagtagtcaatttgtggcctcaaagtctggtctgtaaaactgaactttagagaggaataaaataagtgcttgttataaaaatttcagttgtatttgggagtgattctgggtgtttcttgggtccatgctgcttgctgcttcaatgcgtcgagacctgctagtgggagcttgcctcgtttctacctccccatgtcatctccctgcagccacctttttccccacctccctccctccctccacccatgactccgccttccatagggacttcattgggtagaatcacctcctcttttctattttttcaattttccagtctcttgctctccacttagacacacaagacagtcacttacctctttagaaaccaaaactttccaagaaaagctctcctttcatcctaggccccacactgtctctacaacagaatcttccagattcttgagagaaccctgtgaactgctcacctctattccatgtctcaacctcctacaacccatttcctctgtcaccaagccactcttgggagggcgctgctgatctttgattgacacagcccaggacctgctgggcctgactgttttctttctgcaatgtttgaaattgttgcccagccctttcttgaagctcccttccccttcccttgccttcccttggcttccggggtgtttttctcttgtcctctgacttcccttgatagttctgcaagcctgactctggctggtggttctcagcctgccccatgtccctgggcacagggcactgtggcctggtcctcggctcccagcctcttgagcttttgtgtcctggtgctgccaaatgcctttgtacagcttcctggacaccactggtcccacctcccagatgctgagcttcgtggacatctcattggtcccacctcttgggcacctggctcaccactttctctgccacacttctttttcttcttaatggcagcttgtctaacggcctggccaagccagagacccaaggccactcctgatcctacagtctcctgcagtgccttctcagccattcagccatcatggatgtgtgcagt

SEQ ID NO: 84002 - DNA, 1050 bp, Homo sapiens
gggcgccgagccaggcactgcccccttttctctctgccccgtcctttctctccagactcctcgatccccttctgtacatgcagtgatcatttgctgcacgaagcattgggggaaggcgaggccacgccaactgtctccatcatgcttctcaccgtactgttaaggtgctttcatcagagaataagaatagccccaaagccaaatgaaagtgagattccctctgattgttttctggagtctttcttggctagcacccaagcatcccaaatccccgttcagtcctctgcccttttgcattgcgccgtcttcccacttagccctatgtatctccttcatgctgagcgatagtcgtgtctgatgccctttgaagaacaggaaagccgcaagcatttttcgccatggggtctaggaaggaagtaaccacgatcacatttctgtgaagcacttgtccaagttcctagaagctgcatctcctagaagcttcgttgatgacaccacccggttaccctccagctctctaagcatgatgtagggtgtggcgggagagggagagcagggtctgtaattcagaaatgagctccgtccttaagtgaatgaatgcctagatgttctgcgaggacactctgagtatctgagtttggttggattagcttttttttttttttttttttttttttgacaaggtctggctctgccattcaggctgtagaatagtggcgggatcacagttcactgtagccttgaactcctgggcccaagtgatcctcctgcctcagcccctcaagtggctaggaatacaggcatacaccaccatgcctggctaattattttattttttgtagatatggggggtctcactttcttacccaggctggtctcaaactactggcttcaagcaatcgtcccaccttggcctccaaaagtgctgagattacaggcatgagccaccttgcccagcctggatttgctttaaaagctaaaaaagttgttgtcttccacttgaggaagctggtctgcagatgacacacagacaggcagtttttcctctag

SEQ ID NO: 84003 - DNA, 1032 bp, Homo sapiens
gcctctaatgatgatatccagtttttgttatttatagaaaagtgtcctatccaatattcacattttgtgtgttaagtaaaatgctttcctataaagaaatctgaaattttctctagagctgtttgttcaaacttacttttcagtcatttttttcatgagtcccttttattgaaatgcctttgcgtcacacagtggacatcaggaggcctggttcggtcaccagcaacttggccagatgttgaagctgcccctggttcactccaggccttcttggtctcctcctgcactggttacttatatgtagaccatgaaaattcacagcacgtgagcattgctcacagtgcgtgggagaccctgtgtgcctatggtgtataggtcgctaatagggaatgcagagagtaggtttaaattgggactaatcatcaagaatgattaggagatgttctctagggtccccctcctggttctgtaaaaggcaaactagttagaaggttagaaatgtttatctactgatagtgtttggtttgtaacctgttaatgagtggagcatgttcccggactcaggatgagagcctccaaagcatagccagtctcttaggtcaacagtgatacccacattgccttggcagggccggcctgtgcactggggttgctgaaggggtttacacccacctgctgttccttttgagtctctcttcctgtcttctgtcgctggcagtatgctcttcctggaggatgactggacctttctaaccccttctgagctgacctctgtggagttttcttggtggcacgtgtcacaccggggcatccgtgtcttcctgctgcccctcagaatgagacagaagtctgggttctgggtggaaggcatccttgcattggctaccctgacttcttctcctcccatgggttcagaccccagccctcaggacccaagaggcacaggatttcccagatttccctgtgcagcttctgggagactgaaatcactgggaaggggtcttcgttccctgggtcaacaacatttgtgga

SEQ ID NO: 84004 - DNA, 1056 bp, Homo sapiens
aaatgtaggtgaagtcagacaatgatctggtttgaaatctgcattcttggtgctcctctgtgggtgtgctggggggaagtgggggtcttaggaagatagctacacattttacgtccgtaggtggtgcctggaggcctttgtcttgcactgagagcaaaaagcatacatcctttggggaccgtccccttcctccctcccgtcctgccttcccagcttggctgtgtgtttgaagctccggtgaaagtgtcatatggtttgcgtcgggattctggagccagttgcctcaaaccttgttttctcattattagactattttttttgtttgttttaagtacatacttctgccaccttctctccctaccttgatgccttcaaccaaaaaatgaaaggaaaggaatgttttcctgcaggtgatttagaaggtgtgcaaggccagatgttttggtgaattttagcagatttcgcctgcatgccctccttctcctggagcagctggaggcctgcggttcatttccgtggcttgatggttggtgctggtgggacgtgggtctctgcagctgggctgggaggctgcacgtgggcctgatgggttcttactgagagcctgggctgactctgacagctcttgtggccaccagttaacttcaagaggactccaggagatggaaagaccaaatagtttggggggcagggcttgtgctaggaccaagttcatccatcactgctgtgggaacgtatggctcatgattcaccagtggtgtgcggcatgaaagctgggtaccttgctgggaggtcccttgttctttcctccttccagaagcttcccacctatcttcatccacattcgtccaataggttgtatttcacactctcagccgatggctttaggcacaagctttgtgtgggtcactctggttagagcattttacacaccctcatgtcaagaagatcaggtcagtgatatcttttcactccactctttagacaccacataatggaactgaaatcttattagttgtgcctattgaaaaaaaaaagtttagtacttaaaaacca

SEQ ID NO: 84005 - DNA, 1045 bp, Homo sapiens
gcagtggcatggctttcggtgtgtcatctgacctcaccctgggccggagtcactgcccttgctgtcacgcatgctagtgcgtagattgctgtaagagtgaactttctgaaagcgtgagataatttttaatccagaaatgagagagggttgtgctaatctacaaaacctgatgatattgtcttcgttgcctggaatggtgtcgttttgatttttgtgtgatactaatgtttaaatcaggattaggttcaacctgtttttcttttgcacctcctggaagtagagtggagtaggggaatgccgcagggcccgaggcatccgggggaagcccccttaccttgtctctgggcctcaggttacttctgcaaagtgctcctgattgaaatccttgggatcttttgggttgaaacagtggccggctctggcctagcccctaatgctcacatgtccacgtcctaacatttaccgtcttgggatccccgtgattggctgacatagcaagaagcccagaggctccagtgaagcttgggaactgggctctttctgtccttagtgtcacatctgagccagcatggaaaaatgcagaaggcacttgtctctcaactgggactgagctccggggtccttaattcctcatccttctgctttcacatgtaaatgtatcactcctttctcagaggactacaccctggccccactctcaatcttctccacccgtagagatgtgggtgcccttgatcctcagaactaggagagcggctgtcactgacacatgcttgccctctgccctctcccacggctagtgtacagcctgcgtctgaggcgtgtgggttcagagctggcaccagctcttccacgtttatcttgcattcccagccaagtgacgtccatggtgagctctctgaaatgtgtgctgctttctacccggagggggcggggcacagaaagggcagttggaaatcagtgcacactcccaccatctcccagaatctgtttttcactttgatgtttttcttcacctgagagtcattggagtggaaatctgtca

SEQ ID NO: 84006 - DNA, 1439 bp, Homo sapiens
gggcgtcagggccaatgtggcagagggcggcaggaggctggacttcgctgacgaaagtgccaataaagacaatgccacagcaccagaaccaaatgaaagcacagagggtgacgatgggggcttcgttccccatcaccagcacgctggctccctctgcgagcttggggttggggagtgcccctcggggagtggcgtggagtgccccaaatgcgacacggtcctgggctcctcccgctcgctgggcggccacatgaccatgatgcattctcgtaactcgtgtaagacactcaagtgccccaagtgcaactggcactataagtaccagcagaccctggaggcacacatgaaggagaagcacccggagccggggggctcctgtgtctactgcaaaagcgggcagccccacccccggctggcacgaggcgagagctacacgtgtggttacaagcctttccgctgcgaggtgtgtaactactccacaactaccaaaggcaacctcagtattcatatgcagtctgacaagcatctcaacaacatgcagaacctgcagaatggagggggggagcaggtcttcagccacactgccggggcggcggcggcggcggtggctgcggcggcggcggcagccaatatcagtagctcctgcggggccccctcgccgaccaaaccaaaaaccaaacccacctggcggtgcgaggtgtgtgattatgagaccaacgtggccaggaacctccgcattcacatgaccagtgagaagcacatgcataacatgatgttactgcaacagaacatgacccagatccaacacaaccgccacctgggcctcggcagcctgccctcacccgccgaggccgagctctaccaatactacctggcccagaacatgaacctgcccaacctgaagatggacagtgctgcctcggacgcccagttcatgatgagcggattccagctggatcccgccgggcccatggccgccatgacgcctgctctaggtgaggatgactacgtgtttgtctgttttcatgataggagtttaaccagggagaatggtgaatagggtgagatagtcctgtggattcagttgactctggtcttctcgagtggtttttgtgtaaactggagtgtcttacaatcaagtattctcaagaatcccttgaactgtgtgtgtacatatggaagagtttatgcattcaaaagagatatgcttgtactctggctacgtggggccaggattaaaatgtgagtgtttcctctagttttctgttcccattctctctttctctgtctcttctttcaatttgaaaaatcactataatcacctaaaactttggggtttcatcgaatatttactgaaacttacaggaaactgtagctgaggcaatcatttcaataagaggactagggacagttacctcaatgatttaagtagagacaat

SEQ ID NO: 84007 - DNA, 1088 bp, Homo sapiens
tcgtgtgagctgtccataagtggtagggctgtggctgtgacctcgtagagggctggagagatgacgcgtccgttctccactgtggcccatcgaagctatgctggcaaagaatggaaattcccgctagtcttcaggggcagagcggtgacaattcgaagccgaagagggctgttcctggccttctttccccatatccctcgctcaggctgttgacccggccatgccacccctgtgtgctggaccgtgtggggcagtgtccccaggcccgccctccgccctgtgtctctgtgttgtggacagaagcctcttagagcgctccgtgcggtaggacctcagcctcggccctcctaacctctttcctttctctctctctttcccctctctccctcctccccccttgcctctgcccttcaggtccgagcctccgtactgggtgcaatgaaagctccacgcaggccttaccatggaaggctgtgactcgcccgtcgtctcggggaaggacaatgggtgcggtatccctcagcaccagcaatggactgaactcaacagcacccacctccctgacaaacccagtagcatggagcagtccacaggcgagagccacgggcccttggacagcctgagggcccccttcaatgagcgcctcgcggagagcaccgcgtcggccgggcccccctccgagcccgccagcaaggaggtcacctgcaacgaatgttcggcctcctttgccagcctccagacctacatggagcaccactgccccagcgcgcgccccccgccacccctgagagaggagagcgccagcgacaccggtgaggagggggacgaggagagtgacgtggagaacctggccggggagatcgtctaccagccggacggctccgcgtacattgtggagagcctgagccagctgacccagggcgggggcgcctgtgggagtggcagtggcagtgggcctctcccctcgcttttcctgaactctctccctggcgcggggggcaagcaaggggacccttcgtgtgctgcacccgtgtacccgcagatcatcaacactttccacatagcctcatccttcgggaaatggtttg

SEQ ID NO: 84008 - DNA, 1049 bp, Homo sapiens
tgttagtattcaaacttttttttttttttttagatggggtctctctctgtcacccaggatagagtgcagtggcacgatctcggctcactgcaagttgtgtctcccgggttcacgccattctcctgcctcagcctcctgagtagctgggactacaggcgcccgccaccacgcccggctaattttttttttttttttttgtatttttagtagagacggggtttcaccgtgttagccaggatggtctcgattacctggcctcgtgatctgcccgcctcggcctcccaaagtgctgggattacaggcgtgagccaccgctcccggaagtattcaaactttcatccattagtttgggtacccattgattcttccctgagtggatgatgatgaagatgatgatggttatcaaatggtgattttctaactccatactctttttctacgtttattagttgagtttctaccctgtggaagaactttcctttctcccacacttttttttttcttaaagtagggacttggggattgttatgttacacattgggttgcaatcacttactgtcacttaattttcttgctcacgttgtccctgatgtggccactgggagcccctccaacccactcctaggtcattttgacacatcttccttattctttgagcacaagtagatgctccgagctcatcttgaacttttcctgctccagcccaagaattggccatgtctccaaggagccccagttccattttgtggagaatggttacaccagacacgtcttaaactaagagaaaaaaagaaaaggaatggattcagggatcctcttttttcctatttcccccattgttttattaagcacctattacatgtcagatgtggaggactcagagatgaatagcacagggaacctgatctcatgccactcatagccttgtggtggggacagacaagcccatagataacacccaggaatgagaagaatcttcacctttcataggctgcctgatacagccccctggccatagcacaatccccttctccattcttgaagccaca

SEQ ID NO: 84009 - DNA, 1012 bp, Homo sapiens
taacaaagtaaatacccactgttgatgagggtgcaggaaaactggtgctcacacaccagtgcaagcaggagtggaaaggactttcctgggggacagtttggcacgttccagagggccttaaatgttcctagcatttgagtcagcaactctacttccagaaatgcatcctaaggcaatacagacacaacgtcatgagtaagagcctagttttagagtggtaagggaggcttacctactttcaaaggccgactaaactagcatgcagcttgggcaaggtacttaactctctaagcctcagtttcctcacctgtaaagtgggctgccgcaaggatcaaacaaaacaacatgttcagaaaaatagtgctcaaaaccatgcttgattcaaccaggtggacagtaatggagctactacttggtttgttgtttttgttgttgttgttatatgtgtacaaagatttaagggcccttattgcaaaatgaacagcaaaatattgggaattgtttaaatgtctaataatagcatttggtggaaattatgcaatgtgtataagatatagtatctatatagccattagttttaacttatgaagaatattgaatggcataggaaaaatttcatactaaattaggttaaaagggcggcctacataaacagcagcgtgatccgaggtaggtaaggaaaatctgtatctgtaaacgtgcagaggaaaaaagcccgaaaaactacctaccagtggttctctagctggtggaattgtcagtgattttaactttagctgctgagtctttttgtacatatccaaatttttaaaataatgaactcccacaactttaatcataagacatgatttaacataaatttgacatcatgacatgccagattgaaactgtaatgggccagatggcacgtttttacattgtctcctagcttttgccctataatcccaatagcaagagtggagagagagtagaaataggatcttggagagggactttgaggaaattgggagga

SEQ ID NO: 84010 - DNA, 1131 bp, Homo sapiens
gtaggcatccccttttcatgcctttaccaatgtctctaccttacagtggccattactgctttgttgagtgtccctttggcttcccactgcttgaaaagctctttatgccagcaggccagggatatctgaagaactcgctgtgcccgtgttggtgagaggctgtgtgtgtgtgtgtgtgtgtgtgtgtgtgtgtgttgccctatcagtgagcctccaaagggcaatccttgtttgttttgtcatggtgccagttccggagcctcgtgccagagcaagctgccgatggtgagcccaccgagtggttttcttcctgccgagaggaaaacacactccttgtttcagagtcattttggagataactgctgtgggaaactttccttcgcccaaggccagctctcacctcacccttacaggttttccccattgtcctgtgtgtgccatttggcggaatcattgcgaggacgtacctctgtccagcaacgttgaatggtgtttcccaggtgctctaattagctgccacaggcccagagaaaagcagctgtaccatgttcttcatttgttctcaggtagattcgatgtgaataaaagaaaacttaaggctcctggctgcttctgcctgcattccccaaactgccaagtgcaaagaatctgaccaagttcatttctcttgggtttgtgcagccttgaatgatagcacttacttctgttccaattagtgttctgctgactaagagctacctaataggaacttaggaaccatagtagactcatctttctattaaactagtgaacccggctttgatagcccttcccaggaagcgggaacccaggggttcacttgcatgtagttcatacctgattttttctccttccgagtagagtttttttttggagacaaagtcttactctgtcgcccaggctggagtgcagtgatttcgatctctgcttactgcaacctccacctcccaggttccagcaattctcatgcctcagctccccaagtaactgggattacaggcgcccaccactacgcctggctaatttttgtatttttagtgggtttctccatgttggccaggctagtcttgaactcctgacttcagatgatccacccgccttggcctcccaaag

SEQ ID NO: 84011 - DNA, 1022 bp, Homo sapiens
ctacattgatcacattttatgacttgagctggcaatttctcccctgggaccagacctaaccagggtgttcaggaagccattaaggaaaaatatgtaaccacactcattcccaaactcaattgttctgtcttagcagtgctcagataagagattttcaagcataattaatccaagtactatttaacgtggccttggtggttcttcttagcagctgttgacccaaacgcagcattgggagcagcaagaggagaaagaccatctgtgccatttttgctgagttggtgagggtgtaattattgcccacagtcacttggttctctgggtggcttctggaaggttaaggaagtgtgagctcttggatccttacacttcaagaagaaattttcctttgttattttagctaactatcagggccgctctttgaagtggccagtggtaagtatgtctcaatatggatttcttgattaaaagtaacagtgcaaataatgggctttgtaattaccatgtgggatggagaaggggccatgaagaaggggacatgtgatcacgtttcatgatcccctctcttccccctgtacacccctctctcctgattgtattgtattttattttgtttgagacagagtctcactctgtcttccagactggagtgcagtggcacgatcagctcactgcaacttctgcctcccgggttcaagtgattctgctgcctcagcctcctgagttagctgggatcacaggcgcctgccaccatgcccggctaagttttgtatttttagtatagagggtgtttcactatgttggccaggcttgtcttgaactcctgacctccagtgatccgcccacctcggcctcccaaagtgctgggattacaggtatgagccaccacacctggccctgatagggttttaagctttggaatttggaagtctttcaaacaaactcagagtgccagcagaatccatgcccccttcagtctgtctcaaagcccttgcgtcctggtggtagttcttgctgccggt

SEQ ID NO: 84012 - DNA, 1735 bp, Homo sapiens
aaattagctgggcatggtggtgtgcgcctgtggtcccagctactcaggaggctgaggcaggagagttgcttgaacctgggaggcggaggttgcagtgagccgagatcgtgccactgcactccagcctgggcaacaagagtgagactctgtctcaaaaaaaaaagaaaaaagaaaaaaaatccctggtccttttcttcttcccctttttcttctcacttcccctgaattccatctctcccctccaccctggggtgcatggtttgaaattgtgcacagattttcattgccccgcttttggggtcagtagaatttctgtgtgatatgctcatgctggtgtggcttttgctttttttttccctgagtcccctgcaggtagacaccaagtgaatcgtagagatcccagcctctcctcaagagctgtgtggagagtgatttttttccccccactgacccacgacagggaactaatagttggggaacaactcaaagtcgagtgcaggttgtacatagacttctaagaggtggttcatgttagttcctagactttatgcttcaattctaactcctttaagaataagactcccctctctgcagcattccccataatgcagcatgtgtcgtgagcatgcgaccctataaatggacactggtcacgtgaaagctgggctgagccacctccttgtgcagtgcagtgagtgtgtcaacccgccaaccctcagcacctcttcataagacctggggaggccagacgctgcgtctggaacctgctgcactgtgtgtggagtttataaagtcgctggtcccagcttaaagaggaaccaaggccaaagaaaccaggatgggaatgcaaagggcaggtgaggaagtgggaaaccagttgggttacctaagaggagccagtagaaatgaaatcatatcctttcttgtcaactcgacatcaaaggagaagaaatgcttatgtgtaggccggttcagtggttctgcaatttctcatcaccatttgtgggatggcatgcccttcatcccagagaaaaacatgttgggctgtcaggaaatggtcaacctaaaatatccctaaaatgcctttgatgggtgactcccatgtggactgaaggcgagacccccgtgggggttagaactcccggggcactggcggagttgaaccgaggtctcagggcctccgggttccccagcactgcagggtctcagggcggcggtgccacttgtccagccatgagatgccatggtcagtgtttttaaacacagtggacctcagtcagttcactgtgaccacaccttgttaatagaaggacagattctggcatcagagcaggtagactctggaatgaggcgagcagtaacccagataattgtgttgacatagtgaatcccagtggccacgtggagtgctgagtccatttctaccggggtcctgatcactgccttccagttccttcctttgcctgcctggacgctactgagagcaagctcgtaggagtctgtatcgacaggagggacgcgctgtgtatgttgtaggcactcaataaatattgtggcacgaatgaataaaaatcattagaacaaccagtgagtagttggataagtattatgcagaggagcttaaaactatgaccactggggctggaaccccagtagcctctgtgttattgaagtcaaagaaattggccccattcaccatccagatttgattccccgaatcttaccatggcttaac

SEQ ID NO: 84013 - DNA, 1098 bp, Homo sapiens
gcatgcctttatcctcttgacttttagaaagcttagagccaaatttgactcagtgtgtaggttattcttacatgcattttaagcttgatttttttggttcaaaatttcctccagttttgttttttctttcttcttttgcccgggcctcaatttatgctatgatgttgtattgtatattgtaaacaggatcaataaataactgtgtgctaggtattcttatggggccatcacctagtctgtaagcgcattgatttcggggtccatgtcttatatattctttgctttgttgaggcacagattaggtactcaataaaagcttcctgagagattttggttggacacattgccatcactggtccatgtaaaatttccattttaacagtgaagagttgtggggagcagtgttaatttcggactgtgccctggttcttctgtgatccatctttcctatggcgaaatggcctgtggaggtctggagagccacctggctggtggtgtttttcatagaacttgtctttttgaggagctccttgctgttttttccataggccttaggtaagcaaagcaatatttggcaggcaaacagttggagggatcttaactgctaaaacagtaaccattctgcgtattccgaagagaagcccacctgtggttccagccttggacacaggagcgctgttgttgggtgctgaggatgatggaggtggattagtcacaatctatcatctgctacatctgtaaaagagtaaagtagcccatcacatgtgctccacgctctcttaggactcaggtgtgagctctcctgttgacactcagctttcctttgctgcttgtgagagtttggcctgaccctcaggaaggtgttggtaccaactggttctctcctttaccttcctagacctctgcctcttcatctatccaggagagagagggagaagaacatctgtcctagagggttaggtgaggaccagagtctgggcatggtaagcacctagcacagtgcctggcacatagtaggcactcaataaatggtaagtgccttcaggatcatctctatgactggctggaggacatctttacaactgttgtatagtggcc

SEQ ID NO: 84014 - DNA, 1801 bp, Homo sapiens
atctttattagttttgtaaacagctttaggaagcgctgggagcatcttgcagggaccctgcaattatcataataaacagttttatcatctgcttggcaatcaatattgtggcttacactgctttagtatctcagtggtattgattaccttaacaactgtgctgcggtcagcttccattaacccctgctctgccggcagagcctgtgccttccctggttgggcggaagactgctctggtcacagcccaagcaagtgccagaatgtgacagctgctagtgagttcaacacagcttgtatctgagagcgtccaggagaagggagggttttaaccagggaatctggaagccagtacaactttttaaaggcgtctttttgtgtgtgtggagacagtgtattaaaacaattatagcagtgggatttcaactatgactcaggaatttgaatctcaagagcgaaaattccatttcttccctgccttgagtctgtccagtccaatgttgttctcagctctgcctcgccctccctggggaaaaattgacgtgtgtagaatttaattgaggacacccttatgcaactggctttcctgggactcccctcacatttgttttgtgatccacatttgacttttacagagaaaccacttatttggggacatctagttctaggattcaggttcccctggatgtctggagttacatagttgatcataagatgacagaatgctggagagagatgtcggtggcgcctgagatgatatcagcctcactggatagcccatctctggtgtggttcatgtttacgttccccttttctcctgatgagaaggtgacaaggacagtttaggagagcagctggagtccagtctccagacaaagccagtaggcagaccccatcatttcgagattacgtagtattaagtgacgtttctcagaaacttgggacaagatcttgcctgtgggggcgtgttggtgttcgtagtggtggtggtaggggtacgtgtgtgttggctttgtttttttcctcttttaattgctctattttgttttaaatatgagagatgtatgtgtatatgtgtataggtatatatgcatatttatataaatatatccatatgtatactatatacatgtacatgtatacatacatatgtaaacatgtaatgcatataaattttatatgtataaattctgttgaggcctggggtgagcttgcacacgatagtgaggtttagccccttcgccccagccttattgaagaccatcacggggtcctcaacattgcagacccagcaacacaggtgctgttcaacctaagggacattgacctataacattgacctctaagccatctaccacatctcctcagtgaatttttttttttttttttgagtcagagtcttgctctttggcccaggcaggagtggagtggtgtgatcgtggctccttgcagcctcaacctcttgagctcaagtgatcttcacacctcagcctcccaagtagctggattcacaggcgtgcaccaccatgtctggctaatttttaaggatttatagagacgaggtcgcactgtgttgcccaggctggtctcaaacttctgggctcaagtgatcctcccacctcagcctcccagagtactgggattataggcatgagccactgcacctggcctcaccagtgaatttttcaagtttgtgaacacaagtttcatggagtcactggggaatggaggaggaagaggcagtagatagactaggaggaaggttgaatcagggcagctgccaccttcctgactgtcttgccag

SEQ ID NO: 84015 - DNA, 2832 bp, Homo sapiens
ttttattttttgagacagggtctcactctgtcacccaggctggagtgcagtgacgcgatcttggttcactgcaacctccgcctcccgagtttaagcgattcttgtacctcagcctctcgagtagctgggattacaggcatgtgccgccacacccggctaatttttgtattttagtagtggcagggtttcgccatgttgctcaggctggtctcgaagtcctggcctcgagtgatccacctgcctcggactctcagagtactgggattacaggcatgagccactgcgcccagccattattgacccatttcaaggtgttagtttagtgcttctctgatatctgcctgttgggtacattattagacaaaaatcgtttaaagtgaggagaactggaaagaagagggtgctcagctcctccagggtggatcccttttaagatcgctcagcagctacagcaaggtcttcagcactcagttcctgtctgtttgtcccatccgtggctgggacaggcctggacttccccatagctctctcccgcccgcttcaaatcagggcaagatcagtatgtggtgatgggggccttggaggcaggggcacgatgtgtgagactgataacgttcttgcagcctgagacatgggctttagagcagtttcgaaactctgtgttctctctcttcacaagtacaatgcgtttccctggcatttacaggccaggacctgggagaacgccgtgtcgtcttaaacctcagaaattgccaagtgacagtgccaagggacgggtttactggtttcccctccatcggactgagtgcagctgcccttccccaccctcctgcagttagggaggcgtgtccctcttttgactggctgagtcagaaatcagccaggacttagcgctttttgatttgaacagaaacggtggggggaaaaaaacccaaaccttgtggtattttataattcgggaaagttggtctagagagggccagcgaattggctgtgggaccctgttagggaaaggtctgggcctcctgactcctgctttctcttttcctgagccagaggagccccaggcctgtgcatgaaacatacttgacaaaactaaatttttactgaatttccaccccttgggtgctgactaacaccacttccccacatataactctgcgtccgcataattaacatataatttgatacctggaaattcatgcagggtggagctggaatggattactcagcttttggcaattcttcctgggctgtagaactctgtgtgctgcatcttgcttctcctgttactgctaactcatttggcccatattcttcccacttatttcttccttctgccctggaaagatgagtgaaataagtatgtggtatgtttttgtcattgaagcaactgaaggattgttgacttatccatgtgcactgtccacttacctagtatgcgtgttcttagcctgcttctcgcattggctggtggagtttgatagtgccatggtttcttttttttttttttgagacagagtgtctgtcgcccaggctggagtgcagtgacacaatcttggcccactgcaacttccacctcctgggttcaagcaattctcctgcctcagcctcctgagtatcttggattactgtcatgcagcaccacgcctggctaatatttgtatttttagtagagacagggtttcaccttggcctggctggtctcaaactcctgacctcaggtgatccacccgcttcggcctcccaaggtgctggtattatagtcatgaacagccgcacctggctctgttttaatttttttttttttttaatttgagacagcgtcttgctgtcttgcccaggccaagagtgcagtgatgtgatcttggctcaccgcagcctcaaacttctgggctaagtgatcctcttgccttggcctctcttagctgagaccacaggtgtgcaccaccacttcctactaatatttgtattttttgtagagatggggtctccctatgttgtccaggctggtctcaaactcaggggctcctgtgatcctcccactttggcctcccaaagtgctggaattgtaagtgtgatctctgtgcctagccagtaccgtagtttatttcattgcctgcttcctcatcaagatgatgccatcagtattaaaaaatgcagtcagtaattatcagtgaagaataaagatgaaaaattatgatgattttgcaatttaaatttatagcatatgctgatggttataagttttgttggagaaattatttattgtgttgacacatgtattaatgtgggggaatcatggctcttaatgtacatgatacctgcctttatagattgaaagactgggtgaaccctgacctgttgcagggacccagttagtgcaattgaattccaatcaggatcacttggaaatgaatccagaaatccgcgttatttgaaaagaagtgatttagagcagtgcagagggaagattgtatatggtgtgagctcagaggaaggctggagtgaatcccttaatcagaaatgtttggcgggttccagcctgcatatcgacccctcgatggccacagcttcctgatccagtggctggagaaggatcttgggtccgtgtaccagctaagcatgcacccttcagtcagctgcaggaaaggtgggagcgggaagagtagctccgggactggctggctgttccctgccctagactgtgcttatgagcctttcaggttttgagaacttgactttggaaagcttctaaatttgttcctagtgggttgatgtattttgtggaggtcaaattagagctaatggccttaatggtttacagtgctc

SEQ ID NO: 84016 - DNA, 1352 bp, Homo sapiens
taatttttctatttttagtagagatggggtctcaccatgttggccaggctggtctcaaactcctgacctcaggtgatccacccgtctcagcctcccagagtgctaggattataggcaggggccatcgcgcctggcctttctgcagtttttgatgcccctcgaaggctctttggtgccttccttccgcggctggaatgagtttcgtgtgcacggccatccaccttgagaggttgtacctttctgaatgggctgttccaagcaagccatacatttctttcttggtcagtctcctttatttgctaatttccttttgctgtctgtctctttacatgggtgccactttaattaagacctagagaagtgctggcctccatgagaaatgtggctgagtcccctcttttggctgtgagtaaatgcctttgtgtgggttgggatccctaggaggcacccccctagggaatttttgcaatcttggccgagcatagttagaagctgcaattactacttggttgctaattacccagcctcacattagatccgtttacagggagagcttggagcctgtcagcaaaggtcagccggaggtcctctcactaaacagccctcttgtgatagctgttggaggggaaaggcattaatgggggaaggcagggaagctggctctgggctgtaggatcctcgctgtgggggatgggagaggcagaagtgctgttgatggctgcagaggtcagagaggctgataacccatctcataacctttctcaggaggcctggaggaaggcggagaaacgctttcattttggaggctctgctctagcaaggagggagatggatacttagaagaaactaggacctgtgggttggggacttttaatggttgactatgtgagaaagatcagttcggcgacagcctctgagagtggaagagacccctctgcccccaactcagggcatcatttctgttgtttctttgtactgcctatactgtattatttgctttacatttttcttttcacgggatcctccgttataaccacaaatacccaccttagcatcatcccgagcaattgtgtctgaggaatcacaggctcgtgctggttggattggctcagataaacattgactggctaatgaccagaatgtacaaagttcacccactcccacctggaaccatctagcccctggccagtgttgcgtgggtgaaacaccctgaaaaaagatgatggaaaagacactggcctggaagtctgagtacttgtgtgtgaccatggacaagtctctctgcttctctgagcctcaaaagtgagaatacggcctttgttggattgctatgcaaatgacatgagaacatg

SEQ ID NO: 84017 - DNA, 1029 bp, Homo sapiens
tgccattaggactcgacatttattattttcctcaaggataaagcgtgccctggactctggactctgtagaatattttctgaaatgtgttaatttcaccatcccattttggagaaggggcaggcacctctcatctggctgtaggagtgggaaccctgtctacatttttggtgattggagtgcagcattggactaaatggggcgttaggagcagattacggggaaggctgaggattcccctggtgatcaggaaaacacattggtgtaattggattaccttaacccttcatttaacttgatgggaatgctttcaaacaggggttccggaatattgctacagcttttcaaccctgtccacaggcagctcttgaagagatgtgcatttgactagatgatttaccttgaaacctgccaagagaataattttaggaaacacccccgccccttgtgcctctttaattgttccgtcaggaggaaccttggtgctgagcactggttctgttgagaagtgctaattagaaataatagctacaacaaacaagtgttaggaggcagcctaagtgatgtcaacatcaagaagctgtcattggctccctgcagatgtgcgggccagctgtgaggcaggggagcctgctgctccctgccatccacctggggaaaggtagaggaggtaggagtcggataggctgccatagccaggcccccttggctcgatgacttttgttccttggtttgaggttctgttaatgcactctaagtcccattggtactcaatatggactcaatttcagctggtccagaaagtcttgggggaatcccagaaatggcacctgggggcttggggaggggaagtcattccatcccaggaggcagacaagaatccttctgaaggtggaagtaatacagcgacttaaatataacctgagccagacttgcatgtctaagtgaatgctgagtcttaaatattcatttacaatgttaaagtctataatttcttcataaagaattctaaaataataaagatgacctgg

SEQ ID NO: 84018 - DNA, 1021 bp, Homo sapiens
ttccctgtgttgcccaggctggtcttggaactcctgggctcaagcgatcttgccgcctcggcctcccaaagtgtcaggattgcagctgtgagccactgcaccaggcccctccccttttttaacatggatactgggaaatttaaagttcatagataggtggttccccttttagatgaaggatttacatgaaagatggttaaagaaggaagagccatagatgtgtgggttatgattctggccagtgaactttgtggaaagtcaaacctggctccagtggggagtgctgtgaataagtctggggggagatgatctgtatttgcttttcagattaccccaccttagacagaactttgtcagattgtgtcccactggctgtgatctgactggaaagtgaggagacagatgtgtagcgagaagactgagtcgctgcctccttggtgaggcagaggcaatggggcttcaccctggggaacccttgagggcaagggtggttactcaagacttggaacagccctcttgagtaaagaactctattgctcaactgtgggacctttaaaggaaggcagctgttgctcaaacagagacgtctggaccctcagaatccggttgttcaagtttcacagcccatatgcaagacagcaccattgaattctccagtgggatggagaccgccatgatatgcaagacagatcttaccccgccagtgacagatgggagcgatagagcagattcccacagaacctgtttgtgaagctgcaggaacacttgtgcagtgtgcccttatagaaaagttagatttctgtttgtgatttcctttctcagggttggtttgggagggtctgtttttgagccgggcccaacggttctctttccggagcaccaggatcttgcgcttctgcccagaagctgggtagctttcttggccacactgaatgtccagccttactcttggcttttaccagtttaggggtcaagggttgaccataccagttgtcagtagtaatacctagagggctagcaa

SEQ ID NO: 84019 - DNA, 1175 bp, Homo sapiens
aggcggaggttgcagtgagggaagatggtgccactgcactccagcctaggcgacagagcgggactttgtctcaaaacaaaaaaacaaaagattgtgtaggcaccacctcagttgattattctgtgtaatctcatgtctgtagcgtacatgtgactagggcagaaataattcagaataatctcagattaggtcaaaatggaagtctcctgtttaagaatgaggagatgtttatgtggctactacagagttaaccacatgtcattgcaaagacagtgagttttcaagttaaagggttatgaggattttaaattaagaaaccccaggggtctagtttaatggtggacaagccccagagagacgatctgatggaccagataagttgtacacaattctgtgaaaatctgttaactccaggcccgggcagcttaacttcttgacatgtcacccaaatataattgttaatgccgtgggaaagagtcttgagcagcggtaagttctgtaaagtctgtgagtgagaactacaagcatgaattattacagtggggccagatcagagttatgttttaggttctcatgattagaggaagccagggttttacattactgcagtatgtggcccctaagcacccgaaatgtggctggttcgccctgagccatactgtgagtgtggaacacataccagttttcccaggcttagtaggaaaacaaggggaaactgtcttaataaaacctagatcgattacgtttgaaataatgtgtagacagattcggttaaataagacatattacaatgaatttcacctgtttcttttttccccttattagtattattattttttgagacagagtctcagtctgttgcccaggctggagtgtggtggcatgatcttggctcactacaaactctgcctcctggattcaagcaattcttgtgcctcagcctcctgagcagctgggattacaggcatgcaccaccacacctggttaatttttgtatttttagtagagatggggtttcaccatgttggccaggctggtctcaaactcccgacctcaggtaatctgcctgccttggcctcccaaagtgctgagattataggtgtgagccaccgcacctagccttgaattatttttttgtttttatgttttcatttttgttgtttggacagggtctt

SEQ ID NO: 84020 - DNA, 1116 bp, Homo sapiens
acctttgtctgccaggctcaagcagttctcctgcctcagtctctcaagtaactggggctacaggtgtgcgccaccatgcccagctaatttttgtatttttagtagagactgggtttcaccattgttggccaggctggtctcaaactcatggcctcattatcttcccgccttggcctcccaaagtgctggcattataagacgtgagccactgcaccagaccaagactttatatgaacttatttaatcctcataaaaaccagatgaattggatactactaatacattactaatagttcattttatagtgaaggaaaccgaagctcagggagtttaagtaacaggctcaaagtcagccagacttggacactgatgtaactgacagcaaaaccagtgatctctatcactgcacttcactgcctctcgtattataaaattatgcaataaatggttgtaggacagttagatagccaaatggcggaaaaattaggttagagccatttttcatagcatatgttaccatccattccaggtgagttggagaggtaaaagtaaaactaaaatcacaaaagagctagaagaaaatataggttaatattgatctgaatatagggcagtgaggaatattaggcctaagccttgtggggaagaaattgtaatagaaaagattgatgtagtctacttaaaaaaaattgtgcatgctggtcactaatcacaaaattttaaggcatatgacaaactgtgaaaaggtgtttagagcacatggaattgacagtgtgtcctaaatccttaatatataaagagctcttaaaaatgaatgaaacagccaggtgcagtggcccacacttgtaatcccagcactttgggaggttgaggcaggcacatcacaaggtcaggagttcaagaacagcctggccaacatggggaaaccccatctctactagctgggcgtgatggtgggcatctgtaatcccagctacttgggaggctgaggcaggagaatggcttgaaaccaaaaggcagaggttgcagtgagccgagattgcaccactgtgctccagcctgggtgaaagagtgaaactccatctcaaaaaaaaaaaaaaaaaaaaaaaaagattg

SEQ ID NO: 84021 - DNA, 1159 bp, Homo sapiens
atttctggggttggtttattattattttgagaggcatcaggagaagcaagaggaaaagagaaatgggtcaagtagcataaagaatttgaatcaaggcaaactagaaaccagttttgcttgaattacccttcttgggactttcactattcaaagtcgtatctttcacaagcaggaggctgaatgagaaccctttgtgaaaggtggttatgttttgttttttttttaaaccacttcatcttgtcatgtacaaagtagcgccttgtacatgtgtgctaaaattgaacatttaaatcctattgagtaatcctagttactccgaccttaaaaaccaaaacacaattcatgttaattgttaacataatacttcaggttaattgttaacacaaaatggggaagtggcaacaaacatgcaggagtgggagaattaagtcatatctgggcctagagagttaagtggttgggtagtctggcttgtgattgaaagagaactggaggagcctgggatagaaatgagatggtggtgatgggatctcctttgcgtaagagagaagactattctttgcatagaggtgattcagaaatcgctctgtggcaggatgccttctgtccatatggccggtctttgcgtgggccattcttcaaggtgccatgccttgactgggtcaacatggccagtgcccgtatggtgtgtaaaacccagtcctggaaagctggctcccctggaggtgttgtgcaattggggcagccggcagccagcttctgatgtggttggctgcctggctcacacctctcaggtgctgcggagacagcaagatccagtggccccaggctaccacggaggcgggcagggtgccacggccttcccgagccattctgtttcctttgtcttcaggagcccagcgtgcacgggccctggctttccagttcttcaggctggctgcctggcatcacagcgaggcttcaggcgggcccacctgtggaatatattgggtaaggttggctcggcctggcttttgtgaattgataaaaggaactgtggatccagggattcttcttgaatgtagatgtttctagttcggtgtctcctattagataaaataaacatgtagcacacacaaactctttgtccaactactgtttttctgttgtttccttggtt

SEQ ID NO: 84022 - DNA, 1111 bp, Homo sapiens
atttacttgctgacacttgacatcaaatccattcccagaggtggagctctgcaaaccaccatggtgtccctccccttcccgggccccctctcttaacttgggtgtctgcccatgtgtgagtcctgcatgggctggtggctgccgccgcattgggaaggacttggggcagggcggtgcagggcggtcgttgtggggaggggaacgttcctgtttaactttcatagctgacatgacattttcttctcctcccaattgctctcatactcatcttctttcaacaagtgctaaatgaccctcccttcgttccccctgcggtgtaagtcttctgcatgtgggaactttctcctctccataaaaaagttagatccttataatggatacatgcggagatcatatgtgggagagggctgaggaatgtctcgtctccaggaggcaggcggtgtctaaggggcagtcaaggccgaggggtattgtgttggggagtagagagcttcccatacaaggtgcagggccttcctgggcccaccttctgggggacatgtagccgctgagctgtgggatccggcacagccagaccctctggtcctcctgtaattcttcgtggagtggagtctctctgcaaagtgtctggctgcttgattgactgtgtttttacatagccaacctgttgagatactttcagaccctggagtcttctagaataatcagctcacaaatcagggtaacccgcttctgggaggcggaacccgactgacacatggcggtttaggggtgaccagcccaaggctgccattggatctggctttactgagtgctggtgagatttcgttttatcattgcattcccagtcctcgagaaccagtgccctgatcctttcagtgcaactcacgtgggcttatttgcagctaccacttggagatcagggacaggaagaattgggcttgggtagtcaatggtgcatgatctcagactcagtcttcatgggtggtgcctcctgcccgtggctgggggaaggaaggggagtggagactttgcctgcggggcatgatgaggcttggtggagactggccatcaattcagtggcgtctgctgcctcccatctggaagtttc

SEQ ID NO: 84023 - DNA, 1023 bp, Homo sapiens
agtgagtgaagaagatgttagacaagcagaaacctcaggaggctgggattgactttcccctttgtttggattgcattgtattgtaggaggtgttgaaatcttgttcacacctgtcgaggctgaagcctggctttcagagcagtttgtaacaagacttctgttgttgttgccgaaaaggtttccctgctcacaacagaggaactttattgtagcaacttgttaatgttcaattaggcaaattttgggtgccccggggctgtgggagggcccctgctcactttttctgggcggcccactgccccctttcccagggatgggcccggagaagcaaagcctgtaccatgggcttcttggagagccaccagtgggggtcttggcagagcttgagaatccctccgagcggttgaggttattggagatggaattctgtgtcttgagttctaacaatcgtcccctgtctgttggtgctttggggctctccccacccttgggtgtggccaaggctgtgcctgatgcatccttagcctgtgggttggcaggaggagcgaccaaccccaaacccggtgtgtggcagccccagcatcacactgccccgggctctggagccctgttcttcttggggatctgagcctgcctggccacacctgggcatgttctctggctttcttcctggcaggacttctcccgaacaactgtccggcaccttgatggatggtgttttccacctcccggtggactgaggtcttgagaccttggaaggggaaaaacaggaagctcatttctctaaataggaggtctgactcggaggtgcttatgttttcccacatgaacatggctgacagttgtcttcatggtggaaaaaaggggaatcttgggactgaagctctgtccccacactcccccaaaaaaaggagaagccgcagggtcccggaggggccgtgtcctatcctgccctgccctgacccgacccactgtctcggtgcagctgggacctggcggcctgggaggaggtgggaggtgggt

SEQ ID NO: 84024 - DNA, 1096 bp, Homo sapiens
ttcctcaagcccagcagcagagaagacctcaccaaaggtagaccctctccactgcctcaacatggggccatcttggctgcccaggggcagttcggaaagtctctgctaggaacaggagtcctttcaatggctcccacctgctcctgggaccccaaggccccttctatcacctcccaaatgcagctagcatcgatgaaccacactggcgtgtttcccacatttcctcacctgggttcgccatcaccttcagcctcttgacaggtaaggagagtgaaaaagaggaaaatgagaaacgctccttggtcacagggtccatgctgctccttctactaaaggggacacaagagcctcctaaagctcccttccctgaaatgctggagaaaagctgagacctcaggactggatattttatttaaaaactttttgtgagtgatgccacaggtagaaacacacaagaagtgtgtgttggacgacggaaggaattatccctcccattgatttttcgctctggagtattagagagaaaacagcatttatctggagatttcttcccaaagccaaccacataaacgggacttgaaaagagcttatcggacaaacgatttgctcacaaggccatcgcccaagtgggaatcccagcagggaactcgatcagccccactgttcctgcgtggacatctttaggtggctgttgtcattactcaacttcatgccaacgacagagaggctggcctgggaagtggcagaggggagacattggcaaaaattacaatggacaaaaaatgagttctttctctgtcatgtctctgctccaataaggagaatgcaaaatgtcaacaaaacaaattccaaaaaaagcagcatgcacataaacacacttgaatccttcctaatgtatcttgggactcctctttgatcctctaattttccacaaactcttaggcatgttttgttttaataagtgataaatactaataacccaacatctaatccaaacacccattctcctcccagggcaaaggaaaggctattcacaaattttttaaaagtggaagacagccataaaatatgccaggataatccccaagaccggcta

SEQ ID NO: 84025 - DNA, 1073 bp, Homo sapiens
taaaaggagtgccagtccccccccaccccccgcctgccccctttccccccagtcaagttgaaactgttcacgttttagaggatatgatcaggccctgtgctgggacaccaggcagccccgcttcacttctgtcaagacccagtgctggggggcggcgggggagctgctcagctaagacgcagttcttgaataacaatagtagttgaggacgaaccctcggaggcgcctggaagggaggggaagtttctccctcagtcagacactgggcatttaacccctttttctccaggtgctttgcaaggccgttcctcttctgtcctcctctccaggtcattggtgggttatgtgggggtgctggcagggctccagggtactgggggtagggggtaaggaggtgtctggcagctgaggtcacctgtccatggagggtggtggagctcaggcctggaagggctgctcccctgtcgcgtggggtcaaggagggcccaggcttggggagaaacttgagtgggttgggatgagagcctggcttctgttttccatgcatctaccttcttccttccccatcctgctcctgctgcctggcacccagtggggtctggccgcagccctgcctgaaaccccctccactggggctctgatttgtttactggagcattaggtgaatgtaaacagttcaacctctccggttttatatgcttaaagggtctgagtgtgaatacaaatgggtattaggcccctgtggttccaatgactgtcctccatccgctctcgttgctaactagcaggtctttaacctgctggggggaggaggaggaaaagaaagtcctttgcaagcgtgtggactctgggatgtctctactttttttttttcctgttctttttttaaatgctgagctttaaaaagtgatgttgggaggcccccatctgtaggactgaaagttgaagagcactgaagaggaaagctgcccgctctggggaaggctagttattttggtctctttttggggacgaagagaagttttctaggttcctgttactttgtcgcatgcgctcgtgaagtctgactatgg

SEQ ID NO: 84026 - DNA, 1059 bp, Homo sapiens
cagaagggcagttaaaagggagaagtcttctcttgatagtaagaaatcaggctggagtaggagacggcttacttttggacaagcctcgtgggtagtcctggtattaaaccacagtaaatgacttatttttattttgtttttgagacagggtctcactctgtctcccaggctggaatccagtggcacaatctcagctcactgtgccttcctcctcctgggttcaagtagtcctcctgcctcagcctcccgagtagctgggactaccagcgtgggctggttttccaccatgcccggctaatttttgttttgttttgtatttttagtagagacggggttttgccatgttggccaggctagtctcgaactcctgagctcaagtgatccacctgcctcggcctcccaaagtgctaggattacaggtgtgagccacaatgcctggcctattattattttttaaaagcacgctgtgggtcccagaagtgatttattttttcttagtttatacttgagtttggcagtgagttgttggatactaagattgttcagcccatttaaaagtatcatttgggagccagtacattgtagctttagggagatgttcaagacagacaagagaagtctgtctcagtcatatccgagaacacttagaatcccgcctgaatctgaagttgaaagacaggcagaggttctgaaacaggaccatccagtagaaatacagtgtaagccacgtaggtaattttagattttctattagtcacattaaacaatgagaaacaggtggaatgaattttcataatacatttagcccagtatatccaaaaggttatcatttccacaggtaatcaatattaataaaactattaatgagatattttacatcccttttttttgtaccaaatctttggagtcctgtatttttataccttcagcacatctctatcgagacaagccacatgtcacaggctcggtagtgacaagggtcggtggctacctagtggatggtgcagctctggaataaaagattgctgccctgtgctcttctgagacattctgttgatg

SEQ ID NO: 84027 - DNA, 1052 bp, Homo sapiens
agggccccgtggactctcgcaccacacagactaatgcttcaggttaattttgtgtacaaggtcccttttgttggacaaggggatgaaagtccacagctgtgactggaaagaggggaaggaccctctgggatgaccttgttttggaaagtctaaatggaatactaatggccgagatctaagaagggtgatgtatgtgtgtgtttgactgggcttaaagataaggtgaagagtattttaaaagttggtgtgcagcttcccagataaccgtatgcctggggccagttacgatttatggcaagctggtagtcatggctgtgtgttggtctcactttatcttttgaatcctggctctatagcttaaccggtggtgctctgtttgtttattttatcttttttgggtgggtgggggacatgggggtcagccaggttttacagtgaagcatagcagcattttataacacacgaagggctgttcatatttctgctcctgggtgccctgggctgtgtcactttttactgtccctaatgatagcacatgccagggtgttgcattctagagtttccaggagcctgaagtgcaggcccccatcttgtacagtgccacaagcttgccagagctgtgagccggggaggaggtgtggaggccttaatatagctccaagccccaggtttctttcatctctgaggtcagctttttcctgttgcctcttgacttattgaaactgtcgccgggctggccagcacacccagcagactttcctagtaaacagaacagccctgggtggcaggttcttcgctttttctagacgacagatgagcagtgggatcttatgtcactcagtgggacatttcatatctcctctgagtcattccctaaaaaccgcttttcttagaacttaaagagatgcagaattttacagtaaccatgaaatttcatggatgcatttgaatagcaaccggatatttgaatacctccttaccccagtattcctaaggaagaactttacactgaaaaatactcccaaactttgtgtttggaaaacgtatgttct

SEQ ID NO: 84028 - DNA, 1041 bp, Homo sapiens
ttccagaggggccttagctggcttgctgtgtcctggaggtcttaggtggttctgctgtgtgttctttgagctttggtattaacacatgtgctgcctctgagatttgtccatccttttccctccctggagtcaggtctaaagcttccagtgaggcgggcaaaacatctgccgcactcccacccctactcctggctgctggtggtttgggatgaagccactgaaactcccttgcaaggccacaccttgagaagatgggccggtgctgggatgcctctcactttctattctgcttggtttctgggaggaagctaatgacataaggggcctaaaggctttcttaactggtgacctggagtttaattgtaagtgggtctttcggggcagcagttaggaatgtatggatcaccttcagtcatctgcagggagacttggactggaagtgggagaactggctccactggactctgaaaaaggctgtggagttttcatctgctgctgatttcatccactgtcccaaaagttatcttggccacaaacctttgatctgggagtgagacccctcgcccgatgcttctagggcaggagtcagtgactgcctatacccgctgttctgtgtagatgggagagggtgttagttattgagtagggctgagtacttggggtgatttggggtggttaggcatgattggggcttacacactggaggggtcatgtgtaggcttcttgatggggttctttcaggaaggaggaggcaaaagaacagttttgcttgtttcttggttgttcctgactccatccaggagtgtgactggagaaaaattcttctgagtgtatcggttaggctggcttttggatagatggtccccggtgcccatttctatcataggctctgcatttcagtaggaagattctagttcagaggcgactgcctctgtcttctcatttgaatctccttagtggagaggcaggaggcagattagccgagtgcagaaagaccaaggggcttaatctgatagttgatctcagccctgcatcccctga

SEQ ID NO: 84029 - DNA, 1052 bp, Homo sapiens
gggcctgttggcttgctctggttcctaaggctggtgcaattaaccaggatgggggcgttactgtaaaaacacaacaggaaggcagattccattacagtgaacctcataggggtatccaaatgctctggtatgagaatttggtggtaatggttattattagaaatcacagcacagctcagaaccaccgtcctctgcctgagttaaaaaactatggtcaggggaaatgggaacccagttttaatagaatctaggcaagggaattccttggcaggagctagtttaaatcataaagggcgcctgttctgtccaaagcacagtgtcctgtgtcctcaggccactcagattgagaaaggagcacacagaagctacggttgtgtcaaaccgccccgagggagagacccaggcagaaatcttggctcattggcaagccactttgaaaatccagattaaagagaagcactacaaaatcaacaactgtcagagggcttttctctatgatttaaagttgactgccagattgatctctttgaacatgtgcaaagtggcaatcagatgttggagggcttctttgggctaatatggtaaatgactttgatatggacagaaactgaggacagaggtgcagagcaaggcttagtgccgattgacagcagcactgagctgaagcttcagaagtagggaaacgactggaatgtttctggttttcattctttgggccaggggacaggtgggtgaggacaaggccgtggtctaggcagtgatgggggtgtctctagagagttatttgcccaaggaaagtactttggcttttaacatttaaaggggattttttctttctttgacgtttctgcctttcagccttcattcatggagtttcttgcttttacaagaataagggctcaaataaaaacagggagggagacatagaaagtttgcgagatggcaaattcagccccattttgaagcaagacttctgttttgttggttttaactccagcccgggcctcttagcaaaatgcctgggcttcatctgccttttgggtgaccccctc

SEQ ID NO: 84030 - DNA, 1072 bp, Homo sapiens
tttatgacatgggtcacttccctctctcaacaacccccccccacttttttttttttttttgaaatggctgtactttctatgaaatagagctactgttttccatttctcctgaaaacagtgttgatgaacagggaactattgagaaacacttgctaactattcaataataataataataataataataataataataataataataatgtaaatccatgctgcttccccaaccacctgaaacttaattttggttccttttcttccattttttgtttgcacaaatgaatgttaagggagggttggaaaggcccatctaaaacggtgccctccacaggcccctgcctggctcttcccaccaggacagtgaagtgcctgccttcttgctgctttgaggttgaatttaactgctgtgtcaactcagtgccaattggacagcccagtggcaaggagctaaaataagcgagatttagttttcatcattatgactttaaatgatgcttgctagacactcccaggaccggcctggctcatctttggtgacccaaaagtggttagttcattagaataaatctgtgattacagactgctggaaaagtatttctagggctagtggtgatgtggcttagttctagcatccaggaaacatgtccttattgtcactgtgtgcagttgttcctttttggtgtatctttcaggggtaggagctttttttcttccacctacaaagtatcagtaagaatctggaaatgcttcagggctcagagcagacccttacttaagaaattatttttattgcagagttgtaacagtgtcatcttaaaaagtaaatatttaagtgactaagcaacattttgtaaaagtgtagggaactggcttgaattatttaaaggggaagaaagtgagctgtctttataaaactcaccttttggccaggcatggtggctcatgcctgtaatcccagcactttgggaggctgaggcaggcagatcacttgaggttgggagttcgagaccagcctgatcaacatggagaaaccccgtctctactaaaaatacaaaattagccgagtgtg

SEQ ID NO: 84031 - DNA, 1038 bp, Homo sapiens
gggcttcatttacataaagcgattccgggcgggcggcggcagaggaggaggcggcggcggcgggcaggccggggacccggacgccagcgccgcgccccgtgggtgaatccccgccgcgtcccggggacctccctccggggacgggccgaccgccagccctgccgccaccatgagctcccctcccctgtctccgggccccctgctcctgaccagagccacctccgagtcctggggccagcgggaggtggggagcatgccgcctggggtgggtgagctcggggctcgggtgccactggaatttcccgttgttgcgcatggcggcgcggcccccggacctgcaagtgccgcctccctccggaggtgcgcggaggcttggtgtgccaggtgagtgcagcctccctccgggtccgcgcagccggcctggagccgcgggcaggtgctgcgagtcttggctgaacttcccattctcttggggcgtgtgggggaagggcaggctggatgcacttgaactcccagactccagttgccacctacctagggtgagagcgcctaaattctgctgggcacacagtaaagctcttccttcctccttccttcccttccctctgtcctcccctccctcctcctttcctgagtctgcttttggattagttcctgccttctgaatacttgtggtactggtgtcatttagaagtttgggtgcctccgcctaaaaatgcacccttttcagccctggagaagtcgctggtcagttcgaaacaatgtgaagaatgcgcttgtggagtaattaaagggagaatcagagttttggagctggagggcacctttggagatcatcttgtccaccctctaattttagttttttcgcactcttggaaaagtcagagcatttatttccttgggcaggggcggggtggggagctgatgcaaaggagagagtcaagatttttatcctgttaggaggaggaatgcctatgtttaggtcagtagcagaaaaacaataacaacaaaaagaagcattgtaggcttggagggaaa

SEQ ID NO: 84032 - DNA, 1323 bp, Homo sapiens
ggaatcttcgtttttccggagagattgccagaggcatctctgcgttgtgggccacgttgcttgcggtcctgctagcatacgtcatcttcatgtcttattcatagtcactttttcaattaaattattaattgttttctttaaggtgttctcaacttatatggccaatataaataacagtgtgttttgaaaacaccacctgttcttgggcctgaagtcaggtggtctggaagcagctctgcagtgaccatagtctggtttgcaaactcatcctccaccttccctgttggctcttaactccccccacccggcccccgtgctctcacgtgtgactgaattgggcttgtgccctcctttgtccctaatcggacatgattccctggaggcagtcttttctcccagggccttagctgaaataaataaataaataaataaatttccccagaatctattctggactaaaatgtagaaaggggctgtctgtacccaacaggttagatacttacattaatctgaacccaacttacattgtgcaaaaagccttctatacggggatgtgatggttttcaccagctaagcatccctttttctcccgagtcagtgtgtgcctcatgctaatacaattccatacatactgctcttcgcctcatgagctgattatatttctaacacttgcatggttcattattgtgcccgaggaaaagactctccaggctgtaaggccagcctgggtgggtggttttcagaaagggtaaaagcaggtgcctttctgtgctgtgagaatcgggagtaaattcagactgagggtgggattctgacagggaggacagaggacttccggtgagatttctttggggctggctttcagatgagaatggaaaaaggtggacttggggagatagaaggcgcccagcaatcgctttgaccaactggaaaaggtgaacttggggagatagaaaggcgcccagcaatcactttgaccaactggggtggccgctttaaatcttaccctggcggtaggaactccctgggaaagggcacgatctttgctatctctgcggtgatgtggctttataaggtgaggctaaggagcctggaggcttacatggtagactgcatctccttttcttcccacttcttttcttcctatctttctagtgatctctccttttctctttctctggcctcaaaaactatccttaaactctcaacggagagcagggggatgtttttataagtttctgcaactgaaaaacagaagtgctctgtaaagcagttaataggatgggtgtgtgtttccaataaattcctgtccacattggctcc

SEQ ID NO: 84033 - DNA, 1068 bp, Homo sapiens
gttgtgggatatcattgacagatttagcacctgagctggggagggtgggtaaggaaattagataatgttccacctacgatttgggggtaaaaattaatctatggaattagcactgtagggatggatggaggccttgaggcttcagcagaaaaatgtgaatcaaaacatctgtgtgcaggccttggcacaccagcttccaatggttatgaaggcaaatgtgagctgttctgaggaacttctgcattctgttccatacccaggagggctcggccacccagcgggtaccaggcccctaaatataactgcctcaaaatcatggggtgaactcaggccaattcagctccaaatggttccttgtttatttcaggaacgtttgtttttgtttcttgccctcttctggatttttctttgttaaagcctccgggttatttaagcactagttttaaaaatcaatgtatacgtataatttaataaaaatagaagaacccggaagggtgcacaaatctgtctaaacccgctgtactgtgaaaagagagcccaggttacgctggaagtcagaatgctgacatccactgtatcttagagatcatatttacctttgcaaaagtggaaggatacagcattagtaagtgtgtatgtgtagagaaagagagagacaagcaggtttggctcggtagaatcattgtaatttaccagccagctcagcgttagggggcaggcctctggcttggagagtgggtaaggggaggagtagggaaggggttagcgctccctgatttatttttaaatatttatcctttcggctgttgccaattacgctttccagatgagacgagactgggtatggagaactgcgagggaagaattgccttttctgagagtgggtttatttgtcagcagtgttcaggatggagcgatgagaatgtcaggctgtcactgctgggtaggccatgggtttaacatcaggcagctgccctccgaagagccagggcttccagagctggaggatagaatttgcaaggagtatttcagaggaactcctgatttcatatgtaagtgcagaagttg

SEQ ID NO: 84034 - DNA, 1077 bp, Homo sapiens
tgagttgctgtgtgtgtatgagaagagagatagaatacagacacagtcagtcttgaaagcttggtggtaggtgaatccatatttggagatgattttgaaatagtctagcaaatggtgtacgaagaggatttcgtaaaaagtgtacacggagtcagttttgaaaagactgcggtttgggaagatgaggtgtgggcaggaaaacctactctaggccagcagccttcctctgtctgtgtgtctcccttccccctcctcgggttttagtttttaattacttaatgctgaaacgcacagggcttatataaatatttgcaaatgctctttcctattgatttctctgaataaactgccctgctccggtccagagaggaggcgattcagatctgtggactttttaaacatacaaagtctctggaggagtggtgttctctgcgtgtgtgtgtgtgtgtgtgtgtgtgtagagttgtaggtatgaggatttggggggcccgcaaagagagttcaggctctcagtggtgtgggccaagaaaactggggtggagctggtcccatggcctggcagtcctgacgtgtgtgtgtgtgtatgtgtgtgtgtgtgtgtgtgtgtgcgcgcgcgcgcgcgcgcgcgtacgtctgcaccgtgtgggtgtcttcactgggggagtctggatgcatatgcacttacttcccccacccctattaaatatggagcagcttttcaggactctgtgactgccttctcctcagggtcacattgagtttgaatctgacccaaggtgcaggaatcctgcaatggggaaataaaagaatatacagaacggggtcaggtcagctgctcagaggccaaaacccctacagctgctttgattttattttttggtgtatattttaggctcctcctgccattgtacaaattgtgcctccccctttcaggtgtttggtctgtggtttaaaggcaccagagcctatgcctgcatagacataggctcccagcaacaacagaaaacccacaataccgaatccaaaacaaaacccgggaggagggggagaaaaaaaccctattgagttcaggcaaat

SEQ ID NO: 84035 - DNA, 1044 bp, Homo sapiens
gcggccgcgcgatcctctacctgtgcgctctccgccctgccccactggcagcgccgcgagcgcccagaggggactctgccctggacactaggggctcccgggggctcggggctgcgccgctggccagggccagacctcgcccggccggccttcttccgccagctgagctcagagacatccgaggatgccttttttctttttcttttctttcttcttcttcttctttttttttttttttgctctcgcgaatctgggattgtttacgttgggttccccactctcacccctcgcccggctccactcgatgcaaaaaccgtgttcctgaattttacattatgcattttaatgtccgtctttttgcatatctattggagagtagatctaagtgtatttcatgcagtgtatataattaagttgtgtatggactcagtactcggagggttcttgtataactattgaattaaaatatgtatatatcactttgcgagtgaagctgttgctcagaatctgacttttgttcaatgttgtgctattctttggactgtggcaaattctttgattacaagcgctttcaaaaggcacccagtcttaacttttcccccttgttgctttcaagtagggtaaatatgacaatttttattggtctcaattattgaaacttgatctaagcactgtatggacggagcatgctgattgcctttttctggcctccagttctagtgacttttaaaaggcagtttgttaagtacctttgaagaatatgacagacggtgatcgcttggctgtaatgcaaattacagaacataaattcactttggaatttaaaaaagactcgagccctttcagtggggacaattgaggatttattatgttttttaaaaaattactttttttcctccctactttgggagaatagctagttgcagaccaacttatttggaggtcctccgaaagaggcttgggcagtgggcgaggggagaagattgatcacaatctgcataatcaatagggcagcgtgctgcaatcgtgtacctacatttactg

SEQ ID NO: 84036 - DNA, 1183 bp, Homo sapiens
agcttattcatcctttgatatccagacactgtaatcaagacaactgggttcctacaggtcaaagacaacaaattataatttaccacgccataagaataaacaaaactttaatttataatgtagctaaagagttcttcctgttgtagaattatgccacgatttacatggtgatgacatcaaagtcttgtcctccagacacacttgtcccctttacagaaaggggagaaccagaggacccaatgctcaccatttctcttatgtaatattgggtgacccttttacaaacagcaaatacaggcacttagttgctgagaaattatagagggaataaaagcagagtggtcaactttctaaggagattataactaaaatgaaaagcagaggggaaaataaaagtattatacatatattccagatagcctcttcccacacacacacagctactgctgtagttgctgctagagcccccatcagtctctacagtgcttacccagcttctagagcctttgcccagtttgcagtgggagacattcagcctcaatccttccattccatttgattcctttagaggagggaggaaggaagagggatagggatgggttcgaattttaagatattaggactctggattcagaaatagcttcagggaagttcaaggttaaccttaataccgtttcaactatttcaactaccttacagatactaaggagaaaagagtggttatgtttctcttccaagttttttttttagtgctttctagttgatcccaagatttcattttgattagcgtggtaataccaatgcacacacattaactaaaaaactcagagttccattgctacttaggatgatgaatgccataaaaagaatattgctcccactctaacaaccacaaaagagtcagatgatctacaaaactgtaactattcttgagcccatcagagggctgaaatcataacacagccaagtaacctgaattccaaagagggacaagcttccaaagttagattgcacacaaagctttttgcagaacaggggagacagaggtggtcaccattcaactaggcaagaaaaaaaatcagccaaaatttgaatgaattcttaaagggcaagtgtgggctggcatgtcagtttggaagagctaggagccccagacacaggggaagtttcactcacaatctca

SEQ ID NO: 84037 - DNA, 1020 bp, Homo sapiens
gctgtgatcctgccactgcactccagcctaggtgacagagtgagaacctgtctcaaagaaaaaaaatgttctagtaattcacttgttgaaaaatacacagtaagtgcttactctgggtcaagcactgtgctaatgaaggaaataataaggtaaataagtcaagattcctgccctcaagctttagtaggagacacagaaacaaataatcacaatcctaaaagatggagattgcaataaaagaatgcacaaaacactatgggaacacagaggatggagtaagtaagtttggcagagaagggagagatcttcctaaaaccacagtcagttggtgagagaggggatcacccaaaaaatgaggagagatctttaataaatgcaaaatgaagagagtaaagatctgcacccagtgaggaagtttagaatagctgagattataacatacgtgcatctccaagcctctggctgagcctgaagtgatgaatcctaaaaatctacttcctcaaaactccacaagcctctgaaagacacagagaaacagccccaattgcttagggagccagcgctgcaagaagtttgctcccctgaagctgttgacagttttgactcttaggtgaatctttggagaggatgcaaacaaaactctctcgtgtgcatttaagaagttctcctgtcatagcctggcgtggtggctcacaactcccatctcagcactttgggaggccaaggcagggggactgtttgagcccaggagttcgagaccagcctagataatgtagtaacatcctctctctacaaaaaattatgcaggtgtagtggtgtatgccagtagtcctagctactcaggatgccaaggcaggaggattgctttagcccaggagttcaagaccagcctggacaacatagtgagatcccatccctacaaaaaaaattttttttaattagctgggtgtgatggcatatgcctgtagtcccagctactagggaggctgagatgggaggatggcttcagcctgagggatt

SEQ ID NO: 84038 - DNA, 1102 bp, Homo sapiens
acatttatgttgttttcagttgctgaacttggaaaacaatgctgttgtcattttttcagctcaggaatcaggcagttttaagcctgaattgctcaaatatcccatggggtccttcgctacctgatttttcccaaatgattccttgttcttattagtaaaatattaagattaacagctctgccccatatgaagctaacaacagaaagatattaagtaactgatatattctgcaaaaataatattcacatacaaatacttacacaaaattatcattgaattggagaggtgcgactgaataggtactgtattcgaaagtctccttgcagttcatcagataataaagaacacacaccagaagaatcacagaaatagaacgtaccctcgagttacatcacaaggagaaaaaaaaaatctccctagataagaaattcaggtttattttatcttaaatcagaccaaggggatttaggttgcttttttaatctacttgtgcataacgatctctcagattaatcatactgttcaatagaatattattattaattagacatgtcagcgcttcaggcagaaaattactgggaagtaaaaaggtctatattccaaaggctcataagagaaagatttccatttctatcacggcacatctctttcagttccaattctcagtggaaattcctcaacgaattcagtccttgtaacaataacatttcgaagtgtttcccatttaaaaaatagctgaactcgagtttgccttgtaagatattttctatgttattggtaagccaattaaattttttagggcacatagttttaaggaaagtccttcagtgttccccagattgtcatcatctctcattaggaggtcttagacaagactgaggcacagaggagaacaatggggtcatcagttttatcccatgggctggcgtcctctaaaatgttctcatttccatcctgtcggctcttacaggtcactgctgcttcctcctcatccccataagccccatgtagtacacctgtgccactctagccacatgggaaaatgttactggtcccccagtaggccaggattccatggggctctctcggacacccaccgaca

SEQ ID NO: 84039 - DNA, 1725 bp, Homo sapiens
agtgcaagagctgctatagacaacatgtaaacaaacaaaagtggcagtattccagcaaacctctataaaaacaggcagctggcacagtttgtcagcccctgcactaaactgtttaaccacgcttcttataggtacagtaaggagagagatggggaactttacccctttatgtgaatccttacaagaacgtacccatgtattactttaatgattaaaggaacaacaataaagaagatgatactggatgacctctggagtagagatcactaactctagtgtctaaaatgaccagctagtcatgtcatttgccaaattgaaaaatatcaggaagtaactggacttctagaaaactgaaaagcatgtgtcttttttaaagggggcagcccctacctggctgtagctggtagttgccaggtattccagttttttaagagaagctggaagtctggatttttatgtgaattctcccagtttttggggcagctcaaaaaaaattttttaatactttgctgggcaagtgaaacacgtaagtgaatcagaactggcctaggggtcttcaattgtgacctgtgttctaggtttctatcaagcaccctaaactaactttttttttcctctttagttccttttgatgaagatgacaaagacgattctgtatggtttttagaccatgattatttggaaaacatgtatggaatgtttaagaaagtcaatggtatgtcttgatgttctaaggtgttacagcatagaattgaactgtgtgtatgggggtcttctgttcgcttttctttaacatcaagggccctttcacttagctacacttcagtaagactagtggtagtagaggaataaggtagaatacatgaaaaactagagtagcaatttaaggccaaataggcgacctgggtttgggtacaaggggaaataacctctcattgcggcagaaaagtgaagaactatccagtaaagtcagtcttccattagagttttagtaccaccagggtaaatatgtctggaattttcaaagaggtaaaggacataactactgatgttcttatcctttttgagggagttgtatagatcttcatgaaatagttaaagcctgctaatttttttccttcctagccagggaaagaatagttggctggtaccacacaggccctaaactacacaagaatgacattgccatcaacgaactcatgaaaagatactgtcctaattccgtaagtggtgtctatttttaaaactcttgaatgattttttttgccagccagctcaagtaagagcatcctgggaagaatttgagtagcaaatctgcttactgctttatctccataaacttctgttgatttgtagtgctctgtgaagtatactgtgacctaatatatttgataaataatagtttatacctgctaagtaccaggtgtatgagtttcgtaatcctctcggtaactgtatatcctctttacaaatgagaaaactgaggttcagaatggttaggaaggtctggtaaggggtgggactgggattgaaattttggctgtgttgactctaatgtccttgtgctaggcactgtactgcccctcagcttattaatgaaggggatcgaaaagcagaagaaatgatgagatcatttgaagcataaatgcatttttgctgaatattctggttcatttctaattgattacaagaaatagctttagtaattgtgagaagaatgcctga

SEQ ID NO: 84040 - DNA, 1148 bp, Homo sapiens
tttttttaagacaatctcactctgttgctcaggttggagtgcagtggcgtgatctcgactcactgcaccctccacctcccaggttcaagtgattctcgttcctcagcctccagagtagctgggattacaggcgcccgccaccacacctggctagtttttgtatttttagtagagaggggttttcgccatgttgcccaggctggtctcgaattcttggcgtaccaaagtgctgagattacaggtccgtgcctggccaaagcggtatacttttaagaatcaacctgagacctccctgtgcgttcatgccaagtgtgggcttgagggaatttccagatttttctcaacgcacagtgccccagcagactgcatcactgagcagcaccacagtgatgttagctttgaaggctaagctttcaaagtaagccttacccacccttgccatagaaaattctcagtcatgcactcattaaatgagctgacttaaagcaaaagactcagggtgcgaaaaggaacacatgtcagttcgtttgtggaaaataaataattatagttaggcttcctctcccaggatggaactccaacctcgaaaacatttgaacacgtgaccagtgaaattggagcagaggaagctgaggaagttggagttgaacacttgttacggtgagaccctagtacagcatcaaaatcattcactgcccgagaggtcacacagtgtaaggaagaggtctgtgtcgggaatatggagacctggggtctcgtcctggccgtccactaacaagtctgccattctgagcaaatcacagtccctttccagacctttgttttattgtctgtaaattgaagtgtttgaactacatcaactgtaaaatgtcttgagttacaatttatgactttgtggatagcataccttgtctggaaactataatgttgactgacgggaagagaggtatgaaataaatgcaggcctgcactctccactaggtgtccttctcaacaaatgtagcccattttctggagagaatcttcatcttggagtagcttttgttttaaaatcctatatctattataatccttatttgaaaaaggttatagttttatcagtcaatgaggttccttctagttctaaaaattaccatcttagttaagct

SEQ ID NO: 84041 - DNA, 1482 bp, Homo sapiens
ctgataacatggtaccctgatgccttttcctgccctttttaactgtgggttattacagagatatcaaagacacgacggtgggcactctgtcccagcggatcacaaaccaggtccatggtttgaagggactgaactccaagcttctggatatcaggagctacctggaaaaagtcgccacaggcaagctgcccatcaaccaccagatcatctaccagctgcaggacgtcttcaacctgctgccagatgtcagcctgcaggagttcgtcaaggccttttacctgaagaccaatgaccagatggtggtagtgtacttggcctcgctgatccgttccgtggtcgccctgcacaacctcatcaacaacaagattgccaaccgggatgcagagaagaaagaagggcaggagaaagaagagagcaaaaaggataggaaagaggacaaggagaaagataaagataaggaaaagagtgatgtaaagaaagaggagaaaaaggagaaaaagtaaaacatgtattaaatagcttttttaatttgtaaattaaaatcttacaaactaaatcagtgtgctgctagagggttctttttcacttgacatgcttattagaaagctgacccaacaagagctctctgcctccggtcactcttgctgtggtgctacgtggaagtgaatggagactgatctcaaatctgaactgcagctttcgctgctgtgagttggggatatgatagtcagctcaggcttcagattgtatgagaaaaatgaagagaagtcaacaaatattttggtactcttcattcatttatctctaaaaccaggagttgaattttcctcatcttgaaagactcttggggtctgtttctggtattttacaaaattgctaagtggaatgcatgaattgcattatgttctctggtaacacgtagagttcagacccttctgaactctgttgataataccacaccatgttctggacccatagctctggcatcctcaggggttgtgatccagctccatatattgtttaccttcaaagatacaattaaatggcttgatttttaagctgtgttctagtcgtttttgacttcgggagtagtgatctgtagtttccagaagcagccaagacagtcttcgattggagctgccttaagttctcttgcacttggtatcatttatgaaagagcatctcattcccctaaatggaaacaggcagtctgctgtagtgaggagagttctctgagcccagaagacccgggttccagtttgtacctcagatccctcatttatgaggtggtaggttgcagtccgtcatctctgaagtccccagaacagtgtttcaaaagggacacatttaccacactgcagcaagttgtaagtacctcagaccacaggccaaacaggcatgttactaagaatggaacaatgtttcccccaagataagtgcacaggactcctagaggaacaaattaaataaggcactaaatca

SEQ ID NO: 84042 - DNA, 1054 bp, Homo sapiens
agctactgaagaggctgaggtaggacactggagcccaggagctcaaggttacagtgagctgtgatcacatgccactgcactccagcctaggcaacagagcaaaatcctgtctctttaaaaaacaaaaagtatcatttggatttaaaagactttcccagggtccagtgaactagcacaatgccacagacttgtaagttggtcatagtttgatgaactgaaatgtttattgagcatctaagaacataggaatccccaggccttattatttttaatagtttggcccacatacggacaaaactgacttctaccttcctaacagaaatcttccatttctacttatgaagaaaatagcttatagcctgtggagtcacttaggcatattttctaaggccaaattgctgccatcatgtagaagagggggagcccagtagtgctaccgatgaagtcttgctcatacaaatagcggctgacttgactgcaaaacccagggcccacccctaaaataaagccttacatttgtgtattctggcattctggagatgagacttctaaacggcttttgctggctttggaaacactaaaaaagtattctggaaaaagtgtgatcctcagcctggatctcatcttcctagctgcaacattagcttcccttcgatttcaccacagcttcagaatgactgcctaatggatttcaggctgctcctgtgacaccttacagaggatgctgttcactcctgaattacggttttctgtttgaaaacacgaaatatgcgagttatagactggggataaatgtggagagggtcctgaagtcaaggagaagattttaccaaaactagagcacttcaatggagaagtaggcggagtgtggtggctcatgcctgtaatcctagcactttgggaggtcgaggctggtggattacttgaggtcaggagttcaagaccagcctggccaacatggtaaaaccccatctctactaaaaatacaaaaattagctgggcgtggtggtgtgcacctgtaatcccagctacctgggaggttgaggcaggagaa

SEQ ID NO: 84043 - DNA, 1594 bp, Homo sapiens
acgctggtttcgaactcctgaccacatgtggtccacccaccttggcctcaattatgtgcattttggtatatttacttgtatttcaacatcttgtgagtttgaaaaacctgaaaggccagaatgcttccttttatttctcaccatttgggcagcacctaagtggttttgtaaaatgcagcatctggtgctgtgggtctctctcaggccttgagggacacttccttcctccccactcgcctcctctccactagactttggttcctagagggcgtggggccgggtctgaggttcttgcctgccttccctcccattggtctttggttgctcatccctctaactgcaccccttcttggtccttcctccacagacttcagataatagataagtcattagcaaaccagaccgaatctttagggtgaagagctccccaaagccatctggtgaggtcattgtggggaccagggactgattatttgtcacctggatcacaaagatgggactgtctgctcaggctggtggtgacaggatcctgacccgtggtcctctcccgctccctctgctccaccaggacacatgtataggacactgtgctgtgtgcagtggagaaatctccctgggccaggggaaagttcagacagtgcctctagattgtgttttgcctcctccaatgtagagttgacatctggaccccagagcccagcagggctttctgtcagacatgctagggtggtagaaatgggccctccaggtccccctgcagtgcactgggcagagacctccggaaagccggcagcgggagcgcttcctgggcagcttcccccagcacagtgttcccaaaccagtccatccggaaaacagtctgtacagcaaatgctgtgtgagatcttaggcttttcactttttttgttttgttttgtttttgaaagaaagaaaaaaatacaattaacaagcctcttttgtaaatgggtttcctttctatgtataaaatcgtggtggtcccttgtttttacatgttcatgctgtgtaattttgagatgttactgagatatgttctgaacataatgtgcatttttttctgtacagatgaaatgggagaatttaataaagagtttgcaggtttttacttgttaaatcttctctgtggtgactgggaggaacctcaaccacctctctgctagtggaagcagtggccttgaacttgccaactgatgctcacaaaccttgctgatcaggtccttagttcttgaccagttaggttcagcagagtaggactcaaggacttttagaggactagggaccttgatccccttggtttctgtatgctgctagtagcagagctggaagtcacgtctggggttttctgactcttgagccaatgtgtccagaattattcattctactgatatgtttaagcccacatcatgaggctctgtcctggggagagcagaatctggcagctctgtgtacagatctgacgtgtggatggctggtcctgagaggcgcctgatcttcagtggccacccttccccatcacccccttgtcagtcttctccctcacattccagcagcccagtccctgcgtcagtagcctttc

SEQ ID NO: 84044 - DNA, 1523 bp, Homo sapiens
aaacaaaacagggcctggggcacccctggttcctggccttataggtcagtcaactggctgagaaatggtcaagaaaagaaacaatgacccttctgtggatgtgagtggatgatggactctggcctgtgtctactctcctgatgtgtagcccaccaacagtaatagaagtagagggtagggggttttgccaaggctaaggcttcaggtacttgctaacagttatagcagctgggtcactgtcatctggacttaccagttcatgccagtgtccctgtgacttatgcatagtgtgcgccacagccctctagaggtacctggagcccggactgccaggctggaggctctggggtactgaaggtgagctgtctgggcaaactattaagaacaagacgaactgttcacaatggagcttctcccacagatggggagctctgtgaggccttcacctgggtgcatgttggacttccattgctgttgctgttgtccctagacaagcccgttagcaagaagcaccggcaggggagccatgcactccataggcttgggatcacccccgggaaagcgatcttccccgggctaccacccccagctgcagttctgtgttagtgcatccttcaaagctaggagaattctagggtgaccagtgagctaatgttgagtgagcaggtattgacttgaacacactgcaggcctttggctgtctcatgctgtccttactcttcttgggaacagtgagtcactcagctggccagggtggggatgcatcctggtgaagagacagctttccctgaagatgctacagaaagttactgtcagatttcatttgtttctgtttcctgagatcaactaacagaagaatctaatggtgagagtgtcttcattcatgttttacgttttatcaaggcacactggaaagggaattatgtggctgacttcccttggccttcccaagagaagattctgttcttatgtcagtgtggcttctggaagtgtctcctatcctcccatcctccaggcctgtggtgtgacttctgccccgaagttcctactatagtgagtcatctggggagaggccactgaaaagaggccttcccttcccatttcctcccctgcctccttagaacacactctaagtcagaacttaatctaagaagaaggaagctggaccaggaaccttggaagtcagccagccctagaacagtcagcctaaattttggccgtaatggcttttttggttttttgttttgtttctgagatggagtctcactccgttgccaggctggagtgctgtggcgctatctcagcttaccgaatcctccgactccctggttcaagcgattgtcctgcctcagcctccggagtagctgggattacaggcatgcaccaccacacccagctaatttttgtatttttagtagagacggggtttcaccgtgttgtccaggatggtctccatctcctgacctcatgatgtgcccacttcggccttccaaagtggccgcaaagtggcccacttcggccaa

SEQ ID NO: 84045 - DNA, 1097 bp, Homo sapiens
tgtcttccctgaagggtgttcagtacaaggcgtgtcagtttgtggatcagttgatccaagttactccttgtctaacctgactgacatatatttgaatactgtggttttctttcttttttttctatttgctgcccttcctggaggcagtgggttccagaagccaactgattgtccccctgccaagtcaccaagggaagctgctaagctgcttagtcccctcggtcctgcttgtagggtcttcctgattgtcaacagctgtctgggatgcttcagtctcctaaaactggaaacgcagggtgcgagcagcacacactgcctcccgccactgccagccggagtgagcggcccgagagtctctgcaggttcccctgggggctgggggccgctgaggcctaatatcaagagccaggaatgtcatgtacatggaggtgcctacggacgtgcctggtgtggtttgcaggtaggatggatgttcactgtttgaccgggtggggtatccttcctctctgcagtctccttcccagtatgcgtaaacacccttatagttctaattgtgttgatatttctgttctttctgaattgagagaaaatcccattcgttgtctgcagatttggaagtttgatgaggaatttggttcttgaaacatctgtctttttttttttttttgagacagagtatctctctgttgcccaggctgcagtgcagtggcgcgatctcagctccctgcaacctccacctcctgggttcaagcaattctctgcctcagcctcctgagtagctgggattccaggcacccgccaccacgcctggcttatttttgtatttttagtagagatggggtttcaccatcttggccaggctggtcttgaactcctgatctcatgatccacccgcctcagcttcccaaagtgctgggattacaggtgtgagccaccctgcctggccaaaacatttgtcatctttataaatggtcagaatagaaaagttagctctgccagtatcttcaattacttattacaagaatgtctttcatcatcttacttggagcattttccaatgactggctcttgagagccccaggcagggccccgagcaa

SEQ ID NO: 84046 - DNA, 2130 bp, Homo sapiens
agtggtgaaatctgcttgctaggcttggtgtgagtgctaaatgagtgagggcagggggagcccttcgtccagggcccgacacatcttcagtgtcctggtgttagtggtgatcactgtgatggaattgtgggtgactgcaccactttgtctctttctgtatttctaattttgtgcagtagacgtgtgtatagttttatgatcaggaaaaagagttgtagctctgtgttgatttttcttatctcctgccctccctctccaaaagaaaagacataaattaaactaggaactgagagggataagttagacctagcactgccaccagcccagtgctctctcagagaatcacattgccttgtgtcattctaggtggccccagcagatggcttctctgatcttgccatgcaagtaatgacgtctccatctaagaactacattctctctgtgatcagtgggagcatctgtatattgttcctgattggcctgatgtgtggacggatcaccaagcgagtgacacgagagctcaaggacaggtagagccaccttgaccaccaaaggaactacctatccagtgcccagtttgtacagccctcttgtatagcatccccactcacctcgctcttctcagaagtgacaccaaccccgtgttagagcattagcagatgtccactgcgttgtcccatccagcctccactcgtgtccatggtgtcctcctcctcctcaccgtgcagcagcagcagctggtcgctggggttactgcctttgtttggcaaacttgggtttacctgcctgtagacaagtctctctcataccaacagaacttccggtacttccagaaccaactcacctgacctgcaactcaaaggcttttttaagaaaaccaccaaaaaaaaaaatttttttaaagaaaaaaatgtatatagtaacgcatctcctccaggcttgatttgggcaatggggttatgtctttcatatgactgtgtaaaacaaagacaggacttggaggggaagcacaccacccagtgtgccatgactgaggtgtctcgttcatctctcagaagcaccttggggcctcgccagggccgtggtcttcaccgaggcgtgggtgggcagccgttccccaggctgtgtggggtcctgctttcttctgctgagacagtgacgctttccagtttccaccctaatcagccactgctggtcacagccccacagccatgggtatttctgtggtctcctcgcttcattgaagcaaagcatgagccttcctagacaagggcagctggggaggggaagggaccggaagtttgtgaagttgaacagtccatccatctgcactgagaggctggatcctgagtcccggggcagcaggatcccaggaaccttcctcctccagggcagcacaggactcagccatgtctggaccggccctgctgaggctacagtcactctggaagctctgcgcttcatcaggaggcaggactgtggcgggaggggtccttgaagatgggtgtggggagcagtgggtcaggaagtgggagccagaggtttgactcactttgctttatttttcaggctacaatacaggtcagagacaatggcttataaaggtttagtgtggtctcaggatgtgacaggcagtccagcctgacctttctgcacactccagacaaacttcccagacaagctcctttgtgcctctacgtggagagggtgtggaaagttatcacattaaaagatggaggatttgctctgttttttttctttctgtccatttgctgcgtgtacccactctagtaggcattggctaaatgttgtattttggcgattcatcaacctttgcagaatatgggctttatagaagcaatattcttggccatcccgcctcattcctccagtgtggagatgacaagtctgggtgtgagagggaggggtccgggcatcatggttcagcgtggcactcctttggttgagtttggggcatgagatcacagtggctgcacaagagagcagtgtgtacagtaggagagacatttatgtaatatatattttattaacctgttagatgtccacaaagtattataaatcacgtgcctaaaactgtccatgtagaccaaggcctgccctcggcgcccc

SEQ ID NO: 84047 - DNA, 1050 bp, Homo sapiens
cagggttttgccatgttggccaggctagtctcaaactcctgacttcaagtgatccacccacctcggcctcccaaagtgctgggattacaggcataagccactatgcccagcctgttttcgttttaattttttgaaacaaggtcttactataatgtagtctcaaagtcgtgggctcaagggatcctcctgcctcagcttcccaagtatctgggattacaggtgtttgccaccacacctggctctaaaaataaggaggttttaagagaggcttcggacgccaaccctggaggttacatatcatttctctccattgttggatcctggatcaagtttcctagtatgtatttaactttgttgagcctgcagatctgaattctctggtggttgtgcaccctcttcctcatctttacagaaatttctctattctgtacagtttcaggttcttcttattattcatttcctcccacagaaatgtcctgtctcatggaagcactggaggataagcgggtgaggttacagcccgagtgcaaaaagcgcctcaatgaccggattgagatgtggagttacgcagcaaaggtaatgaccaagagaatctccttttttaaaaaaacaaaaaaatatggaacacttcaccaatttgcatgtcatccttgagcaaaggccatgccactctcctcgctgtggctgtccagcctcttttagatatcgcactggtcttgtccttattgtgagactagcaataagtgcgtttgaaaacgtggtcagggccgggcgcggtggctcgcgcctgtaatctcagcgttttgggaggccgaggcaggcagatcacgaggtcaggagatcgagaccaacctggccaacacggtgaaaccccgtctctactaaaaaacagtaaacatggtcagtgtgcttttagaattccttggctgcccgtgagcctggagccgtctccctgtgcatcgggctgtctgcaaggctttgccagggccctcctttctcatttcgcccactgttcaccgctgaaaagtgagtcacccaaagacaaaagag

SEQ ID NO: 84048 - DNA, 1088 bp, Homo sapiens
tgtagctgtgaatttatcaggctgagaattgggtctgattcatatctagcatccagtagtctttctcaggtggtaaatagtgggttgaattgaacctcctggtttgtgcccactgtctagtcggagctgttgctctgggaaaatgcagagagcctatctccaaaatgaatgtggacaaggagcagctctggaaggcagaagaaaccagaaatcgtgggtgtgtttcttttccattaggctggagcacagcctgccagtcatcctgagtttttgtctagttgggtttgctgtcagctgtaaggttgtaaatccttatctttggtaaggaaatcctgattccgattgcctgggaatgagaaatggataaagaaatgggaggcacagtggagctgaatgtttcaatcagaacacatggatgagcagtctctgacatctctcaacttgactataactcttttgccatagattatcgaatgtctgaaagaaaacaagaagcagctaagcacccgctgccaccaaaaagtatttaagctgcaggagacagagatgatggacccagagctagactacaccctcatgagggtctgcaagcagatgataaaggtgagaagccgacaccaaaggccgagcacggatgaacaacaaaacaacaaagcacaaacaatggcagcaacttcctcaggctcagctttctcaaagtgtggtccctagacgagcagcagcagcagcaccccctgggagcctgcgggttcctgggcccccctccagatctgctgaatcagaaactctgggagtagagcacgaagtctgccttagctgcctccctagggggttctgatgcaggctcaagtttggaaaccacagagctgggataactgacctcactttgacctgaggcacaagtaaatggatgtgcaataaataaatgattggttttgaggacgattaatagtagctgtactaagaaagtcaccatctaatgtcctgatcatccatctggcacattcagaagatttttctgttttacaggttgttttgcttcattccctcctccagcaggtattccctgcagcagggctgacctgagt

SEQ ID NO: 84049 - DNA, 1071 bp, Homo sapiens
caggagaatcacttgaaccgggagatggagtttgcagtgagccgagatggtgccactgtactccagcctgggtgacagagcaagactctgtctccaaaaaaaaaaaaaaaaaaaaaaaaaaagacatttcaagctggaagatttggttccctaactttgagcctagctctttcattaaagtaataataaaagtagaactctacatttatataatggttttgactttccaaagtgattttcacatctcagcagtcctgtgaaggactaaataaggtgtttcagggtagacttggcattgtgttttgcaaagaaggtccaaggccatgcagctatttggtgacagaattgaaagtaaagcctgattctcttgctgcaaggcgactttgctatgtagaagccagggtcactagacaagatgcagtcaacaaataagtctccagaacatatgacatctccagcctaaaccaagctcacctttccatgctggctccctcatgcagacggaggacatccgcttggagccagatctatacgaagcctgcaagagtgacatcaaaaacttctgttccgctgtgcaatatggcaacgctcaggtaactttttgcttttcttttgtaattgtaaaagtaatgtgaaggtaatatttaatgttttctcaaaagctagtgcccataaggtaacattttagtcatgaattttttgctggtgagacaggacccatctcatcccttccaacctaatcccttcttaaactacatcaggctgcgtttccttgggttcttcacctgcactcctctctaactcattttcttccctctttcaggttacctcatccttccctaccttgtctgcctagtaagctcctaatgatccttcagatgcctcctcctctgtagcattctcaatgctctgcacctccaaaattaaccgttacttcactgtgttcccattgcacagaagttcttaactagacgtcacatcagaatcacctaggacacttttttttaatagacagaagcaggaccctatccagaattgtcaggagtgaagtacatacaaacaaatgatttt

SEQ ID NO: 84050 - DNA, 1093 bp, Homo sapiens
atgagctttttcagcgtgactgtccaaattcttccatgttgctctttgaaaggaccatttctagaacacttgccctcatacaaaccaaattcccaatttgctcaggtttctctacctttcaggagtgagtttcacagtaggtcaaaagtacagtcctagagttaagagcagcattcctctgtggtcacatgtttttaacacagatgttgaactgtcgttgcacacatgtgccctgtgtggcttccccttctgtcaggaatgtagtcagcattcatgctgctgcctgcctttcatgacacccacagtcaaattgcagcttttagcaccctgaaaaaaaatacagtgagccttacaggaaagacattcccccaaagggcatcttgaattcttaatggtgtgaccccccccaagcccagctctcaggccatctgcccttgtgtggccccagccagcctcaagcttctttcgtctgcagggtggacgtggtgatctgcctgagcacgaccgtgcgcaatgacactctgcaggaagccaaggagcacagggtgtccctgaagtgccgcaggcagctccgtgtggaggagctggagatggtaatgcctcccagcctctgctcccagaaaccacagtgggccagggcttggaaagctggggagaggctagggcaagggggaggcattttatccactactgtgatggttaagacttgaagtcctgtgcaaaagttttaacatacgaccattagcttcctgtgtcattcttttgattttgaatgataaaacctttcttcccacatgtaactggaagtccagctgtaagacaggctctaactaagcatgtgatccaatcactggatcagtaatgtcctcaggggctgggtgctgtggctcatgcaggtaatcccagcactttgggaggccgaggcaggtggatcgcttgaggtcaggagttcaaaaccagcctggccaacgtgatgaaaccctgcctgtactaaaagagacttaggccagcgaggtggctcatgcctgtaattccagcactttgggaggcaaatgcggtcaaatcacttgaggtctgtaattcaagaccagcc

SEQ ID NO: 84051 - DNA, 1034 bp, Homo sapiens
cagtacatcagcctaggaattgttagcatctgcccaggaattgttagcagtaatagtggctccttcttccaactgtctcctagtacctcaatattgagtgaattctgactatttcatattcatttactgaactatttaaattgtgggagtgaaacatacccaggaaccattaggatctgacagttgggaggctatgttagatattgtcccaaaagccagctgcttttcggaaagtgaaaaaaaaagcgtatatcatgtcttatacggaacacagtgctgtgttagttttatgccactgaatgtataccattgtgattcttcaggcttattttgattacaatttatggtgtgtcttttttttgtgagggcttctagaactaaccttgcttgcatttgtttcggactgggctacaagttttgttcattaattgttaccaatgaagtgtaaatgcatgctgtcttccccaggatgtggcagataaccagatagactctggggacctgatggagtgtctgatacagaacaaacaccagaaggacatgaacgagaagtgtgccatcggagttacccacttccagctggtcagtgacacctggctgccaatatcccatcatagctgcctggatgttgactgaatcctttccttttttggaacatcagagcacctctgatgttctgttaaaagtcatttttttccagccaggcgtggtggctcacacctgtaatcccagcactttgggaggctgaggtgggtggatcacttgaggccaggagttcaagaccaacctgagcaacatggtgaaactccgtctctactgaaaatacaaaattagccaggcatggtggcacacacctgtaatcccagctgtttcaaaggctgaggcaggagaattgcttgaacctgggaggcggaggttgtagtgagccgagatcgccactgcgctccagcctgggcaacagagcaagattccatctcaacagcaacaacaaaaaaatcattttttccagccgggcatggtggctcacgcctgta

SEQ ID NO: 84052 - DNA, 1050 bp, Homo sapiens
gttttttcaggagctagtgttgcacgggtttctctctttaaaggcattattagtatgtgttccccagtaacagtggtttggcatctgctttgagggcagtgctctggcttatgagcttataaactgaagatggatatcagttacccctgttttcattttgaactacttagcattttgggaaaatctgcaaaggctttgcatactctaatgttattgctacatgtgtttttacctcacttttcttaattctgccttctcatttgttcaggccgaaagggaatatgtctttaaaaatttgcctttcaaagtataacggaggagcagttctatatttattctggggctatctacttcaaatactagaatcgtttccaaaagtatgtattagattatttgcccatcagatattactgattcagaaagagaaactgctcctcctccaccctggctctttctaaagcagaagtattaatatatttaattttctacaggatattcaaatagaagccttgctgatgagagcctgtgagcccataattcagaacttctgccacgtaagtgatgtctggaggagcaagggttaaaaacagaaacaaattgacagggactctcccctgagtatctcagactcacctctgtctgcagcatgtattactcttgagtgttagccagctttgacaagttaaaattaaaaatgtaaacaggccgggtgtggtgaccaatacctgtaatcccagcactttgaagccaaggaggagcacttgagcccaggatttcaagaccagcctgggcaacatggcaaaactctgtctctacaaaaaatagaaaaaattagctgggcgtggtggtacacacctgtagttccagttacctagggggcagaggtgggaggatcacttgagctcaggaggtcgaggctgcagtgagccgtgattgtgccactgcactccagcctaagcaacagagtgagaccctgtctaaaaaagaaaaagtaaacaagatcgagagagagatgctaccatcctggaacctgtgtttgattagcttttg

SEQ ID NO: 84053 - DNA, 1050 bp, Homo sapiens
ctttgagaggccaaggcaggctgattgcttgagctcaggagtttgagacctgcctggacaacatggcgagactctgttctaccaaaaatatcaaaaaagagcctggtgtgtgcctgttgcctcaactgcttgggaggctgaggtgggaggattgccttcaagccccgggggacggaggttccagtgagtcaagatagcaccactgcactccagcctgggtgacagattgagagatcctgtgtcaaaaaaaaaaaacaaaagaacaaaattcaggaatatacttttacatatcttctgtctccacgcccctggaagtgattatcaatgagtatacaagcaaacacctcataaaaaccctgagcctgtgttagaaggaaatgtctattaattagtggttatcttttaactcttaaccttataggctggaccctgtcctgtaccgcaagtgccagggagacgcttctcgtctttgccacacccacggttggaatgagaccagtgaatttatgcctcagggagctgtgttctcttgtttatacagacacgcctaccgcactgaggaacagggaaggagggtatgcagtgaatatcgacttcatttcttcttcttgtcatttgttttttaaattgtttgctgtatattcttctgatttcagtcatattaggaaaactttttagactattttgtggggagaagattgctgcacttctagaaacttcttccttccgtgagtgcacttagagttgccctaccagcttctatcatctgattttatgtttttaacaaagtgggtgggggaagatttccagatttttttttttaattcccaaaatctgaatcacaaatggacagttaaattctgctgtcctaactttatttaggtttaaggatccattagaagcttttagccaggctacaaatggattttaggcttctcctcttggcagctgaacacatttgcattgtctgcccatggactggttggagcagaaacctccatacctcagtctcttggtatttgtctgccccaactgctgctttttgttggg

SEQ ID NO: 84054 - DNA, 1743 bp, Homo sapiens
atagtaaagcttttaaaataattgcttagtggtgtgataatggtattaagtccttatattttaaagaaacatgctgaaatatttacaaatgaaatgatggagtatctgggattttgctttaaaatatcagcaaagaggcctagagttaaaacagacttggccacagattgataaagttatggggagggaaggtggctgttacattattctctacttctttgtgtgttggaaagttttcataaccagttaaaaatacagcagctgcacactgcccttgtgcatgcatagtcttcagtgctgagtggctctgaagttgatcgaaggtataaccactgtcaggttcagttaatttgagtgattcttagaaaaataaatctgattgccctaagaaaataactaaaagccgccttctacagaccagggaaatactatattgacatagagttctgaacacttctctcttgttacaattttacacatttaatggctaggatcttgtcgtgcctgatggaacatttatacacagagaagatggtagaagactgtgaacaccgtctcttagagctgcagtatttcatctcccgggattggaagtgagtattttgaagccaaagtaaatgtattgcctcagcctcttctcctgtgtagtcataattacctgtatttattaaaataatcagtaggaaactctttttgttcagttctgggacagctaacacactccaatcccctgaaaaactattctttatcactttcagaacattatctaaaagcagagtcagcccactaccagcctgtaccacacatccttgttcaccacgactttggaagtcagggtcaaaatgtttctgatactacaaagatctgtctagtaagaagtatggcacctgtgggggtggcaaaagcgccttcagatatgtctctaagaagataatagtgcagttgtatttttattgatttgcagtggatatggtaattggcttttatttatttattcagagttactgaattaagtctgtcttaaggggtttttgtcaataagtgacaacttgattatctaatttccctctcattctgttaacaaaaagcggtgggggtgggaggatgaactaggagaaggatccgtattacagccagaatcactgagttcattggctgtcattcccctcctctttccgcatcttgctttctctccccacctccaaagcagccagtgctggatccaactgcttctctagcttttcaagttcagtggcttctccattcggttgttaagccaccatggtgtggtagttaattttttttggtgattaatatatattttggccaggcacagtggctcacacctataatcccagcagtttgggaggcctaggcagggggatagcttgaggccaggagtttaaggccagcctggtcaacatagcaagaccttgtctctataaaaactaaaaaaaaatcagccaggtatggtagtgtgcacctgtagtcctagctacctgagaggctgaagcaggagattcacttgaaccgggcgcggtggctcacgcctgtaatcccagcactttgggagtccgaggtgggaggagaacaagggcaggagttcgagaccatcctggctaacacggtgaaaccccatctctactaaaaatacaaaaaaaattagccgggcgtaggtggtgcatgcctgtagtcccagctactcgggaggctgaggcaggagaatggtgtaaaacccgggag

SEQ ID NO: 84055 - DNA, 1011 bp, Homo sapiens
tctctaagtgaaaatgttctttatttactcttttccacttaaatctggctttgccgggagcaccaggtttagtaatctgattaacaagtaggcagatgaaagcaaagaggcagccttcatattcatgttgtaaagacctccagggattactgagaacaaagataagcagtccccatcaatgactcaaacagaaaaacctgcagtcaaggtagagaaaccagttggaaaagtatttggcaaatgctcttgagcttggctagtgacaactgtagacaactttattggagtacattgtggtaaataggactgagcaactgaatgtatgaagacactgctcttacctagcacctaagtgactttctttcttccttcttaatttattttaattcagcttcaaacactgattcaggagactgaccctggtgcagattaccgcattgatcgagctttgaatgaagcttgtgaatctgtaatccagacagcctgcaaacatataagatctggagacccaatgtaagttatcttctccatggtatttatccatattgtatttcatttggcagcacagggaacattccttcaaatgacttttgggtggttgttgacatcttaactgaaattttgttgaacaagttgaacatacaccaacttttattaaaactagtattggaatgaaaacctaggatctgcctcatccatgatatagagacacctagacccaatattgtgatggtgtttacggacaatgactgagcatatatggacctatatattaggttactgaataattttatatcacgatcaaattaaaatgaaagagagaaacactcaggataggtggtacatactttggcactctgtacttttcatcctagttgtatattgactcattgtatacattgactacctggtaatcatcagaaaatacttgaaacagaaaatagaaatagaaaacaaaatgtggtagttgaagggagtagtaatggacaaaatgaatactaaagttgcaac

SEQ ID NO: 84056 - DNA, 1073 bp, Homo sapiens
tgcagttgttactggtgacttccttgggaaacctctgtgccagtgtgggtcctgggacccagaccaaaaatgaatcaggagacagcctatatttgcacttcatccttaaagcagcacagaaaggttgttgtggcgggggttaggaatgaacctaccttttttttttttgagacagagtctcactcttgttgcccaggctggagtgtaatggcgcaacctctgctcatagcagcatccacctcccgggttcaaatgattctcctgcctcaacctcctgagtagctgggattacagttgcccaccaccacacccagctaatttttgtatttttagtagagatggggtttcatcatgttggctaggctggtctcaaactctggacctcaggtgatcttcccgcctcagcctcccaaagtgctgggattacaggtgtaagccaccatgcccggcctaaacctgtctttttactgaggctacacttgtagtaagggatacagaaaaaagaaaatagactggtttgactttatttcgaggcacctaattcacacccagggctttttaaaatgtagcttgttgaaagaactagtgactcagcttgaaagatacataagtacttcccacatcaccctgtgtgtccagaagaaaagtactttccaaatctagagggtggcttcaagtagtgaaacatatggttttgcccatattaaatttagccaagtgaggctgggcatggtggctcacacctgtaatcccagaactttgggaggccaaggcaggcagatcacttgaggtcaggagttcatgaccagcctggccaacatggtgaaactcagtctctatgaaaaatacgaaattagccgggcgtggtggcatgcacctgtagtcccagctactcgggaggctgaggtaggagaatcgcttgaacctgggaagcagaggttacagtaagctgagatcacactactgcactccagcctgggcaatagagcaagactccacctcaaaaaataaaaaattaaaacattaaaataaaataaaaaataaatttagccaagtagggaagaagcgcttta

SEQ ID NO: 84057 - DNA, 1074 bp, Homo sapiens
agtgaatatcttaaatgtagtcttttctaaaagctttaattgtgtaggccaatggagattgttctttggctttcatttttaccctaatagttatcttattgataggatttccatgggcaaagcatttgcattattagtgcagtagtataaaacctgtttcatgcagaacagtgacaggagaagcctgaatatctggagtctaagcctattttatgctgctaaagcttttgctaattctaaacttttcagatgttagcatgtctgataggtatattgtattacagatagaaatatgtacttttaataggtggtgatttctgatgctaatacatagcatcacccttcgtaatgttatgacttacatcctaacttagggcgacaagtcagcagtgagtgccagggggagatgctggattaccgacgcatgttgatggaagacttttctctgagccctgagatcatcctaagctgtcggggggagattgaacaccattgttccggattacatcgaaaagggcggaccctacactgtctgatgaaagtagttcgaggggagaaggggaaccttggaatgaactgccagcaggcggtaaggagacattgctattgccattttgaatgtcacatttatcagctgaagagcctcttcctgatgctgtcccaccttgctttatatggatcatctgtggtatcacattgaacattaggtactaatgatcagagactgaacgttgcttcttcaggcatatcttagtaagaatgtgacatttgctacagagcaaaagtttgagctcataatcaataaaaagaattgtcttcttagatagatagaatgcattatttgctagagttcctaaagaaagggcagcttgctagactggatttcctaaactcagaatcaaggcaaaccaggttccaatcaatgacgacaggccctctaccaagagagaatttgcctgttgtaatagatttgattgagttgaggctgaaaaagagttgatatgaattgaaattttttctaagtttctaaattttttctgttactaatttaccgcatggcatgaattcctggcc

SEQ ID NO: 84058 - DNA, 1026 bp, Homo sapiens
gatgatatagaataattgaataattgtattttaaagcattgaacagaatatcccaaatgttatgttagttgccagtttgatgctagtgaaatttatgttcggggtattgttaaagtggaaaagaatgctgtgtgtcaagttaacatattgggatctgtgagatatttacatgttttggatagctgctattgcagcaacaactagcaagtgactacagaatttctaggttccccacccacttacccctgtctcatgccacactagtttagctcaattgtgaacattttaaccaaacttaaagatagatatgttggtaataactgcagttgttgacatgtacttggctgagtcgctgtgctcatcttagtggtacacgtcaacagtaaagttacatgagtggtctcacggctgttgctgtactctttcctcagtgtcgagaagcacttacaacccgccaaaagctgattgcccaggattataaagtcagttattcattggccaaatcctgtaaaagtgacttgaagaaataccggtgcaatgtggaaaaccttccgcgatcgcgtgaagccaggctctcctacttgttaatgtgcctggagtcagctgtacacagaggtagcattcatattttttttttaattatcatttctgttcctttttggattcacactctaaagctttatatatataaacgttagtttcctcccatatttgcttctttgagtatttttcttttttttttttttttcttgagacggagtctctcgctctgtcgcccaggctggagggcagtggcgcaatctcggctcactgcaagctccgccttccgtgttcacgccattctcctgcctcagcctcccaagtagctgggattacaggcgagtgccactgcgcctggctaattcttgtatttttagtagagatggggtttcaccatgttggtcaggctggtctcgaactcccaaacttaggtgatccgcccaccttggcctctcaaagtgcttggattataggtgtgagccaccg

SEQ ID NO: 84059 - DNA, 1046 bp, Homo sapiens
gcggcggctcacgcctgtaatcccagcactttgggaggccgaggcaggcagatcacttgaggtcaggagttcgagaccagcctgaccaatatggtgaaaccccatctctactaaaaataaaaaaattagttgggcagggtggcgggggcctgtaatcccagctacttggggctctgaggcaggagaattgcttgaacccaggaggcagaggttgcaccgagctaagattgtgccactgcactccagcctgggcaacagagcaagactgactctatctcaaaaaaaaaaaaaaaaaaaaagactcagactctaacacttctcttggttccctaattaacaaaatacatctgagaacaaatgacaaactccaaatatcatgggaatatttttttcgtctttactgcagtcactgtttttgttaaaagcctattaaattttataaatggaagcgctgtttgtccaaaggtatgtacgattataatcgtttaatagaaagctctatatgagattgtggataatgttcagcataactatttagctaaagtaataataatgtgtatgttccatcttatagacacaagctggtgagggcagagtgtataagtgcctctttaaccataaatttgaagaatccatgagtgaaaaggtaagtattattttgaaactaatgaatgttttatttgttttttaaaagctttctcagccagacacggtggctcacgcctgtaatcccagcactttgggaggctgaggcaggtggatcacgaggtcaggagttcaagaccagcctggccaagatggtgaaacgccgtctctactaaaaatacaaaaattagtcggccgtggtggtgggcgcctgtaatcccagctactcgggaggctgaagcaggaaaatcacttgaacccaggaggtggaggttgcagtgagctgagatcgcaccactgcactccagcctgggtgacagagtgagactctgtctcaaaaaaaaaaaaaaaaaaaaagctttctcaatttctctgaaacaatatttcttataatcttatac

SEQ ID NO: 84060 - DNA, 1054 bp, Homo sapiens
tcttctgactttatttaggatgttgaaaattatatccaattccaaacctggctccttttaaagtctccacagggttccaaacatacttttcaggaatcagaaatgaggctttttcaccctcgtgatgagtgctccatgcagtaaagccaagcgtttcagtccctctgtggagtagttcttgcctggtaaccaccaaggtagcagctgattagcctccttctagctctctgaattgtcacctccatgtatgagttactaagtctgtagtgactgaaacgattgcagaaaatagtactgctggagccaaaaggcacgacaggattgtttattcacttagataaaataataaaaattgttcctatggactaaagatagaaatgacacttttgtcatttaatctttcagtatgtctaccagttgggtgaaatttcagtttataccaggtcactacaccagcatcaaaggctttcttgtattttggggacggtgagatagactcacacatgaacttctgaaaaaacaccttccttcctatatcattcactctgtactacagccaaatttaaaaaagagggaggcatgttctcagctcttctctgcctttttctaaaacccgtagtttgcttttctgaagccagttattcagatagaaaacttatactgaaaattaacaaagcagcttctgaacacagaaaacaacaggcttgtcagtttcaaatttgctgccactgaagcttgaaactcttctatgactggctttgacttggcctcctccagaggaccgaggagaggattcatggttaatctgtttgtaccttgcctttgtatgaacacataaatgtcatgatttcaaaactatgattttttcaaatgttaatataaattttagaacaaagaagatacattaataaaggctttagaattttatataataataaatgttgtcaaaatgaaagggcagatttccaaaagtaaagatataaatgatttacatcatctgaagaaaaagactgtggctgccaacaaaggaacttaattgcggacatgtgccaca

SEQ ID NO: 84061 - DNA, 1066 bp, Homo sapiens
ggatacagtcgttggtaaggtaccagtagaaatgtctccagacaaaccgttccttcatgtagccttaagacttgagagactgcatggccttcatgatgtgaaggttgggcacattcttgtcttctgccaggtctgggtacttaggaaggtggacatccttcttggccaccatgactccctccttaaaaaggagttcatagatggcaatcccgttcttcttaggcatcagcatcttggtggctgcagggcccaggtccggggctggagagacctgcaacttaacagagatcgcatcttccaagtcaggacatttgaaggaagagatgctaatccatcccgtagaagacaatattgtgtctctggtaaatgttggatgtgcttttgattactcagaaaaatttttatataacctattttccacatcccccaaactagatcatagcagtggggcttaaagggtatgcaaacttcaaactttttagattaaacttaactcttcggtaggaaaggtgaaggactggtaggaaaaggaaaactagaaagatatttgccgttttcttccgtttataattaactccctattctagactaccttctgttgtatctacttggactaatggcgaagacgtttaaggatctgcaggtgcaaaaagtatcttaaaaagataccttccccacttcccttctctttcttctccccagtaattctccttgtacatttgaaatgggctgtatgacatcatcatagcctttggtaatgacacctaaaggcaggtccccctccccccatacactgacacccacacctcttcccaaattagccaactgacactttaaagttgtattttcttttatttaaaaaaaaaaaaataagggctgggcatggtggctcattccagcactttgggaggccgaggtggacagattgcttgagctcaggagttcgagaccagcatggccaacatggcaagacgcccgtctctactaaaaattaaaaaaaaaaaaaaaaaaatagccagacatggtggtgtgcgcctgtggtccccagctatttaggaggctgaga

SEQ ID NO: 84062 - DNA, 1609 bp, Homo sapiens
gttctacatcaattgaaatacaagttttaaacaaatgacagcaaaagaaattatgttaaaaatgctctggtacctggccaggtgtggtggctcacacctgtaatcccagcactttgcgaggccgaggcgggcagatcacctgaggtcaggagtttgagaccagcctggccaacgtggtgaaaccctgtctctactaaaaatacaaaaattagccaggcatggtcacacatgcctgtaatcccagctactcaggaggctgaggcaggagaatcgcttgaacctgggaggtggaggttgcagtgagcggagatcgcgttattgcactccagcctgggtgacaagagtgaaattctgtctccaaaaaaaaaaaaaaaaaaaagctctggtacttcacttgtaatttaggtgtaaactataaagactgccctgcaagtcatttaacagaactctcaaaattcttgcactggccatatcagctctgtaatgtgataaatagcatgaagtggacagtaacttcaacgatgcagaaaggggtgtaatggagaattttaatcattgacaaacgtaatgccatctgttaattagtgccattgtctgagtccattttgtgttgctataacagaatacccaagactgggtaatatataaaggaatatttatttggctcatggttctggaggttgggaagtccaagattgagaggccatatctggtgagggccagcttgctgcatcatcccatggcagaatgtggaagggcaagagaatgcaagagggagggcgggcttgcacaaggaatgtgcagaactcatccttttatcagaaccccactcccaggatcacggagataagggcattaatccattcatgagaccagtgctctcatgacctagtgagctcttaaaggtcccatctctcaacacttgtattggggattaagtttccaacacatgaactttgggggacatattcaaacgatagcagccatttgctgaggacacacctattatatatgaaataaaataagaagagagaaggtcctatagtcatgtgaagcttgtgatgagaggaaaagcattgtggtaaatggaaaaatagaatgggctttggagctgcagtcctggattcaaaccctagctcacttaccagttattatgatgttgggcaaattaatctctcagacctccagttttcttatttataaatggtcttccctttcccctttgttgttataggtgagatcattcgagataatgctttttgttcgctgccttaagagaagtgtgaaataaactggaatgcttcacaccctttatataatccttccagagcttcttccataaagctttggaataaggtcaagaacatttatataaacagtccgggtgcagtggctctcagcacttggggaggccaaggcgggtggatcacctgatgtcaggaattcaagaacagcctgggcaacatgggggaaaccctgtctctactaaaaatacaaaaatcagcaaggtgtggtggcatgtgcctataatcccagctactcaggaggctgaggcaggagaatcgcttgaacccaggaggtggagtttgcagtgagccaagatcgctct

SEQ ID NO: 84063 - DNA, 1017 bp, Homo sapiens
gtagatttctcaggcaaatgcgttatcacccaacgctaatttaattagtctgagtgcatcataaaccgaatttctgctttatgaaaagagtttcaaatcccaactcaccttaagcaggatttgtactagaacactggaagcatttagttgtatttccttgatatttatattgaatccatggaacatcacaaaaagtgaactgagactagagctgtcagtgccattaactaacaaatgactgtaagcattttctctctctgcttcctgatgtgttaaatgagtagttggggtatacttttttttttttttaattttaagagagacaaggtcttgccgggttgcccaggttggtctctaactcctgagctcaaccgacccaccctcctctgcctcccggatgctgaggttacaggcggagccaccacaccctgcccctacagtacggtttctaagatctctgctgtctaacttatatgagtcgtttcctgtatatattctctgggtatgtatatattgtaaagtttctaggattatatatgtaccagttcctgattccatattcattcatggagggaatcagtgacaatgaataattcaaacagcaattaatccaaacattgtttggctttaggatatattatgattgttttgtttgagccaatatggaatttcctcctatgctgtctgtctggttggaagcaatctaaccacataatcaagtcattattgatcttctattatacacctatcattgtggaaggacactagtactttaagacaccaccattgcttacagttggtttgataagtgagattgttgtgatcgagaagcgattatataagagtgttaatcacttgatgtcatacagatagtaaattattttagggcagtgtaataagacaaaattaggatttagatttgggtggaacacagctctgctattcttagcttgaaatttctgtcactgtttttttttgtttttttttttttttttttttttgaggtggaatctttct

SEQ ID NO: 84064 - DNA, 1767 bp, Homo sapiens
ccctattcaatgctgtctctctctttggctaagaaagacttctgaggcagatggaaggaaggaaggaaggagggagcgatacaaggagaggctttccgattccgtaatacacctggttgtgcaaagttcacctctacatataaagtttttgttttccaagtcattgaaccggcgacatattctaccggccattttggttgtggcaaccccaattcccttgatttttttttttgtgacagcaaatggaattagagtaggccgccctgcccgggctttttaagaaaccccagcaacccccccgggtaaggagcgccgctctcccgcccgccggtccagggtgtgtgcggtttccagcacggcctcctccttcgccccactctgggttcgcgggtcggcgccggcggggcggggctcggcagggccacgctgccacgcccagcgtctccaccccctcatttaaatacgcggcgccggcgagtgcgtcgagctcgccgcggactcaagatggcggcgtgtggacgtgtacggaggatgttccgcttgtcggcggcgctgcatctgctgctgctattcgcggccggggccgagaaactccccggccagggcgtccacagccagggccagggtcccggggccaactttgtgtccttcgtagggcaggccggaggcggcggcccggcgggtcagcagctgccccagctgcctcagtcatcgcagcttcagcagcaacagcagcagcagcaacagcaacagcagcctcagccgccgcagccgcctttcccggcgggtgggcctccggcccggcggggaggagcgggggctggtgggggctggaagctggcggaggaagagtcctgcagggaggacgtgacccgcgtgtgccctaagcacacctggagcaacaacctggcggtgctcgagtgcctgcaggatgtgagggaggtgaggaggtgggacgaagccgggagggccaggcctggtgcgggcccgagggtgttgccggccttggaagccgctgacgccggtcggctgctttccttgcttcctctgtgctgcactcgctccttccctctttgctcctcactcccaggcgctttcagggaaaaggataccactcccactccttctttcccccgcccttatttccctccctgttgccggggtctgggacgaaaacctgggctcctggccgcaatccgccgaggcccagagcgtgtctgttcgctcctgtcttttgtgtgatgctctatgcagagtgtctcctcgccgaagatcagtttaggattttgccatcagtttcgactaggacaatttgtggcaagccatttaaacataaaaaaatgcctggcgtacttaggctgtaaagaatgatctgtttattagcagtagatgtaattcgcaaatccatatttttggtgctgaaattaatgtatgctttgttttcttcacttcctttggtcagttgtattgaaccccatgtttaagctgttaactcccagtgacttggcgccccaaagcttgaaaagttggggaagcgtttgaagctgtgtttgtgactgggttatgggatcttgcctttctgaggtctgaatgtgattttaacagtatctcttaatgaaatctacatttgtcgttgcttggtgtgattcagttgagtgacattgataatttataatcaagtgacattgataatttataatctaggtttaatgctgcagaccataatgacaattctcaaagtttgggagcaaatctgacagtagtaac

SEQ ID NO: 84065 - DNA, 2977 bp, Homo sapiens
tttcttatgtggctaaacccatttccagaagcttcacatcagtcaagcttcatagtaattgtgatcttgtatcccttaaatttcctagttctttttttccttttcttttagagcatctggtatctcacctgaaattagttgcagaatattatatgtatgtccttttgtttctacagagagggttgataatttttatcagatatcagaggatagtgactaaaggcgtttaacctcctctgcagaggtgggaatgtgcttgaggtctggtagtggggtctggagccgtccgagttttggagtgtgagatacagtttccttactttcctttcagatgcccactggtctccctgtcatacatgcccagagctgcctcagctgcatttccatatggtggggtgctggctggaaccttggaggatgcttcattctgggaacagaaaatggacttttctcattggcctcatgtgctgcccttggagccagggggctgcatagactttcagacagagaacagctcccggcactgtcttgtgacctacaggcctggtaagtagtgctggggtctcccatagcttatttgggagcacagtggtagagaaaagggaaggagggtttgatcctaccctttgggtggctgtggtaccgctcacaggctaacgaggtgtgttgtagctcttgctactacagggagtatggtggctccaagctcccccacagagcctgcctccctgctccttacgtgtgaggactggagcatattctgccaggtactcctggaagtgaattagccacttaggagcccctacagtttagaacagtagtggaacaagggggccagctctaggtcattgagccaccttgagatcactttcgtatcttctgcctgcctcttacttcccctgagagaaaggcccagattagggcagccatgtagtagcccggctggcatactgaaatggacaacagtggctgtgtgtgcccagccagctgaacatctctgcctctggaatcagaggtggaacgcataacagcagactgtgcttcattcacaggttctttctaggctaagcggcatgaatctaaattcctggtaaactgtactgatggtcagtgttctaggttttttctttctaatttggtcttgaggtctctgtcaggagagtggctataaactctagccctgtcctgccaaacactagggagttcgttgtgggtgttcatagtttgcctttcacaggatactcctctgtcctggcagatggcctaatgcctgcctgacccatgaccagatgtccctctcacaggaaacttgtttgtactggcaggtacccttgtggctcttgtctgaactgtgtctagttcatttcccttgagatagtgactctctagaagagccctgactaggaaacaagttaggttcaggtgtgttggtcaggtgagacacaaaggaggcagtgcacaaaacacaggaaataacggaatcagcttacttgacagatcccacagagaagagggcagcatgcttcaggggccaatgggaagaagggggagccatccaggacaggcctgctcccttaggggtggggtaggggtggaggggagggacaagtgggctatatttcaaacctctgctcagggaagggatgttttaactaggccaaagttgacagggtacatctgggtttcaaataatttatgctagccctaaaaacagatgctgaggtaacaactgtattaaacacatttgtaacagtcaggcagatgtatagtcagagttagtcattaaatgctcacacttctgctagttgtgggtgggtctactcatgtttttaagttttgtttgagctgagaaacatcccagtaccacttcagaccctttggctcttcatcatcccacagctcggctgtctccaagactgtgatttgttgtgactggtgtacaaagcctgggggtcctattttgttatcttgcttttgtttgcctcccagcagaatttcagatacatgtttccctttctgtaatagcatgctttcactttataaaaatgtgcagtcccaggggctaatgaggttctcactgggggaagggaaaaaccttttactgagaattcttgagagagaaatcccctagcagaggtctggcaggagactgattttactaaaacagacaactcacagaattgtttttctcttaagcaaaaagctattgtagataacttgattcctagcctatggttctaaatttcactgatgctagcctacggttctaaatttcattgatgctgtgatattgttctttcatttgttttgtaactgttcttgatggtttaatgcatttatggcttttccatccaactaggttgtaagcgtgtgaggtttgggtacttggttaattttttgtgtagcgtccccatggtgcagcactgatttctctgtcccatagataaaaatcacaccaccatacgaagtgtgctgatggaaatgtcctaccgactggatgacactggaaatccaatctgctcctgccagcctgtacatacattttttggaggacctacttgcaaactattgaccaaaaatgccattttccaaagcccagagaatgatggcaacatcctggtgtgtactggggatgaagcagcaaattctgccctggtgagcctgttacttttttactttcatataaaaagtagttttgcttaaaatattggtaagggaaaacatgaactttttttacagaagctcatatagcaaaaaagtgtaagttctgctctgtaatcccacatatccgcatatgtgtgtatgtgagattgcttggtttccatgagtcgtgctttccgtattgctttgtagatcttgactgaactgctgcaacctctatttcttgggttcaagtgattctcctgcctcagcctcctgagtagctgggattacaggcaccccaccaccatgcccgactgatttttgtatttttagt

SEQ ID NO: 84066 - DNA, 1029 bp, Homo sapiens
agaggtgagacaccatgcctggcctgggttgtacttttttaaatgaatcataggccaggtgtggtggctcatgcctgtaatcccagcactttgggaggctgaggcgagcagatcaccgggaggcagaagttgtagtgagctgaggttacgccactgcattccagcctggccaactctcaaaaataaatgaataaattgtaacactagagaatttttgtttgaccagctggttcccaaggacttatacgccaagaaaggtggacgaaggagctacttgaaaaactagtttgaattgccctaggttcactttcagtgatctatttcatactattttgcctttttcaggctttggtgttaagatgttgagtactgccaacatgaagagcagtcagtacattccgatgcatggcaaacagatccgtggactggcgtttagcagttacctcagaggcttgctactctctgcttccctagacaacactattaaactgaccaggtgagtgatttggggaagtaggtggagactgggctctttggtgttgagtagcatggaattcgtatcggtgttatgatgaccttagctctgttttttgttgttgttgttgttttgttttgttttgtttttttgagatggagtctcgctctgtcacccaggctggagtgcactggtgggatctcggctcactgcaagctccaccttccgggttcaggccattctcctgcctcagcctcccgagtagctaggactacaggcgcctgcaaccatgcctggctaatattttctatttttgtagtagagacggggtttcactgtgttagccaggatgggctcaatctcctgacctcatgatccgcccgcctcggcctcctgaagtgctgggattacaggcgtgagccactgcgcccagccgaccttagctctgttttttttggtctgagactgtgtcttctgagatccatttaaaatatattgcttttagaagtgggcacagaaggttacaaaactgtatgtttcctgtttctttgaaa

SEQ ID NO: 84067 - DNA, 1047 bp, Homo sapiens
tgatctaatttttttggtcttgagtccagcagcgttgctaaactgtaattgttttgggggttctcttaaatttgccataaaaattaataagggcagctttatcttttccaattttcatctttttcttgcatatcttactggagtggaattctgtctttgcatttcatattttgagactgtttttaggtacatacaaatatatatttgttattcttggtgaatgtgtccttttatgatacattgttcctcgttatgcctatttatgctttttccttaattctaattggtctttcctttgttaatatttgcttgatgtctacttttgctctttttaacttcagattcttttttgggttatattatttgagtatctcatgaacaaccaacagcttactgtttcctttttaatccagtaaccttggccttttaacatgtcagtttaatcttttacaatttgccgtagctgaacactagattagctctgttctctcgttttgcctgtggcatttttagtccccattttctagtaatagtcaaattcctgaccatcactccctgcttaccctaaaacctgtttctggagagatttttctctttttatattttattcactatcataacatatttacagcaaagaacgtgcatcatagcatgaacttaactctgccacctggatgggaagtcttctgtagccttcctaatccccacttgttgctggctttccccctctagttccctactgaaggaacagatgctaaggaaacaggccgagttagaatcagcacagtgccgactccaactgcaggtcctcactgataagtgcactaggcttcaaaggcgtgttcaggtacgtttgtcctttctaatccaaagaacttttggaataggaatggaagaggaagctaatgttagttatgttcatctcagaaacaaataggatttgccaagttgtttaggaaatgaacatgaccaactccttattttatttctgattagggcatctgttcaaaacttactacacactttatgatgaggtctactatagtc

SEQ ID NO: 84068 - DNA, 1143 bp, Homo sapiens
tgccactttacatttaaggcaacagtatataagcatgtccatatctcatttacccacaacagtgcttggtgtcatcagacatcaatttataccagtctgatagatgaaaaatggtctctttaatttgcatttctttaattataagcaaacacttattgaccattgtgttttcttgtaagcatttgtatcctttgttttctttttttgccctctggtacacatgagttaaatattttatagctgctattctttatatggatagctgcttttcttcctttgagtgaaggaaaaagtatccaagaattttataagatttaagagtagtatagttttcatagcttatattttgtgacattgcattctagaaagaatgacaagtgattcataggtgttacaagtgttctgtagcccttttgattgtatcattttttttgcacttctgttaatttcttagttgcacatcttcttcaagattgattttacattttctctaatttgaatatattctgctttccatctagccatctccccagaagtctgagcctctgctaccttctgcttctatggatgaggaagaaggggacacttgtacaatatgtctggaacagtggaccaatgctggggaccaccggctctcagcattacgctgtgggcatctctttgggtataggtgcatttccacgtggcttaaaggacaagtacgaaaatgtccccaggtaaggaccataggtaaggacacattaacatgttaagtcaggcagattcctagaaccactctaattatgtcctattgggttctttagtgcaacaagaaagccaggcacagtgacattgtcgtcctttatgcccgaaccctgagagctttggacactagtgaacaggagcgcatgaaaaggtaggtggtaagagtatgcctggctggaatgttcccttttggttcattgtaggcacatctgaaaaagaagttatgagtcactcgtagtgaggttttacttgacctgtgacttgggatctctggggatcattggcagtctgtcttacactgttatttataattcatgtctgatcatcttcttaaggaagtctgcatcgtttgccttatgtagagcattaaacacaaggatctggcacattacttctgtt

SEQ ID NO: 84069 - DNA, 1085 bp, Homo sapiens
ttttcttcttgctaaccctcccttttcagccacctaataccagcatacagattgctgagtttgtcctttaaagatactgacaatatggccagatgccagtaaaatagaattagcttttaacggaaggatcaagctcctttgtgggctaatgtagcagtggttgagtggtaaaaaataatatctaggaggccagtctcccccccttatctgctatacctgcttcagctttcaaaggcagcatttaatggcctggagatgggttgaagtgataggatttacttcaaatcactatagattgtttttgtgatgatagttcattgtactataattccgttgtctttctgtgtacataggttgagagcaccattggatgcttactttcaggtgagcaggacccagcctgacttgccagctaccacttatgattcagagactaggaatcctgtatctgaagagttgcaggtgtctagtagttctgattctgacagtgacagctctgcagagtatggaggggttgttgaccaggcagaggaatctggagctgtcattttagaaggtcagtattttacccaggtttggactcacaaggctaacatccatgaagcttaaatttcggaaggctagaaactagatttgtgctttgacactttcccttttctcccctaaatgttgtggattcctgttttatagtatagagccttcactggccataattatgtagagaggatttgatctgacttacagcttaatgtaatttgtgacccagtgagttagtcactttgtagtggcattttgtattctctttcacttcttcagacatctgagaaagtagattcttttttttcttttttgaggcaaggtctggctctgtcccccagtgacaactggagtgcagcgacaacaatctcagcttactgcaacttccgcttcttgggctcaagccatcctcccacctcagcctccccactaactgggactacaggcacacaccaccacacctggctaattttttaaattttttgtagagacagagtttttccatgttgccccggctggtcataaactcctgagctcaagagatccac

SEQ ID NO: 84070 - DNA, 1053 bp, Homo sapiens
ggaggcctttttactagctccttttgcctttttttgttaataaatatgtcactccttccttagttgaatcactttggtgaccccctttttaacttctggcaataaaatggaatcctgctccttggtttgtcattttaaagattccagatggggctgtgctctgataattcaagtttttcaggacatctctcatttcacacatacaggctcctcacacatgtagccacccataggtaagcctggggaaatcgaatacttgcccacaatcttccatgtctgttacccaagccccttgaatcaggtatttttgacattgagaacgatcacttttagaaataattcaagtctgccagaaaaacggggtaattctcctcaaggtgcaaagtttctctgttttcctaccatatagattaaggtttgcagagcccacactgctatgtctgcaataaattttcaacaaaccctgttcaaactgcctaaggaaaaaaattttgatgagtttcaggcaggaattttgaacctaggactgaattcaatctaaaaattgttctcccacatttttgtggcctttactaacttatttacttgctgttttcaaattcattaattaatgtattaatcctggcttcctgatatgtgtttttgagcacctgcagaatgtatctagcctggcagtaggtgcttattttcctgttaggatttttggaacaagagctcatccttttatttcctacagatgctgattcccataattgtgggcatgatgtaatttttaaaaagtgcaaattgccaatgaccccaatatgatgagctctgcaattgttggtttccacttgtcaaagtccccattagttacatcctgtcatctacccctagaaatcaagacgatggaaaagtaagcgtgagggatcagactctggcaatcgacagatcaaggctgctgggaaagtcatcatccaggatattgcttgcctcctgcctgttcacaaatcgctgggagagctgtacatgtaagtacaaaatttcaagtctgctgcactcatcatttagcca

SEQ ID NO: 84071 - DNA, 1043 bp, Homo sapiens
ggtgttttagaagccttccaccctatccagaagaccaaattagatggatcatattccattctaggtggaatctttctggcatagattttttttttttaatccagtgccctgagtctcacttgagatgaccagttatgtggggcctgtgggtgtgttgtttcctgggctttttaaagtcctggaaacctgaatgaaaatcacagtgaatgagcttgtgtaccttgtaatttccctgttctcgttaagccccttgtgctgttcactgtcactgcagggtagacataggctaaatgaccctccctaaaacaggccctgccatagtatttagtgcacatgtgactacgtctgtcttaggtcagtaacactgcctggctccagcccattctgacaggttatttgctctttaacgtatcctccccttacttacacccatgtcaggatgattgtgtctaaaaggatagcacttttgtgtgtatgcacataattttttagaaaaccagggcaagtaggaatggaagggctaccccataataattgataaagcttccccttgtattgcagaataatgacttgggtatggataaatggtaaatagtcactgaactgcttcttaagatcaaatggggccgggcgtggtggctcatgcctgtaatcttagcattttgggaggccaaggtgggtgaatcacttgaggtcaggagttcaagaccagcctggccaatatggtgaaaccctgtctctactaaaaatacaaaaattagctgagtatgatggtgcatgcctgtaatcccagctactcgggaggctgaggcaggagaatcacttgaaccccggaggcggagatttcagtgagccaagatcacaccactgcactccagcctcagcaacagagcaagactctgtctcaaaagaaaaaaaaataaaaagatcaaacgggttaaagttccaaattgatagtgtaacatgcatttacaaatgatgataaacagttcacagatacttcagctaaacttcttcatttacctgccctgaactaactccac

SEQ ID NO: 84072 - DNA, 1506 bp, Homo sapiens
ccttgacttaaccatgcacctggctcccagcatcacccttgtgtctgaccactttgcagaagaaaagccaatcagggccgggcgcagtggctcatgtctgtaatcccagcactttgggaggccgagatgggcagatcacttgaggtcaggagttcgagaccagcctggccaacatggtgaaaccccttctctactaaaaatacaaaaattagccaggcatgggggtgggcgcctgtagtcccagctactcgggaggctgaggcacaagaatcacttgaagacgggaggcagaggttgcaatgagccgagatcgtaccactacactccagcctgggcaacaaagagagactttgtctcaaaaaaaaaaaaaaaacctatcagagaaatgtgttcctcttcttgactgtgttttgggccttttctagatcctgaaggacacagccctgcagaaagtgaagcgtggccagagctgcctggagccctgcctgcgccagctcgtctcctgccttgagtcctttgtggtgggaagcatgaaactgtcataccaacttaggctttggtgttttgtttcatttctttctccctaaaatcatgggttttctggttttgtcatactgggtctttattttgtagttcagctttaagacaggttgtggtttttagcttgtggatttttaaatttcagaaccaggaagacagcgcttccagcaacccgtttgcactccccaactctgtcactccccccttaccgacgtttgcgcgggtgaccacggcttacgggtcgtaccaggacgccaacattccctttcctaggacttctggggccaggttctgcggagcaggtgggtctctttggttctttgattctagatttcgagagggagcagctaagaatgtcatagattctgtataaacatcttcatcagaaaatgtttgcttttactcccgagaactcaaacgagactttcatggtagcgtggtagggtctgaggcccagtcggtgtctgtggacttatcctaagagggtgcaccagaatgggggtcttaactttcttcattctgatgagcttggatttgagtctttactcagagccctgattcttagcagggggcattcgcctggtagggaggcttagagtcctgctgatgactctgcccagtccacatacatcctctctcctggatcctggagcgctgacctttgttcctggtaagggtgactgcagtcaggagtcttgcagcttatgaaaatgtgtcttaccctcaggtgtacagagatagaagaaagactggccagtcctgcctcaggatttcccacggccagcttgttgacactgatggctcatgtgatgtctcctcctttaggttacctggtatatttcacaaggcccatgacaatgcatcgggcggtgtctcccacagagcctactccgaggtgagtcagggagatgcagaagccgctctacgttcccggggccagaagtggccagagacctgggaaggacc

SEQ ID NO: 84073 - DNA, 1026 bp, Homo sapiens
atctctaccaaaatatattaaaaaaaaaaaaattagccaggtgtggtggcacgtgcctgtaatctcagccaccctggaggctgaggcaggagaatttcctgaaccaggaggtgcaggttgttgcagtgagctcagattgcatcactgcactccagcttgagtgacaaagtgagaccctatctcaaaatacaaaaaattaaaaaaaaaaaggtgttccaagagcaaattgaggagagaagccagatcatagggtggcatgaacaggggcagcaggaaccggttttagtgaatgaagtaaccctcaaaggcaaggcgtagaatcagccagttgggagaggctgctgccctctctgttggaaggcagggagaagatacaagggagtcggggaagcaaagggccccttgggaccagcgggggaggcacaggtcgaggggttgagttaatttataacatttagaaaggaattaggcataccttttcgtcaaagtcaggggcaggaagagaagccagatgtagggtcagaagattgttgatgtggacatgaggcaagatggtggcacttgtaacaagccgtggttcagaatagttgctgtctggctggctgtgcctagtgatgtatgaaatattgaagagtgaatttttggttgaaggtggtgatgcagagaaggaaccaataagaactggcccttgttttcctgcccactcaccctgtgaccttggacagatcatattctcttgcctcagtttccccatccataaaattaagaaattggatgaaattatttctaaaatctttgctctctgaaggtggccatgaaggagattctagatactgcataattatccgcaaatgtcctgatctttcatgaagttatttcataaagcaccctgaaccttttcaggataatttccctttgaccagagttaagatgaaaatatgattcagtcaattaagtacattaaggattgattattcattttacaaagagatacatcactttaccaaaaaattcttttgaatggta

SEQ ID NO: 84074 - DNA, 1033 bp, Homo sapiens
tctagaaaaaatacaaaaaaattagccaggcttagtggtgtgcacctgtagtcccagctacttggagggctgaggtgggaggactgcttgagcccaggaagttgaggctgcagtgagctgtgatcgtgccactgcactccaacctgggtgacagagcaagacttcgtctcaaaaaacaaaaaagggggtgaaaagcacctactaccttgtatccttcattgaagtgggaagaaacgaggctcacaggcgcattttcagagcatgtgaaggagcgttggataagtcttttggtgatggtgttttgtttggcttaaccaaaacaaacaaagtctgtgtagggtagagacagtatctggtagtatttttgcatcctcactcactacctagcagacttttacgtgatagacactcaaagagttctttctaaatcgataatattaggtgctgatctgttgcagaaacccagtacagcagtggaatatctagccgcccacctctccaaaatccatggcctggactggcacccagacagcgagcacattcttgctacctccagtcaagacaattctgtgaaggtcagtggcacccatggggaagttggaggagcagtgtttgggtggcatcagggatgtatgattccaccttggttggaaagctgcagtgtgttagcacagtatgtatttcacggtgcatgtgcttcttgggcaactgaacacataaatttggttatgctgaccagcaaaatgcgacagagcgagacccagcatggtgctgttcagcataaccacattgtgttatgatggcagagtgacatgccatagcatctcctctgatacgtctcttagaatttgttcagaaggttttcgtctttccctttgtgaaaggaagtcagagacaaaagtacttagaaagggaaagaagttggccgggcatggtggctcacacctgtaatcccagcactttgggaggctgaggcaggcagatcacttaaggtcaggagttcaagaccagcctggccaatatggtgaaacct

SEQ ID NO: 84075 - DNA, 1138 bp, Homo sapiens
tcccaatagtagctagatttgtgttcagtgaatgttgaatagcagggaagaggtgtgtatataccaagggcctggaatcttgggggctgttaggattctgcctaccacagactccccagaaagattacacagatcttgttagaggaaccatcttgccctcctccttatcatctccttactgtctgtaaattgcacagaggaatcctggaaatggcatctcatttcactgcctgcctttccttctgggcttcgctctgctcctgactctggtgcactgaaggatgcatgttaatcactttgcagcctccggtgagagtactctggcttcttgtccccaatgttacttgtgatgtttcttgagggtagatgacttgagaaatccactaaataaggccagcgagggtgagggaaagaaggtgcttaccatttgtgatttgtgattgtcgcagaatgtataaaatggattcttcgttgatactgtcttggagagaacttagagcatttaataaccaaacagtggcacaaactgtttcatgatactggcatgagagtgcagcaggatttgaacttgtccaaagaaattcagggcaataactgcctggattaaaataagccttgtgctcagcctgaatgcacattctttggactcattgcagtctcttgggagttagacgttggctcctgaaacgatgtgatagtgctccctgggaattgggagacccgggaaatagaaaccagttaaatgcactagaaatttcagagcgaatgtgacctggggatgtcagtatccagaatatgaccttggattcagcaggggtggtgtctgaatattgccaactgccatatggcttgaggagaagtccatgccctttggaaagtcacgggtgtcttgggtgtgtgtggggtgggggtgtccaggttaggtttcacttgcaagaaggctctttgttcatagtagctgctgttttctctgagctagtcagcctccccatgggctccaggacttctgtctcttcaatttatttatttttatttattttttgagatggagtctcagtctgttgcccaggctggagtgcagtggctcaatctcgagtcactgcaccctccacctcccacgttcaagcgattctcctgc

SEQ ID NO: 84076 - DNA, 1578 bp, Homo sapiens
ggactcagtacccacaatttctatttagggctggtcatgtaggcaccgtctgccttaacaggtaccaaaattccagaccttcagaaggaaagtaggcactcagcgtaaactacgtcgtttgtacatacagttgaggcacagggaggctctcttactagttaaggagcagtggaaccctcctaaaatccacgttctagatagcagccaagagccacccttgcaagcaggcctcgcaaggatagtagtagcctcatgcccgctgtgccaactcttttctgcatactaccttgtagactagctgtgaggattaaatgacaatatcagtttggaacacctagcgtagtggtcggtatatgttaagcagttgataaatgttgattaccattattattaaattagaaaactggcctaaggaagcaacacacttggcctgacaaaatagccctctcctctgccctgtcattttgcaggtgaggagtgtgagccccagaaagattaggtgacgtacctagtagtacccagtgtgggccattttagtgtgtgggaaagtgagactgtttccatttaattaaatttaattaatcaattgatttttttctttgtttttgagatggagtcttgcttttcgcccatgttggagtgcagtggcataatctcagctcactgcaaactctgcctcctgggttgaagcaattctcctgcctcagcctcctgagtagctgggattacaggtgcctgccaccatgcccagctaatttttgtatttttagtagagacgaggtttcaccatgttggccaggctggtctcgaactcttgacctcaggtgatccacctgcttcagcctcccaaagtgctaggattacaggtgtgggccactgcgcctggccaatttttgtgttttagtagagacagggtatcaccatgttggccaggctggtcttgaactcttgacctcaggcgatctgcctgccttggcctcccaaagtactgggattacaggtatgagccactgcgcctggccgaattaattaatttttaattttacaatccaccatgacattcaaagaatgttctcatttaaaagagaagacttcctgagcaacacccctattgctgagcgtgtgaacaagagtctccgataggtaacgtgtagtgagtattagacaaggatggctcagaaactgttgggccaagcatggtggctcacgccttgtaatcttagcactttgagaggccagggccggtgcatcacttgagcccaggggttcgagaccagccggggcaacagagtgagaccccatccctacagaaaatgaaaaacttagctgagcatggtggcttgtgcctgtggtaccatttactcaggaggctgaggcaggagaattgcttgagcccaggagtttgaggctgcaacgccactgtgctccagctggggtgatggagagagaccggcccccccgccaaccccaatctaaaaagcaaaacaacaaaccagctttggcagcagtgttcatgtataattttatggtttttgagacagagttttgctcttgttgctcaggctggagtgcaatggc

SEQ ID NO: 84077 - DNA, 1007 bp, Homo sapiens
gcctggctgttggcacatgactggggaaaaggaggattcagagaatctggatgaattcattttatgaacttctggtgacaggccagcaaaaggttggagggggatttcccaggctcctagcgggagggcaaaaaaggcctggcaggaggaaaacaggtctgtctgctaggtcaggcatctagaaaattggccaaaagggatgtgggggccgctatttgctaattggcaagttgagtgatgaagttacatcttaagattcttttgggtgagttgggaaaatttagatagtgtaggggaaagattgctcctgcctttagggtactttatggagggtaatatctgttggatcactcttttaactactgtgaaatagggttgacttttggggtatctctttccccccccctgcaaatagcctggggtttgttttcatttggtttggttttttgtcaattctgtaaactttaatttgtgaaatagtgttgggggagaaacgattagtgactaatttagggtaacacttagaagtagcttgtgaattgttaggatgatattttaatctctgacagacctccggatatcattggagcttttctgacctcatggaactctgccctgagtgagaagcaggacatgattgcctttggctctttcaggcatttgatcaaaattaggcattttgaaattaataatttttcctatggaatttagtccagagagttagccatatttttgagatgactagtttggtgtttaaaagaactgtaatgagcatctggttttgaacttaaaagtactgtaagaagtttctctaaaatcacagaattttttgtgttgaaaaacatatgagatatgtagggaggaagaaagggagtgctttttttgctaaaatttcttaagcctcttactaaaaatttatttattatgctactaccaggttccatgctacagttatgagcttgtagttggattccagaatttcactcttaagctgtgaaaccttattt

SEQ ID NO: 84078 - DNA, 1046 bp, Homo sapiens
ggcccctccggttattctctccagtcactcacctgttaccttaatcattcttttttttgagacagagtttcgctcttgttgcccaggctggagtgcagtggtgcgacctctgctcactgcagtctccgcctcccgggttcaagcaattctcctgcctcagcctcccgagtagctgggattactggcatgcgccaccatgcccaataagcttggggctaattttgttttttgtagagacgggatttctccatgtttatcaggctggtctcaaactcccgacctcaggtgatctgcctgacccggcctcccaaagtgataggattacaggcgtgagccactgcgccctgcaccttaatcattcttaacacactttgtaagtattttatctgtttacttttttctgtgtatggtttgcctaaagtctaagctccgtgagagcaggactgtgttccttgatctctgttgtgggtcctgcactgtgcctgccactcacattttttgagtacatgaatttgagtactttatgttcatcatctcacttaatcatcactctgactctatggagtaagactgttctctcccacccccattgtgcaggtaaggaaacaggtttggggaggttaaggaactcacacaagatcaggtggttagtaggtggtggagatgggattggaatgcaggttggctggtgccagaacctgggctcttaaccagtaccctcttccgcctcttatctgaaaacatcacaaagccgcatggtgtcctggagattgcgctggcctacgagtcagagtgctaggctcatctcctggttaggcagctgattagctgcatgatttgtgaccttgggcaagcgagtcatttaacctcagtcacaatttattcatctgtaaaatgtagaagacgcctgtcctgcttacctctcagagtcatagtgagggtctcatgagataatgtgcacaaaagtcaaaggacattctaaatggagagtggtggagttcctatgggggcactctcttatagttgtctgccttcaatcgcctcag

SEQ ID NO: 84079 - DNA, 1833 bp, Homo sapiens
ggttctagaatcttgaagttagcccaaaacctaaatcttaacctcagtcagtttgtttgtttgtttgtttgtttattgagacagagtctcactctgtcacccaggctggagtgcagtggcatgatctgagctcactgcaacgtccacttcccgggttcaagtgattggcctgccccagcctcccaagtagctgggattacaggcatgcaccaccacgcctgactagtttttgtatttttagtagagacagggtttcaccatgttggccaggctggtctcgaactcctgacctcgggtgatccacctgccttggcctcccagagtgctggcattacaggcatgagctaccgtgcctggccacctcagtcttttaggatgatgggtgaatataaatttcagtctgtttcttttccaagctttctcatggcctagtctgaatcagatggttcatagtaattaccatgggttcagtcttgagtgtgagaaggggattcttagagacccagcagttttcacttctgaatcttaggttctcactagaacacaggtttatccttgaatccagcagttgggtttctgtcctttatgtgctgtatggatgaaggatgagttgtgggtatgagtgaataacctgaagaccagccctcaagtgtgaagtgtgaagcaaataaccaagtttaatctttttttttttttttttttaagacagggtctcgctttgttcaggctggagtgcagtggcacgatcatggctcactgcagcctcagcctgtagggctcaagcgatcctccttcctcagcctcctgagtagctgggactacaggcggatgccgctacgcctggctaatttttaattttgtgtagatggggtctccatttgttgcccaggctggtcttaaactcctgggctcaagcgatcctcctgcctcagcctcctaaagtgctgggattacaggtgtcagcgacgatgccagaccccaaatttaatcctaaagcagcagctgaaatagtttctagactgatgagactgtttaccttgagacctccctagagtcgttagtcttgaacacacagctttcctctgttgggagaaaggaggaaggaataattcactggatccctgtgaattccaacttaggggaggcatgataagaatttatagtgacctcttggatctgtaacaagaaagaggcagataaaaacaagagctctcctgatttctgtgaatggttcagaagggttcttaaaggtgctcagtattctctagggaggtagttaacgatgcagatgactggaccccactcacagaattcagtagagctggagacccaagaatctaagtttgtaacaaatgaacctgaaaacaagaagaccttctacatctgaaactaaactccaccaagcatttagtttttctctccccaaacagagaaataaactttgaatccttttttggtgtattcattagctttctttttatttgttttttcttcttatttttctttagagaaaggtttttcttctgttgcccgggctggagtgcaatagcaagatcacgctcactgcagcctggaactcctggtctcaagcaattctcaagccttagcctctggagtatctgggactacagatgctatgctaccatgaccagataatttttttactttttttttcttttttcggtagagaaggggtctcaccatgttgcccaggctggtcttgaactcctggcctcaagtgagccttccacctcagcttcccaaaatactgggattataagtgtgaagccactgtgcctggcctttattttcagtatttctagtcagatattt

SEQ ID NO: 84080 - DNA, 1038 bp, Homo sapiens
aggaacaacattgttggctatttgatggttttcttttacatgggactaagcattattgcctacatatagggccaagccaatctgccttggtctgagaattgaagttgctctgaacagaaggtaatggtgtcagtgtcgcctttccttctgcacttgtcttcctcctgacttttcttctttggctctggtgctacagaagggcttcctgagttaccctctttcctacatcttcagccaggcagctagacaagtcaagagcttaggatgaatctaggctttaaagaggttggaagacctgtttttccttttctctgactgacccaaaagtataagacttttttttctttgtgtgtgatgatctgttgaacaaaaacgttcatttattccattgatagcctctggtataccaggacctatggtaggtgctgagaatatatatatttattatagagcaattaacttattctttccaagaatctttgcttcctcactccttaagagtctgaatattttagcttctgggagattttaccttttcatcagctcctctgttgaataaacaaataaatgtaggtgtttgtccataaggctgctgcaaggatatacttctcttcactcatttttttccaaagccctatttctgggttggggcaggtgatcttttctttgtgattccagctaagtacctaccaagaaattcctcgtatgtctcagtatgaggggtcctctgtcctctcagtgagaatatcaaaagaaaaactgattttcagactcttcatgtgcatctttaatttcagtatctttgtcatccctagagccacttttctttctggtcattgaacactattttctagaagcatgattcaccactttttaaatctgtctctgtaaaatttatcccaagccacaaatacccataaggaaatttcatccttggtattataagtctatgtctctgaacttcacaacatctacacttctgtgctggctcccctctcccccacctccccagttttgttttgtttttttaactgtcat

SEQ ID NO: 84081 - DNA, 1049 bp, Homo sapiens
taaaaacaaactttttttcagagacaaggtctcactatgttgcccaggctggacatgaactcctgggcttaagacatcctcctaccctagcctcctgagtagctgggactgtgggcacacgccaccatgcctggccaaagacacttttttatagctctgcctgctgctataacaagtgttcctaaatacccatgtacatcctatattattagatttcctcaactctggttagctatgactgaaacattcatgccattgcagccagtgccctggaaagctataagcaagtcttaagacctgtgataagggctgacttgcaagctagctgccatccatcttaatatctgacgagcccagtcatgttggctgtgtttaattgatccatttcctacttgcttcctcaacccagaggccaagggcagcacaaaaggatagtgaatctaaatgtctccagttttttgaggtataggaatctcctatgaagtggcagacctttgagaaatagtattatgagctgttctgttttgctgtggctttggaaaacctttggattcctctactgaaaatttgtttgaaaaaaaaatctttttaatgaaacagtgtgagtcataaagcagccaccaccccttctcataatagcatttctcaccaggggaatttttggtagctgttgggggagggatttgagtaggttgtggatgataaatcccttgaggggaacataaccaaaggctgccatatcagaacgctggtgctttccatgctgacaccaagccctgaattcaaagtgcaggacagcagaatagaacagagaagcctgtgctcagtgaattgctgcagtagcatgaccagtgagactggagtttcaattaaaacaccgttgtagtgtaaaaggatcatgagatggaaggaggccttgggttagagagccagaagccatttataggcagaacatcagctttctggattaaaggatggctgtggacctaatgatgagaatctagaggtcatggggaatttccttactgtctgtgccccccttttccata

SEQ ID NO: 84082 - DNA, 1069 bp, Homo sapiens
tatggccatatttttaattaagttatttgatggacatacccctttcccttggaaaagggactgcgtttataacaaatgaaccatgaatggaattcttaaaagtgaagtaacataatatgttaagcagcttatctgttatttaatataattccctaaggagagcttagtatggtgctctgtcacccatgggcctattcaaagtggaattcctttctctaatgttgcataatacttccaccagaagaaggaggtggtagagtgtttgaaataattattgtgttagctgctgcccctgtcctttttctgtaatgtgggaaacaaacttcgtcttaggatcttctggcaggtgtcctggttggatcgtgggtggtgcttgtccggctgcctcaaggatccagcctagggacatgttctttgagcacttgatgtgagagttttatttgtttgtttgtttttaatttaacccacacccatgcaaactatgttccccatgccaggaccagaataaccctggccagggctcaagaaaaacctagtaacagacctaaaattaaatacatgaactctgcctgcccttttgcatttgcattatggttttttgttaggtgctcttgaccattttttttctattaggaaaaggctgggaaggagaagcttgagtcattaccttaggcatagagaggggatggatgagctgtgaagattactactaataagtagaggtgggaccagtgcaaattgtgctgggtgcaatatttttttttaacttagcaataaagatgctatgacagtgtcaatcgctggctttatctgagccatccatagtaatagacttgtttgtttgtttgtttgtttgttttttaagagacagggtcttgctgtgttgcccaggctggcctcctgccatggccatagcatggtcttgactttgagtgtgaacctgcatctggtgccagtaaacctaacttgctcagctgaatcttcttcttcgtctttttttttttttttttttccagagacagggctaattcacccaggctggagtgcagtggcatgatcatggctcact

SEQ ID NO: 84083 - DNA, 3259 bp, Homo sapiens
ctcacataagtagtaatttcctcacaagctcagaaaatgtcttttcagtttgtactttggtgtgtacacatcacattttggagaaagtctagactttagaaaagagcctttagggtattcccaggttgttcctgggctcctgtactccctgttcaggtcacctctgctggctttggctcattgtggccacgcaagttctttgttacatattccctttggtgatcagagtcttcccaagccatggtcaaaactttacttttcgtatgaactatgtgtcttccccttcagggaataggactgatgccatttgagattatttcttccttccttgttgacaattccctttgtactcccccaaggccctaagcaaggacccttagtttcctctggtttcgtggttcctgtgaaaaaggcagaagcccatgtggaaaatcctcatcctgctgtgtttcaacaagcaaagtgcattttgtctttcagagtgggaaggaccttaactgtgttgaccagaagtgcagttcctggcttcagccattttgctttggagaaggaaaataaatgcagtgacctttgttgtgagggtagggtactcttgttctaaaagtccatttgtggtgaggcgtggccctgctgggagaagctgatgccactttgcctccctggcaccctgccagttctgtctgctttgttgactttggtggctcaagggacaagccaggcactggctcatcttttcctgcctgattctctgggcagatttctccatagggtctgcagggaagtgggggaaagctgggtatggtcagagtggaggtcactatgtgggcttctcagtcctcatgctggtctgtgtcaggtgcctttaattcagggcctaaggaaccattgctttttagcctaagcagcaatttaataatttagcaatcaggtaatactggcactttgttctcccctggctgttttctcaagctaagttctgtgttagcatttcttgatttctcccctgatactaatcctcctgggagattggccttacctattcacgtggagcgtggcttctctaggaatgtgggaattgctccatggcaatggtgctttggccttcactgcccacatcactgggaccatcccagcccttcttgtctctagcctttcttacaggtcaagtccaaacaggaggatctgactctcttcttggtcttttctcctgtctagctgtcttgttttagagcagaaattaaaggagcagggtgtcctaatgaaactgttactgtgatcatatcagctctctagaacaaattcagaaagacggccctttgtaacaggcagactgggtgggcaggcgttcgtttgtaaagagatggctttcctctcccaacaagcagggccaggcatcaccccatgctgcattgatgcagggagtgaattgagaagtgtgggaacgtcatttggactctttccattgctcccattttaatgctttctaaaggaactgtttctcaggtttaaataaagtggcaacactggcttactagaacttatttatttttatttatttatttttgaggcggagtctcgctgtatcacccaggcttactagaatttagaaccactccttcatttgtgtgtatccattctgtctttccagtccccaatgtatgatgtagaatctcaccttcttgcagcagaaccagtgccctaagttattggatgtctttgttgtgaagaacttggttccagcactttccatgctaccagcccaggagtaggtcgtgttctgtcctcaaacattggagtcttgggtagactgcaggcctgatgacaggcattgctcgtctccctatgagaggccttttccttcctttgcccacagagcattgtggacacaccagctgcctgcctggaagaaggagctccttcctaccagcctgtggagtctcatttctgctggaaaggcataagaatgctgcagacttgacctcgggaccctaccacgctttccaagtgaccttagagattaaagatctttgattttacagaagaaaaacagcataaacactcagtcttgtgggggtagttattgcctttcctactaaaagtagcattacctgggaaagctggccttgtctccaactgggcacatccttgaaggaccaagagggtcttctaagaaaaccatcaatgtttctgttccagtatttcctcgataaagacatttgccaaccagtgatccaagctatccctcagctgctcagaatttacctcaattcctttgctgagcaggcatgttgtatttctatgtaatggggcatatttgcctttggagaaaattctgaggactgtaatcattttagccattgatagctgatggtcagttctgcaggtgcctctccccatatcacattaagactcctttttatatatagtttgaagtttaaggatccataaggatgaattggaatcttcttcttaagaggtatgggcttaagaaagttgaactgtaaaaggatcagtttcattctattcagcccagcgtgtaagcctagtgactgtgtgttcattcacattttcatcaggcagctctggccagaggccctgaaagggttgagtatggtggaagattccatcgttttcaatgacagtactgctcataagttctagtggttctgaaaagaataggtttaaaagtgaggtataagattatgtatgatgttgatgttatgtgtgaggttgatgtttacctttcttggttgacaaatctggtattggtcctctgacaagaatggaaactgtatgtttggacaaaaatactgaagatacagatactgaagttcacaagtatcatgatgtgagaggatagatcattttcatttcaaggacttggttcatggaaaaaccttttttttttttattcctttgagacagttttcctcttgtcacccaggctggagtgcaatgtcatgatctcagctcactgcaacctctaccttctgggttcaagtgattctcttgcctcagcctccctagtagctgggattacaggtgtgtgccaccatgcttggctaatttttgtatttttagtagagatggggtaacttaagaagttaccatgttggccaggctggttttgaactcctgacctcatgtgatccacccgccttggcctcccaaagtgctgggattacaggcctgagccactgcgcctggtcaggaaaagactttttaatgccactagattcctctcctgatgcattcaggc

SEQ ID NO: 84084 - DNA, 1053 bp, Homo sapiens
tctccattcacaccaccgatagcctgaatgactgcagtaactccccactgctctgcaagcttttcgactcctcccaatccatttactgcaccatggccaaagtaatatttctgaaatataagccacctctgaactgttcaacagttctgcagtgtttctggaatgatgcacctaaaccctcaatggaccttgcccccgatcctgctttcctctttagcatccacatccacatttttttgcaactctgtcagcattttttaaaaggaaacctatttattgcagtttactctccatacaaaggagtgcttatattacatcataagcatacatcctgatgcattcacaaactaagtacctctgtgtactgacatcctaggaaccctcccccaaccccgcccaccataccccttcccagttgcagctcccatggaggtactgctttcctgacttgtaacagcgtggacttgccttgcctgttttgtatcttaagtagatcggatcagatagtgatcctcgtgcactcatgtgtctgcttccttcattcacatcatgtgtgggagccgcccatcttgttgtgtagggttgtagagttttcgtcaccttgctataatagttttccattatgtgaataaactatgctttatccatttgttctcatactggtgctgcataacaaaatacccccaaactcgatcacctacaacaactatttattatgcccatggactatgtgggtcaggtattgtatttgcatagggcacagcagaagcagctagtctatgatgtctgggacctcagctgaaaactagaaggtcaggcacaggtgtcttttttttttttttcttttgagactgagtcttgctctgtcacgcaggctggagtgcagtggtgcaatcttggctcactgcaacctccgcctcccgggttcaagtgattcttctgcctcagcctccgaagtagctgggattacagccacccaccaccacacctggctaatttttgtatttttagtagagacagggtttcgccatgttggcctggctggtctcgaac

SEQ ID NO: 84085 - DNA, 1036 bp, Homo sapiens
caggacttggaaaacagtctatatccagggaagaagctgcaaacaggcagttccaaggccagtcctgtttttctaggaaggtcttctgagggcacctgccaagagcgaagcctgacctgcatggctggtcctacttggacagtgttcctcctgaaggtggaggaagtgacactttcttctgctttatagacagcccacaaatcccttgggagtggtaactgcctgttttacctagagagcagtttttattgttgcctttgtttttgtttcttgagggaaagtggtccttggctccagttgttgctgattttatgaggaacaggcaggggaattcaagccactctaaggagtgttctctggcattgcccaaacgctagaagtccacaccagcagcagcagtgggttttgggtccaagggatgtaggtgtgcagtgtgtcggcggtggaaacagaggtggagcagccatgtatgtgcaaggagagcgtgatgttcagtcgaatgactgggcatttcctggccagacctgtctatcctactgcctagcttgtaggtaatccctagtgtctaagaactagaagaaattcttgggctactgcaccaagaggaagaggatctcctttttcaacagatggtccatcctttaaataagacatctccaaaatacaagccaagtgtttccctggagactttacatccacactttctgagtcataattaaatgcccctaaacttacccaagcatggtagccaggtgacaaggagttataaatcaatattcatctttcttagacagtagttggggacttgattcacacttcacactcatgctgatgttttcagctgctgctgcttttttttggtagagatgggggtctcactatgttgcccaggctggcggtcttgaactcctgacttaaagcaatcctcctgcctcagcctcccaaagtgttggaattacaagtgtgagccactgtacctggtcagttttcagcttcttgtatctgctcggactcaggtcattggaccatcatgtcc

SEQ ID NO: 84086 - DNA, 1043 bp, Homo sapiens
gacagagagtgaaatttctcctctttgccttttgattctattcaggtcctcagtggattggatgaggcctgctcaccttggggagggcggtccgcttcactcagtctatggtttcaaatgctgatctcatctggaaccaccctcacagtcacaccaaaaataatgttgagccaaataatctgggcaccccatggcccagtcaaattgacccatcacaacagatatgttaacacacacacagatacattaaactttgtcagtatggctgtcttctgatgtctgcttatgagaaatttctggggaaacaggtgagcctccaggccccagaacagaactgcagaggttgagtccagaagagaggttttcgaagaggcaaaagccagaattcctgggcctttcccagtcaaggatgttctctaggagagactgactcacacctcagcaactgataaattgtgccaatgttttcacttatttctgtgttgacagagagggagtctgtgtctttgagggtgaagaatgtgatacctacagcttagaaatgtgaaagaaaatcatcagtgttaccccttgatcttttattcataataaatcccatttatgaaaattagtttattcaagtcccattttattgacactaagcaccatgaggatgtgacggaaagattgaggctggaaactaagaactgaatgctaagggcaaagtcaaggggcacgcgctctctgagctcctcagccaagagttaccctcatctacccctctgccccaggacctcccatctgtgtggcgtggctttctttaccctggttgcttcctttgattcttctacctttaggtgatcccagagacaggcagaactggggcagcctttaaaatagcgcatcagcatggggaggggggcagaagggagggctggggagggaaactggagcaacacgccgccagcacatggtcctgtcctgagaaatcaggtcttaaaggaaaaggttgcagcttcggaaaatgagaagtgcattggtctccagagcataaaaactcgagt

SEQ ID NO: 84087 - DNA, 1054 bp, Homo sapiens
gcccatgtgcagggagccgctggggcgctggctggctactcccctggcctccagggtgtgccgctcagagcctgctctcagaggcttagggagtgtcctgtagatgtctcctgaagcatctcttacctgctctgagtgctgatgaaggtctccgaggaagtttgacaaaatcatgcaggccgaatgagtttgcagacctttggtttacttttgttttggagggctgattttaatttggtgtgagcttttttccaaaatggaatcaaaatttcctggatgttttaaccttcaggtagttcataaatatcacaggatttatcattctgtagggctgtagtggacgcttatgggaaaagatttgggcaatagactgggagaatccttcttgatcatcggatgacatttcaggaaagaagctggggatattagtcttttctagctgtccgtgttttttctgtccttcttaccttttaccctttattttccatttaaaaggtcatctgcagattcagcatcttacaaccagtgctgtaggcccagtgccaaatggaaagcagaactccagatagttataacagagttcctaggaaaaaaaagtgtccattgtttcaggctacaagttagcccggactatggggcacttaaggagaaattgctgggacagtgtagaaggttcataaatgagtatttggtaatagctggtagtatttctgttctttctgccatgtaactcttctgtgctagtcagtcagtagcacagcacacgagcaagagcgcagacttcctaggtgtcgtgggccagctctgcctctttctggccatgcgaatcttgatcaggttatgtaatcttctgagccttgatgtcctcatctgtcaaatggcgttaatgatagatagtacctacctaccgtatatgagaagacatgtaaagcaccatggctgtccatagtaatgactcaataaatgcaaactattatttattatcatatgcaagagtaggtgctgcagaggttaaagagagactgttggtttccagttggcagtatggaaagtg

SEQ ID NO: 84088 - DNA, 1089 bp, Homo sapiens
atttaatgcagagaaataagatttcagtggcaacagatctttttgatagaatgtatatggaaaagaattgatccatttgaaaatcatttcaatgaaagtagattggaaaaaattagaaataattcatctgtgttgtatggacaaatggatcaggggattaggtttgcttaacggagttcaactcgaaagattctcaaccaaaattctccagtatgggtacaattctgtatcagttgaaactctggatgtgtaagcagttcacacacatctcaaaggacagtggccttaagccacaaaggaggcagagggggctgtgggtgagggagagagttgctacctggcatgggcggctgaggctgggagctgggtgagggatgagattcctcccagggtgatccaaccaagtggctgaaaggctgtgaggcagaagaatgttaaactgttatgcaaaggctgtttccaggtgccttggtttgatgcctccctaccccattgtccaccagacccatctgagaaagggtctaaagaagataaaactcaagtcaggtgtcagtgaccttggttaaaccttaacgaggcacataaggcagggtgagccctagtgaaagctggcagtcagtcaaaggctgcaataaaaggcaaatgccaccgggcgcggtggctcatgcctgtaatctcagaactttgggaggccgaggcgggtgaatcacctgatgtcaggagttcaagactagcctggccaccatagtgaaaccccctctctactaaaaatacaaaaattagccaggcgtcatggcagacacctgtaatcccagctacttggaaggctgaggcaggagaatcgcttgaacccgggatgcagaggttgcagtgaactgagatcgtgccactgcactccagcctgggcgacagagtgagacttcgtctcaaaaaaaaaaaaaaaaaaggcagatgctcaaatgagtccttgaaggaggacaggtccagggtctgttctgatggtcatcctccacattgaccctgagcccacatggctgtcattcgagagtgtccacatgtactgtggatgtactggatctggagaaaaca

SEQ ID NO: 84089 - DNA, 1037 bp, Homo sapiens
agggaaagggcattttctttttcatctttgaaaggcattgtgggtctgtctttaaagtgtttacaaaaaaaaattatataaaaaaaaagtctagtgtcgactggtgttttccctcgtgatgtttacagcttgctgtttgctgcccagccataacccactcagtgacagacgaacacagctaaggcctcgctgccagccttctgacggcgggcgagcacacggtctcttcccctgccccaactggccctctccaccaccaacttctctactttgggtttgtttggttttttccctctatttttctggctggttttttgctcttttctccccttgagaccctaatatcttgacttcattgccaaaaaacaacccattgagaactttcttcctactgatcccatctcttttcccttctttcctcctggttccggtcagttcagaggatttaacaatcacaagtgtcctgcaaaaatgcctgaacattattcttaggccctcgtggattttttttttcagaaaacttaaacaaaaaaagacttactaagaaatatgtacagctacccctgttttcaggcactatgtttgagaacattttagccattgatgttcacacgtggcatcagcccatgcaagataggtttctgtatttatatattaaaatacaaaaaaaaacttataaaatgtttaaaaaaatgttcaaagcttgggagaaaagctttcttcattagtcaaggtgttttgatatggtattaaaatgtctaataaaagatggcactgcgtgattttattttaatgaagtgttatacaatcaagaaatgggggcaagggcctgccccccactccctcacctacctccttagcattccttcaggctgctactcggggctccaggtgtgtgaattggtcctcagatagtcaggcctgggtggagggagtggcaagtcaggcgtgcctcctacaagcttcctaacctcttaagcatcatggaaccagtcagccctctgtggagtcattgtgctggacctctgaaaagatct

SEQ ID NO: 84090 - DNA, 1650 bp, Homo sapiens
cacagtggccgccacgtgtgcgttccccagtgtccaggctgctgtggacagcactgtacacatcctccaggctgcagtgcccgtagcccgcattggtgagctgaggatgggggcagtcagggtgggctccctggaagaggccccctgggaaggccaggcctcacctggcctgccatctccctggatccagagttcctggatgaagtcatgatggatgcctgcaacaggtacagcaagctgaattgcttagtggcgcccacactcttcctggagttccatggctcccagcaggcactggaggagcagctgcagcgcacaggtatgctggggtggagtggggcagcagggtgggctgcctcagtggcggcccggtgtcagccccccttccccaactgcagaggagatagtccagcagaacggagcctctgacttctcctgggccaaggaggccgaggagcgcagccggctttggacagcacggcacaatgcctggtacgcagccctggccacgcggccaggctgcaaggtgagctggggctggggtacagatggggcccacagctcggcccacaaaccctttcctcaacccaccactctactgcacagagcagcaggctgagcctcaacaacggggctgggcctggctgagcaggcgctagaaacaagggctgcagaccgccccacccagctgttcagataccgtctacagggaaagcacagttgtctgctaagccctcaaaagcccttcctgtgagccaggtcatgggaacggtgcggtgctcttgggagctgtacatggaaggaaggcttcctggaggaagagatgatagagagggggatgttagcctaacctggggaagggaagtctgggctccaggcagctatgcaaaggctcagcagcctggggcttgggggtgggagccacaggggaggtgtggcaagcacacctgggccattggtctcctgtgttgtgtcggggggaggtgagggctgaggcctagagaagagcaggattatttccttgtgtgaggccaagagctgaagcccagtgccctccgacccatcctcagccttgaccacggtgaccccgtacacccaatcaggcaggggtaactcataggcttccctctgaccagggctactccacggatgtgtgtgtgcccatctcccggctgccggagatcgtggtgcagaccaaggaggatctgaatgcctcaggactcacaggttctgcccaccctgctgctggggagaggtggggaggtgtcagggctgatcagagcctggggcagcaggaggcaagaggaggactgggctggagaatagttctgtcctctgggcccccaggaagcattgtcgggcatgtgggtgacggcaacttccactgcatcctgctggtcaaccctgatgacgccgaggaactgggcagggtcaaggcttttgcagaacagctgggcaggtaggagcaaagccagggaggggaagagctgagggcagaggaaagggagccccctgaggatgtctccttcctgcccccaggcgggcactggctctccacggaacgtgcacgggggagcatggcatcggaatgggcaagcggcagctgctgcaggaggaggtgggcgccgtgggcgtggagaccatgcggca

SEQ ID NO: 84091 - DNA, 1076 bp, Homo sapiens
aatatgtcttttttcctctggctactttgaagattttaactttggttttcatttgtttggatacgatgtgtccatgtgtgtttttgtttgagtttagtttttggtattttccctgtttggataaattgagtttcttggacctgtggtttcatattattatttttggaaaattcttgtccattatgtcttcaaatacttcttttctccttttggaatttcagttacatgtttattagaccatttgatattgtctcacagcccttggatgctctatccttttatgtttttcttccatttctctttgagtttcagtttgacctatcttcaagtttactgaaacttttcttagctcctttgtctactaatgaacctgctgaaagatcaactctgttactgtacttttcttagcatttccatttgattttttcttgcagtttccatctctgctgaaattccctatttgtttattcatgttgtccaccttttctagtaaagcctttagtatatgaatcatagttgtgttaaatgccctgtctgataatttcagcagttgagggttctgttgattgttttgcctcttttgatagtggattatcttagtcttgcctttatgggtgtctgataatgttagattgaagataggtgctgttagtatgatcttttctgccccttctgaagaggcaaagggactttcccaggaggtggtattttcccaggtggtctctaggggtttctaaacaagtcattctaggagttgtaaggcaggtcagacctttaataacaatgccttcctttttcctctattccagttctgccttcatagttctctgcctttgcccaaaactgcagaaaatgaacaaatcccaggtgagttgtttgtttattccccattttgcttttcagtgcatttaaggaagtttataaggatccagaaaatgaaatagaaaagtatgaataagacacaaaggaaacatagcaagaataactaatcaataccagcagccaaaaagcaaattgagttaattaaatgtcttgcattggttatgaataccaattatttggttctgtacattagg

SEQ ID NO: 84092 - DNA, 1176 bp, Homo sapiens
gaggggaattttcctgtgactcactctgctggcacttcctgtggtcaccagggcaggggctgggggacccggaggggcagctctgtggtgtgtagggtcactggggaagggtggcccgcccccgatgggctgtgattcccagaggcaggctgcagaccatatttgggaaatgcttgtcttgctggccgcctgggatgggggccctgagcccggtgggctgcaggacagcccccgccctcccgctcctctgtggggctctggcccctagacctgccgcactgcctgtcccgtcctgcctcagagcctgggacatagtccaccgttttctttttttttctttttgtgtagtttttcagccccaaagcaagaaacactcattcctgaaaaacaggaagagaaactatctccattgtctcagacatctctggtgtcttcctgaccctctcttgtctttacgtttcacaggacattttcttgagatgtgcttttcacttgagtgcctttttcattttgttgtaatcatggtgtggacagtgttgcagccatccagggcctctgcccttgtgctcaccttggctccaatatgactccacctgggcctgccctctcctagctgccccctggcccctcccttgggccttgctcctcctggctctccacactccagcctctggcccttttagggactggaggctcctagctgctctggagaaatgggctccctgctgatgatgtccacccagggcaagtgaaccatggggtctgaatgtctgatcctgggacctggggcaactactgcctacccaggccgctgcctggtatgccatcgccctctgatgccggccagggagatggcgctcagaggggcactgtccagcccctgctcatataggggaggagggtgggccctagggacttgaaagaggcctcacccccactcctctgccccaaggcacaggctcctgcttcctgtttctgcccaagggggcgtggccctttcttccttgtttcactccttgcagatggagtccagaaagtgggacttgggcccaagtggggatggtcacacagctactggctggccagaacccaggtcccatttccgagtcagagtctcgaccaggctgcacatctaagacgccaggagactctgaggagggaccttgcagggcagcc

SEQ ID NO: 84093 - DNA, 1134 bp, Homo sapiens
gtgagagcaggtgtcggggtgcctggagaatcggggcccaggtacgggggtggcggggctgtggggaaaagagctttggggaggagctgctgacacttcctcctggcactgcttgcccgggagctgggtggaggcagggcagggcagggcagtcccaggttctgccaggaaagtcaccttgggctggggcaggaggcttggagcttctggccgttactgtttgtctgagcaggagggtgagcactgtgtactggtaccatggccccaggtctaggcgagggatggaaataaggacagtgccactagggcctcctgtctgtacaggaggggccctgagacagctcctcaaacccctttcccattatacggatggtgcagatggggacactgaggtacagagagacagtcagttgtcctcagaattggatccagaacctcgtcttctggcatggccccccagtgcagcaccacatgtggcctccgaattcccagtctgggattgggggagctctggtccttgggggaccaccatgctcttttggagttgtcaacttggtaggaaccctctggttccaacgctgtgcctttgcggccctctcctggcatctgctgtccctttaggaggtcctaccacccttttcttctgagcctggacaactccttcccttgcccccaggagcccacagccggctaaaccaactggtcagctagaaccaaccagcaggggaggtgcgctccaggggggcttctaagaggaggcagttttggagtcagaggtgaagtgtggggagtgggattgggtgatagggaagtttctccagcaaagacactgggcaagcctcttccttggcccccagataaagggctgcagggtggtctccgtgtaagagggtggggctctgccctctgtcaggcccttcctggccctccgagcacaggagaggccctggctccacctgtgtcttgcttccctgacttcctcccacctctacattctagcctggggcagaagtagggtggaggggtgggtctagcctccttgatgacacagttggggttggaggtgggggctacccctattctgggcctggtgctgtccctgaagtcaggggtcagcctcacaccgagctctct

SEQ ID NO: 84094 - DNA, 1053 bp, Homo sapiens
ctgcagattgtgcctccctggcctggcccaggggctctggcaccctggttctgctgcatggggtgacagtcactgacctgcaaccgagcaaggggcaactcaggagagccaaggttgtctccactcggtttcccccgagtgattcttccttctatctccctcattcccccagtgccgctctcctaccccatgtcgctgaagcagatgagttggagcaggactcaggagggtactaggcccaggttttaggctgaacctaggaatgagtaatgagaggaggcagatcagctggaggaccagcccgagtccccagatgtcggcacaatgcaggggaaggtaggtgctgcccgtgaaaagcgctgggtcgagagctcgccagcctccctgcttgaggcttcatttcctggggtccttacacggtgggaccgtctacagtcggagctgtggtggtgatgattcgtctcctacaggctggggcacgccccctcccctttccctctagattcagatttgagtcccacggcccatggacacgcgatgaatgccctggggttggttagcgggaaagacaagtcgacttgaggccatgtctcggctctggaggaagaaggcaaaccgggcagccttcccagaagtggaggagtttgcgtaggccttcggtgcgttctcgcctgggtggaaggcggggacgtgcatttgttggagagcggtgtcctgcgccctaggctggaagcctggcctcgggcaggggcctggagcctcggggttggaggtggggggcggggcggggggcggcccctactgggcgggcttctgtctgcgcgcccgcgcccccgacaggcggcttatttgcatggagagcggcggcggccaatgggcgcgcgcggccgggcatgctgggatcgggctgggccggctgggccgtggcggcaggcggagagcggctggaccggctctgggtggccgaggcggcagctgcgcggcggcaccggggcggctgcggcgcgctcggagccccgagggcacgcggcccgggcagctcggtgtgcgccc

SEQ ID NO: 84095 - DNA, 1037 bp, Homo sapiens
cagcggggcagagtgcacatggcccctcctcactgcacacaggggtgccgctggtccaggaggacctgtctgggagggccctgtgctggtgcctgccccacctgccagccccaggaggctgggcaggaggggagagctgagagaggagggtgcagaagaggaaggggttgctggggtgggcggagagcctctgaacggcaccctggggctgccttgctggctcacaccggcctcgggcggctgtgagctgagcccctctctgaggcaggcacctacggcaggggcctctgctgcttgttaatttccagataatttggaaagttgtgctgcctcttccagtcctgtttctgacaggcctgaagtggaggcgtagggctggatttagtgggatgcaggccaggacttggagtgcagggaggccccacccccccccatccgtgctgtgtcccttacctggcagctctgcccacacaccttggatactgcccctgcccccgggtctctggggactggccttgggcatgccaaaggggatgaccactggagggatttggcttcaggctatagggcccgcccaccttcccacagtcagagccactactggtaatgacaaacactgccccgcagtggaggatgggaagccctttatggtaacagctccagcttgagtcctgagtgcatgctctgcggtctggggtcacctggggtgcttaccagtaggcacacgcctgggttatgaggtggaaggtgcgagctctgctggccatgggagctgcgtggggcattgcccctctctctgcctccaggtagccgtcgttccgtcctggtcccagggcagcagtgaggaatgactggtgttggggtgtgggctgtccgttctgtgtgtgacagtaggttcacctccgtgctatccacaaaggttccgtgccctcgcctgggttttgtttttgtttttttgagacgtagtttcgctctctcgcccaggctggagtgcaatggcaccatcttggctcactgcaacctccgcctcccgggtt

SEQ ID NO: 84096 - DNA, 1045 bp, Homo sapiens
gtgccaggcagtggtgtgagtgggggagctgcccaaggagccatgaggcctgccctggggttcatagctggcctggcagccaggcagtggacagagagagtgggatgaggcagtgtccaggttcaaagtccgcagctcaggccccactgcccctgccgcaccctcttctgccgctgggccttggctcagcctgtccctccctctgtaggaagtgatctccagccagctgcctcgttcaccaggtcattcccattcacctcaagctctgcgccatcatccataggaagccttcccggcgccgtctgccattgtccatttgttggtggggtgatgtggttgtgtcaggctccctcttcacactgcagaacccatgactgcttgccccgctgtctctcgtgccttctggctgcagcttgcccctggccgcctgctgagtatgtggccccaggagtaccgtggagcccccacaggccagtggctgtatccccgtgcagagcctgggatctcagccactctcctcagagccttgcttgaggctgaaaggggttcctggagaggctgctgcggggtggggagagtgttttggtgggtcaaggtcaagggctctagagtgaacagtgttggctctgtgccttgagtgagttactgaacctccctgagcctcagtttcctcctctgtgtcatggggatgttaagagcacagagctcctgggattttgtgagaatttggtgaggggtgaccagagctgttagaaggagggtgattaagtaacagcagctactgctgtggagattattgtcttcatgtggccatggttggctagtgcagtggctcagacccattcctgactcctgggcagccagcgtggggaggaggctgggctggacccaggctgattggcctctgcccctagggttctgtggccctttctttatggtcagtgtggtttctgccaaggccttggtggtgggatgaccctggcctctcccctgcccgggcatggcctgcaggaccctggcctcttgagccttggatggtcaggtc

SEQ ID NO: 84097 - DNA, 1019 bp, Homo sapiens
tgcctcatctgtaacaagagaggaacagcgggctgggtaggacttggacagataggcactgtcgtggggacctgcagcctggccacaccatcacgggctctgagtcatctcctaccctctcccttgtagtcacagcccaggagaattctgctgggggtgggcagaggtctttgccatctgccccctacgtggctggctggcagatcaccgtggctctctctcctgggaccttgggcagtgtgtgaggtggtggggccaagaggagaattcatttttggaacagtcttgaagtgttcggaaaattgctttcatgtgctgaggaggccctgcggaggcttccagactgagctgcctgctcaagccctgcccttggaacccagagtggcgactgctcagggacacgtctgggttttaagcacacccatccatttgggcagtcttttcctagatgggctgacgcagcaggcactttggcccacagaaattataagatgcttcagaaggggatgggaggggaagcagggtgagagattggtgggctggttgtgcgggtagcgaccccctgagtgttgggggaggggagatgccggggatcagctggtgtcaccttgtcatttgactcacatgcagtcccggacccagagaggggaaggagccagggcgtccctgctacctgctcagtgccccttcctctgctccaggcatagagcagtgcagtgctcgtgtgctgcctggacaccctgtgggtattcccatgccttcctctcgcccagcgctctgggcctgactcttcctgcagctgagaggacacatttggaaggaaatgtgccacccacctcagacctctggctggcattggcttgggagtccatgtttaggggtggcaggtgctggccacccccagccctgccaggtaagaggccagcttccagctgcagagaggcctccctgctgtctgttctgcttcttgcttcccatctgtgaagtgagtgtggccactccagctcctcctgtgcccc

SEQ ID NO: 84098 - DNA, 1089 bp, Homo sapiens
agggcttttatcaaacctaagagcaggccctgtcattgtgtttccagccattctggcctcattgacggttttgacacagcagcttagtacctgagccagaccaggtgttttggttcctcattgctgaaaccataagtccagacttgggccatctactgtccttgggagcctgttggaagctggcttcctaaaaccatgataacattacctgtcattttattgagtacctgctctgtgccctgtgtgatgtagacactattttatttaatccacacaacagtccttcagagtggagatgactagccattatttattatctttattacagattaggaaacagaactagcaaggttaagtgacttgcagagtcacagacagcaaatgacagaactcaaacctccagccctctggcctcagagcctgtacatttctggccagccctccagaagggtcagggtagtcaggcctagctggaaatgaggtaggatggatggtacttcctaggatgctgttggaagggaaagcaaggccctggactcagcaggggaacacaggtttctgaacctggtagcattctcactataaatgtaatgactttgtaatgacagatgcatattttccacagtgcaacaaaagaaaaattagtgcagagattcaattttgtctcccattttccatggcaatttttgctctctccatagattaattagcagcagagatctcctccgcccaggcaaatcgcagcacgctttatggtgaggaggtgcattaagatgcagctgtgtctcattaagcagccagcctcactcctagcaagcgcgcctgtgcttcagcccttgctgctttcccgtcctgcctggaggacagagggaaagtttgctgaacccaaccagattagggagcagagtgtccacctttcaaggggatccttgaaaggagagatcagaggcccttaaactcattctcttagaggcatttagggaaagagttctcctgtcatcttagcagaagcaacctagacgcaaacagggtggaggatactgcggagaggagaaaaggatgaggggaagaaaagagctcaaagcagtt

SEQ ID NO: 84099 - DNA, 1092 bp, Homo sapiens
aggttcaaaattctagaggcataagacaggtacagtgacatgcacccatagtcccagctactcactgcactccagcctggacaacagagaaagacccggtctctttaccaaaaaaaaaaaaaaaaaaaaaaaaaaaagacacaacaaaactctaatgttgagaaaaaagaaacttaaagcaaggaaatgaagacacagacacaggctctgggcaggctgtcacctgagtaggctgcaggtttttggggaagaattatacaggcacctcctcgacgctccagccttctacttctaaccaagtcagagccatgcgagcacttgttttataatgattcattgcccttgcccagttcatgcactcttctgtatgtatattatgttttacaataaacaattcaaatcttggctcttcccataccataggtactagccccattttcttcatatataaagtagacacattttaatatacctctcgtgattattgtgggaattaaataagtagaagaaaggccgggcatgtttatcaatagcagtcttctcccttttccatgagtcctgtgctcgcttttctttctcccacctgccattactgacctcaccatgcctcaggccttactggaaagctagatgctttattcctttaagtttcttcctgatgtgttcctgcccactcttcaggaatattttccacagcggtgggaagtagagcttggtggcatctcctcccagaatccctggctggctttttttccttccctgggcctttaaacttgggaggtcccagggctgggccctgggcagtcatctcttcctccccaggaaagctcactagttgcaagttgcagctaccattctctactgaagactcaaaaaaaaaaagtatcccctgccctgaccattccactgagctccaggcttacatttcagctgttagttgacatcaccttctggttgtccaagacacatcaaacttaactttcaaaaccaaatacttgctttccctccataaacagaaccttcattcctcagaattcttagaaaatggcacatcactgtctaccctactgttaaaagaaaaacttggggcca

SEQ ID NO: 84100 - DNA, 1012 bp, Homo sapiens
gtggtagctctgacatgcgccccaaacctctccattcagattcagctccagtaactcgcagctctgtcctgttctccactcttgcacagtgatctgagacagcagaggaactatcagcgtgtgctacacattattgcttctctgaatattgattatatgagttggacagtgttcactctgcttgagttaatagaggtcttagaaaagtaaggagtgttgggagcagtggctcactcctgcaatcccagcactttgggaggccaaggcaggaggactgcttgagctcaggaccagcctgggcaacatagcaagaccttgcctctactaaaaatcaaaaacattagttggacgtggtgcacacctgtagtcccagttacttgggaggctgaagtgtgaggattgctcacctccagaagattgaggctgcagtgagctctgatcgcaccagtgcatttcagcttgggtgaaagagtgagaccctggcccaaaaaataaaaattttcaattaaaaaaaaagtaaggaatggtgctgttaaagataggaagagttaacaaaatgtagactggaagggaaaacaagattaaaaagaacatctgcctagtgagaacttttcaggcagtggaaagtcacataactgggttagggaacaactaactaataccatcctcctttatgctctgcttttccctcctttgcttgaggcttctcccctcattcgcccagccagattccacagatgtgactgcatgtttccagtgcagatctactggctctgtgctctgcctcagcccttctcatctgccttcttaagtgcccagccccacatctccactcactctccttttctggctcctgcagatggattaaaggagcccagcccctaggccagtgaagggactggagctctgttcttcaccttggctgagcatgagaatcctctggtgacattttccaaagttcaggtgaccacctctgtacagagctgctgaatcaagagtctagaacaggtag

SEQ ID NO: 84101 - DNA, 1040 bp, Homo sapiens
gaaagggttggcaagggctttctgtaatatgtttctggagatactagaattcaggacttctatcactaaaataggtatgttttagacacacgttataaagatgtagagcagctgaaatcagatcagacaaatgtaagtgcccttcattattggcttagcaaagaacaatagaactgaggaataaatcattttctatttgtataaaaaaaaggtaaagctgttgctacttgccagcttttctttttgccttttgctgatagatggcactttttttgctggcactgttatcaactttattaatagatttaaaagtactgacaatttttcaagccacaaaaggtttaaaaatctttggaacttcttgtcatacttctggttttctgctttcctgaggccgttgtcccatagagtactgtcaatacagtgttgagaagtgaatgggagttaaactagctccctaatatgccatcagtggcttccagtccatttccttgaggggtctaatcttgggctttggggagattacttagagatttatacaggtgagtagtgaaatttgcccagggatttgagttgtactttttagccttacggattttagctaactccagagaaaatgcgaaagagaaacgttggttcaagacagacagccctcaacgaagaattatcttcataagcttgctttcatcctgtttctcagagagttccaggccagtgtcagaccttccgtggctctggacaatattaatagttcatgaatgagctacaaaaattcctgatggatgcaattgtatgagcctatagtcccggctacttaggaagctgaggcaggaggattgcttgagcccaggagttcggggccagtctgggcaacatagcaagactctttcttgaaaaaaaaaaaaaaaaattgtaaaggtccattcctacattgtaagcagatgacaaatactaaggaaactgcatatctctgccaaagaatttttgttccaaataagttgcattttagtgattatgcaggctattagatggaaggcata

SEQ ID NO: 84102 - DNA, 1012 bp, Homo sapiens
aaaatgtacctttacaagtgagagttctggccgtcacaaccttacccaagggatcacgcttggcatcgccaggatgggctgacctgacactagtgcctctgatgatggtgcagtaagaagtgcccaacctcatctatttagcatcctcagcaaaaatatttaacctgaatctagtcataggaaacagataaatccaatgagcaacattctataggtcaaccagactggactcttaaaaattaacaagacactgaagaccaaaaatcaaaacaacaaaaccaaaggcaagagactgctagattacaagattaaaggagactaaagaaactttgaaatgtgatgcattttgagagagaatggggagcaactaacgaggccattttgggaggtgtgttgaaggaaatttgaacctggactttatattggactgtatattgtgtcattatatcaatgttaaatttcttgggtgtatgttggaaagtgtccttgggagatacatgctaaaggtatgtagaggtgaaatgatgcaatggctccacacggccacaaaaaagtaaatctatatatagaaagaaaagttatatgtggcaaaatgttaacaattgaatctaagtgaagcgtatttagataaatagtggttctgttttcaacttttctttcagtttcacatttttcaaactataaagttggggggatttttgcaccagaccatattggaattcctcaccagaccatactggaattcttgtacataacccttctgagttaccaccttaaggttacaaaaacaaagaagaaaaagcaagagtcagcctcaaggttcattaatgccagcgccccatttctcgttattgagtatcatcattataaattgctgtgctgggaaacccttctctttttttttttttttttttttttttttttgagatagggtctcactctgtcacccaggctggtgtgtagtggcatgatctctgctcacggcaacctccgcctcccgttctcaagcaaa

SEQ ID NO: 84103 - DNA, 1049 bp, Homo sapiens
ccttgagcccaggagttcaggatcaggctgaacaacatagtgagatcttgtcttgtaaaaataataataataatttattaaaatattaaagtattagctgttagctgagcaaggcatgatggcgtgtgcctgtgactcccagctactcaggaagctgaggcaggaggttcacttgagcccaggagttcaaaaccagcaagatcccatctcttaaaaaaaaaatactagctgagaataagaaatagtaagtcatcagattttccagcattcttccagagtacaagtacatttagtagcttatatttgggttcttgtttctcttcattcttagagggaaactattccttggtgtgactcaggtcatgtttttggattttgttcttttatttgcatgagtccccctcatttcagttgtttaattcacatgagaccatcaatgtcccatattctgagcccctttccttcatctgaacagtgagaacaatgaacacactcatgcaatccttgcagagtcaccagctgagcctcacggtgactggaaggccatagcaaagccactcgtcccccaggagagggtgtcaatcacacactctcacagtctggggtgaggagccctgggtcagaggccttgctctcacagcagggagatcgtgatgccaagtttcccaaagcaaatggctaatacacagggaaaaatcaaagaatggaagggtctgccctactttagttgattgcacttgatttttttcttttttttttaactagttttccttcaaacaatctgttggcagagcagccaactttgtttcagcagaccttcttcgtttgccagccagttaacgctaaagcatctttttcaaactttttggccttcagtcatagttacacgttttacattatgacccagtgtgagtcatggtcacataaaagcgcatgctccgagggggtctcagaatgcaaagaaactggacttgtttaagggttcatacatctcctagcagtagggatgggatgaaccttggaggacaaactacatttctgaatgaaaa

SEQ ID NO: 84104 - DNA, 1009 bp, Homo sapiens
tcaggagttcgagaccagcctggccaacatggtgacgccccatctctactaaaaatacacgcaaaaaaattagccaggtgtggtggcgggtacctgtaatcccagctattcgggaggctgaggcaggagaatcgcttgaaccctaaaagtagagcttgcagtgagccaagaacgcgccattgcactccagcctgggcgacaagagtcaaacactgtctcaaaataataataataataatttggcgttgacctgattatccagtattgttcactactgagccatggcatggactatttttattttccctttcatgtatatgtgtgtatatttgattggctggatggttttctgtccccatcacaattttttttcccaaactcttcaacaaagccataaaatccttctgaatactctttctaccatactttatattctactatagtctatactattctactgtattctataatttgtcagtcccatccttcaccttctgtccccttcccccattccccgtaacatccctctggggccttccattctcctgcacaagtctgggctctttgttctctttgctttctgtgcagctcttgttctgggactgccttttcttcctctttgtggaactctgtttcttggattccatgtcttccaggtttattcccctggttttttgtttcgttttgttttttgagacagagtcttgcactgtcgtccaggctggagtgcagtggctctatcttggctcactgcaagctctgcctcccgggttcacgctattctcctgcctcagcctcccgaatagctggaactacaggcgtccgccaccacgcccagctattttttgtatttttagtagagacagggtttcaccgtgtgccaggatggtctcgatctcctgacctcatgatccgcccgcctcggcctcccaaagtgctgggattacaggcgtcagccactgcgcccggcctattcccgttttgatagaactcatcctctaataacttc

SEQ ID NO: 84105 - DNA, 1020 bp, Homo sapiens
taggatggttataatttaaaaagatggaaatagcaagtgttggcaagggtatggagaagttgaaaccttcataccttgctggttggatatagaatggtgtagccacataggaaaagagtttggcagattctcaaagttaaacatagagctgtatacaacctaacaattctgtgcatatacccacaaaaaatgaaaacatatatccacacaaaaacttgcacacatatgttcatagcagcattattcatccaaaaagtagaggtactcaaatgactttcaactgataaacacagatgaacaaaatgtatgtccaaacagtagaatattattcagctataaaaaagaacagagtacacttagcaaactaagaatagaaggaacttcctcaatctgataaaggacatccatgaaaaacccaccactaatgtcatacttaatcatgaaaaaccgaatgcttttctcctaagataggaaaaagacaagtatgtctactcatgccatctctattctactttgtattggtgcttctagccagggcagttagacaagaaaatgaaacaagaggcatccaaattggagagaaaggagttgaactattcccagatggtatgctctaatatggagaaaatcctaagcaatccactaaaaattgattagaactaatgaacaagttcagcaaggttacaagatacaagatcaatatgtaaaaatcaaccgtatatatgtatgtatatatatttttttttttttttttttttttttttttttttttttttttgagacggagtctcgctctgtcgcccaggctggggtacagcagcacaaacacagctcactgcattctcaacctggggtcaagcagtctttctgccttagcctcccaaagtgctaggaactatatttcttttttttctttttttgagacagagtctcgctctgtcacccaggctagagtgcagtggcatgatcctggctcaccgcaacctccactcccgggttcaagtgattctcctgcctcag

SEQ ID NO: 84106 - DNA, 1147 bp, Homo sapiens
ggagagtagccattagcaatgcaaatgtgaagtttgatagcacaataaataaaacactgaaaactgtagatgttacttataaaacactggcactcagataaattgggtttggtcaagaagacagtgaagcatatccctgttgggccagaggctgttatcgttttgctctgaattcaaaacctgatatgtctccaaatttgcttagggttgttatcctggaaaatagaatctgatagaaggtgggcactggtaccaagtgcaaggtggaggtgatcatggttagggcaattgcatacaggtcatgactgcattggagtctcaggaaagattggtttagtgatttggcaaatccaaggcatgagttttgggtggttttgttgttttgtcttatttttccaccccttaagagtcttaggggaaaacagcatcattgaatagactagctaaaaattcagcacttaatacccttcacagcgtattagcctctgcagagctttgctattttggaaccagtggtgtgaattattctctgttaataagaatctggctttcttttcctgttggaaaagaggctcgtgtgcatgttactctgactcagtagttctcaaactttttgttctcaggacctctttacgctcttcaaaattattgactgggttataactgttgttatttatagtataagaaattaaaataaactagtatatttttaaaatttagaatagcatgattttgtaaatttctttaatatctcgcttaatcgaagatagctggagtgtcagatctgcttttccattcagtctattttaatcagttgttttggctgaattatataaagaaaatttagtctcactcaaatatgtagttggaaaaggaaggagtattttactagctgttttgataattttggttatccttttgtgatactacgccaaatgtgaacagtgatgtaacagcatgcattaatcatttcagaactgctgattactgggttatacagctcttctaacgttgactgatttcattagacattctcaacaagtcacattcattaatatcagtgccaatcaaaagtcttcacaaggaagctgtctagttcacggtggtaggcaacaagttttccaaaattctaaagctcagaatttat

SEQ ID NO: 84107 - DNA, 1071 bp, Homo sapiens
tggatttgtcaaacctgactccagtgccagagtaaagagcgttgtactaacttaacgcttgtgtctgaatgaagttggccaaatgcttacatatgtttcctggtggtgattctttcagtattctcagttcacatgccactgggtcatcagaagacaagtatctggatttcagagccaacagtttgcttttatttaagctgcaagaccctccattgccataagatctgccactgccataataacaaaacctcagctggaacttctgctgcagccattgaggtctgtacataggcctcctgctctcgcttctggttccatgtaatatcattgtttataaaaagaattagtgtctgttctgtataaaacaacactgtggggcagaagctttgcagtcattagtaagaggggccaccgtgaactacagttgcattgaaaagcaattcttttccctcttaggaaatagaactttaacttaggcttgcttttataacacctgaaggaatggaagaggaaagagtagtgttctcgagggtaccttaacttacagcttgtgttgtaggtcgagattggctgcattattatgttacatggtttcttgagccatggtgagcatattttccaaaccaaaaatcagcatagctattcggacagtattttttaagtcaaatgtaattacacatttagaagtaaaattaaaagttgagactgtccaggaaaacccagaacatagggatgccttgcctggaagacgggaggttgactcctcaaaggagaagtatgctgaactttaaacttgaccccccttgcctttcagcacagtgttgatatcagccctcctagaggtgcagctgggccccgcctttctacccaaagtaggatgctacaccataggccataggcaagaccactgatctgtatggagacttgatttttagtatgaaggatattttttgcctggccttgaagcctgtagggcagacatggaaaaggaaatgacagtactgacccaggactgtcccgtctgacttattacccaatttgtgtagatcatgcagtctaggaactagcaag

SEQ ID NO: 84108 - DNA, 1356 bp, Homo sapiens
tttaataatagcttcttttttgacttaacacagatgtatttaaccttgccattcaacttcagttatcacataaaatttataattactttctgatttgtaagctgtttatgggcttagagtaactccacatattaatataccaaatatttaagatgctatggaaaaacaactagccagtcaccatggtgaaattcgtgtcgtgttgatagccaaataatccacaacacattatagtcacaaataagtaacttggtttccttctcagcacccatctatttaaaatacactaaaaaacatccaccagaatgatgcagttaatggccagtgtttagcacttgacatacatttataaatgtttagtggttctcaaactctttggtctgaggacttctttatatccatatcaatgattgaagactccaaagagcccttaatacctattgatatttacagtagtagaaattaaaactgagaaatttaaaacattaacttattttcaaataacagtggtaaactcattacatgttaacataagtagcatatttttgtgaaaaataagtatattttccaatacaaaaaaatgttgtgagaagagtggcattgttttacatttttacaaatcttttaaatatctgtcttcattgaagatagctgactctgcatcttcttcacacattccattagctgtcagagcaataacaccgtcacccaccatgtagcctctggaaaaatccacttgtgacagaatacaagagaagaaggcaaataatgtcttcgtgttgtcatgaaaatagctttaaccttttcagctccctgaaaaaaatctcccatctctctggggtccctgaaccacactgagaactgcaggtttaatatatctctggaaggatactcaggcagctaagaacagtgttggtcttggggaaaggggaatttggtagctaaaagacagcaaagggtagaatggaggcttattttaaaataccttttgagtattttacttggtacattaataccatttttttaaaaagtgaattgttaaataaagcccttattttctttctggcagaaaggtgcttaaagtaatagttttttttgtttgtttgtttgttttgttttgttttgtttttttaatttcactttaaacacatagatctagaggggagaagtacctcagaggacacatctccaatctaaattaggttcccactagtatgaaccttcacagcccctaattcttttctgtagcacttacctcaatttgtaattgcatggctgtgtgtgtgtgtgtgtgtgtgtgtgtgtgtttcacctcttttctcccccactagactattaacttcctgagggcgtgaa

SEQ ID NO: 84109 - DNA, 2376 bp, Homo sapiens
taaattgttcatatataccacagtttatccatctatcctgctgataaacgtatgggttatttccaaatctttttgaagacatatgtttttatttatcttgggtacctaaatacctaggaatggaattgctaggtcatggagtagatgtgtgcttaatgtttttgttttggttttgatttggtttttctgagacagggtcttgctctgtcactcaggctggaatgcaatggcataatcacagctcactgcagccttgaactctgtggctcaagagatcttcccacctcagcctctcgagtagctgggactacaggtgcacaccactatgtctggctaatttttaatttttttgtagagatggggtctccccatgttgcaggctggtctcaaactcctaggctcaagcagtcctcctgctgcagcctcccaaactgcaaggattataggcatgagccacaacgctcagtcttaatgttataagaaactgccaaacagttcctcaagatggttgtaccattttatattttgccagtgatgtatgagggttctacttggtccatacgtatccttgttcacatgtgatgttgtcagtctttttttttttttttgagatggagtctcgctctgtcgcccaggctggagcacagtggcatgatctcagctcactgcaacctccacctctggggtttaaacgattctcctgtctcagccttggagtagctgggactacaggtggatgccaccacacctggctaatttttgtattttttgtggagatggggtttcatcatattagtcagagtggtcttgaactcctgacctgaggtgatccacccgcctcggcctcccaaagtgctgggattacaggcatgagccaccgcgcccagccttgtcagtcttttttatttgggtaagtgtgaaatggtatctcctctgattttagtttgcattgctctgaaaactaataataatgacatcttttcatgtgtaaagtgactcttccaatcttacccatttttattgggttgttttattctgttattggtttataggagttcttcttatattctgaatatagatagtttgtcagatgtaaatgctaagaatttttcttagtgtttgtcttgcttattcatttttttggtggtgtgtttagatgagcagagtttttaattttgatattcagttcgtcttttacagttagtgctttttgtgtcctaagaaatctgcctataaggttgagaagattttgcctttttttaatggtcctggcttttatgtttaggttttttttgtaccttgaattaattttcatatatggacacatttaggttttttttttagaaacatagaagcaatatatgcgtgttcttctaaaaattcaagcaacacagagatatagaagacaaaatgaaagttaataatttggtggggtttttgtaaggtctccactgttcagtagagtagtcactagctatatgtggctgttgaacacttgaaatgccaccagtctgaattgagatgtgctataggtataaatacacactaaattttgaagaattagtaagaaaaaataagcagtcaatttttatttcagttccattgttgaaacagtaacatttctgacatattgggttaaatgtattaaaaacaatttcagttgtttctttttatatttaatagggctaaaatatgtttttaaactaggtatgtggttcccattttatttctgtgtgttttttttttaagagatggggtctcactatgttgcccaggctggtctcaaactccggggatcaactgatcctcccttctcagcctcccaaagtgctgggactacaggtgtgagccactatgccccgcccattttatttctatttgacagctctgtcctagacctttccctaagcatttagtaatctatgtatatgaatgtgtatctgtatgagatacttttctgttcacatataagtgttttttatttatataaatggagtaatctaagcctattttcctgaagtttgtattttttgcttgaaaatacaaaaatacatatactaacatatttcatcttattgcctatacatttatctgattcttgttaatggctagtatagtgttctactttgaatattctataatttattttattttattttattttgagacagtctcgggagtgcagtggcgcgatctcggttcattgcaacctccacctccagggttcaagtgattctcatgtctcagcctcccaagtagctgggactataggcacccaccaccacgcctggctgatgtttgtatttttagtagagatgggatttcgtcatgttggccaggcttgtcttgaactccttacctcaggtgatccacctg

SEQ ID NO: 84110 - DNA, 1069 bp, Homo sapiens
tattttgtcagttttcatcttaaaagcagggtggttttggtttcatagcttgtgttcagcaagtagctgaccccaaaaacagactgtaaatgtctgttatatgattggaatgacattttatttcagcttaatcatgccatagttcaagcagagacgtgagatgctccttactcattccacaagacctattttgcaattcctgctatttcctttatttcaggttgacttgtcctctagttgtagaagtgttgtttccatagcaatgcagcttacaacgcacatccctgtcagagtgcacagaaaccctgctgtgttgcctggaagccttgttttccagtcagaaaggaagcacatggtattccctcagcctttcctgcacttaactttggcttgccttgtggataacaagaaactcttggttgttttctaccatagatgctgggttaaaatgtatctaagggattttgatgtataatgtgccctgttactacagtgttcaggctgtggctggtgactgctagcgaagttgctgcgtgaaatagatgtaggggacgttacaggaatgtgagctaaacagtctgccactcagcatgaaattctatttattgctaaagcagtttggggcaactgcatgtttgttgctttggatgattttcttttggtttttactgcctatgagaacacaatagaactgagtgaacctcgagaagtggagaagcaaactgttggcctttctgagtggtttccctgaccttcaactaggagcatatttagtgacttcatgtttttcttcctttggaactaaattgactagattgtacttgaacacaaggagtctttttcatatcttctctcacatttagtttcttctttgccacctttttcttttctttatttcttttgttacttcagctggaaagcttgttatatggacattcattggaaatattcaagaaagagttgagttataaatagagcaggatttcagagagacaaggatatcatcttaattgtgattggtcaataaattgaagagatttgtgtggactcacaccaatatagtggtaga

SEQ ID NO: 84111 - DNA, 1058 bp, Homo sapiens
acctccacctcccaggtccaagcaattctcctgcctcagcttcccgagtagctgggactaaaggcgcccaccaccatgcccggctaatttttgtatttttagtagaggcagggtttcaccatattggcaaggatggtctcgatcacttgacctcatgatccgcccacctcggcctcccaaagtgctgggattacaggtgagagccacagcgcctcgctggggctgtatcttattgatcctttgcaaatgctgtgtgctgcttcactcttaggttctttgtgttggaaagtactatctcaaaatgttttaacatcagggaagaatgtcattcatcctaatcatagcactaagcgatttttatgttctgattaaagttcttaaaaaggcaacttgctgctatttcctgaagggttctgactgtacagaaagattcatattagataaatactttaatttggattgaggaatttttcttttgggagaggctgagcagctgtcttctaattattttggtcaaggattgaaaatcaggctggtctgaagtccagcacttaactatactcagttacttgaattttggattctgccacaaccctgttacccaagcaaacctatgataaatttaagctgaaataatttaaagctaggccaatattttcccatcattgaggatatggaagattctaatcaaacattcatctttagacctagtaattctggatgcttaagaccataaaacataaccttttgattattagcatttccttgaatttgaaatgtagtacaatttcagtagttgctaatttgagaatgtgtaggaaaaactcatgctttgcattggcttctgctttaaactgagatcttttagtcctagctgcttgtgagatgatgtgcctgtaggaagtggaaacaaaaggagaagagttttcccccacagtcaaatagagcatgacatgacttgtttggccagaggtgagaattaggaagatccaaggaatatcatgtacaaaaatgctcttgatcttggtctcttgtatagcgttacttgcttcaaagca

SEQ ID NO: 84112 - DNA, 1649 bp, Homo sapiens
caatttcaagccttagttgagaagagggctcagtggagtctgactaaagtttggtttaaggagagtcttcatcaggctgtcctcacagagcagctcctagagcagagagccatgtgggaaagggtatagagggaatctaggggccaaccaggagctaccttgggagctatacaagtgaaatatttttcagtaaagaatgctgactcccttataaacagggtaaagtgaaatttgaccaaaatcagtttctttgaaagccctgatggaacataacacattacaaggatatgtctgccaagtgcctgagtaaaagtccttagagttgtacgtgaaaatgtacgtgtttaattatgatactgtgaaccttggatttctgagtagatccagaatgactttcaaggttggtatgctcatttttatgaaatgcatctcaaaaagctttacagttacaattgtgcttgggaaaagacgggtccaagaggaattcagctgatctggggtatctgagtgggcacattttatccgtgcaaatattagtatctgtcagcagactccatttgcagagtatagaaagtcttttcaagggaaggatctataggaataatctaatattttaaaagaaaattaacacagtcaagtttttttcccacagacttttttcattttgggagctgcttcagtttatagaaattgtcttgcagaaacactttatttgtttattttcctctctctaaacagatttaagcaatacaggaaaaccagagcaggagagtaaaacatcctgtcccacatcttttgataagataagcacagattcagaaataagaacagatttagaggagcaaatgtttgtaactaaaaatgcatttcctccatgtgtttaaaatagcacactgcttaggctataaaaagccaaagtttatgttttgggaatggaataagccctactttaattagaggcaggaatcaaactacaaaaattactctcctacatttggtagtaaagtacaaagcttaatgtgtctaaattctcatggtcttgtcattccatgctcttgatccgcctcttccctcactccccagtccttactaccagtactgttagctacttgcatccagttttctcagcatttgctggtatctggctggccaggcttcaaccccacatttgctacctattttcaagccaacatttactatttattccaacagcgggccaccattagtgtcattaaaatttgtaatcctacccttacgcattgacttgtttaattaagggcctactgtttagctgcctctttatagattgagaatgacctaaagcaatataacttaagagggaaagacatcattttcccatgtagttttagccttgttttcttgatctatggagtggaaaaaaaaaaaaaaggccttaatgttgagtatcaaacaacatcataggtgatgtcagtgtagcagtgttttccccaaagatagaagacacagaatccctcacagtaccatcctgaagataaaagactcagactaaggactgagaagacagtaatgctgaccattgtagtttgccagaattcagtgtatgtagtcagtaaccagcaatctttggtttgttcagcagagtcttcctgtctgagcagttaatggtg

SEQ ID NO: 84113 - DNA, 2051 bp, Homo sapiens
gctgttgcccaggctggagtgcaatggcgtgatctcggctcactgcaacctctgcctcccgggttcaagtgattctgctgcctcagcctcccgagtagctgggactacaggcgcccgccaccacgcccagctaatttttatatttttaatagagacgggatttcaccatgttggccaggatagtttcgatctcttgaccttgtgatccgcctgcctcggcctcccaaagtgctgggagtacaggcgtgagtcaccacgcccggctgggcaaatgtctttattgaaagttatagtaaacttttatcataatgctgagcgtccagaatttattggaagccgagtggatctttttctagttgtctttattcccttttctagcttgtttctttctctttattcttcttgtaagcttgatgtctttttccttggcacagggtaactaaggaagtggatgctacatctaaagaggccaaatccttcttcaagcagaatgagaaagaaaaaccacaggctaatgttccttcagctctgccatcactccctgccgggtcagggtgagtatttgagtctcactccctgatgtacttggcacgttggagaagctttcagtgcaaatacctactttcgctgcagatcagactccttgcctgagagagagaattatgatgctgctttgcctttgctgcaatatttaccagaatggaagatgcaaaggaaaattagccataactttctcaggaggattgcttgaacccaggagtttgtgaccagcctgggcaatacagtaagaccctgtctcttaaaaaaaaaaaaattagctgggcatggtggcttgcacctctgtcctagctactgtggaggctgaggcaggaggatcccttgagcccagaaggttgaggctgcagtgagccgtgattgtgccactgcactccagcctgggtgacagagagatcctgtctcttaaaaaaaaaaaaaaaaaaaaaaagcgaagaaaattagttgtagctttcttatttgttgccagcctaaaagaagtcctagtttatagtattgaacacaaagctgaacgtgtaaattttacatttaaaaataatacttttcaaatgaaaatatcagccttctgcagaacttttcatgaagatttgcgatgaacactcactcccatcctctgtgatcttagaggaacataaaaagatcaaagatgatttacaaatagttttcttaacacattgtcaggaacttaatggttttcctcccttcatatttttcatattacttgagttatttttagctgaaggctagaattctttctttttggaagaagtaaaaattcttttcttaacctaaatgtgagaagtaaagtattacagtaaatcagagaggcttaagactgttgccacagggaagtgaacatagacccataccatggatagccctgactacccacctgactcctgtggggagttctgcatagtctcctacagtggcttctgtggcccttcagtcagatattgtcccctcttccttccctcctggagcatacctgtcattgctatgagcagtaaagttttgtttcacattttttttttgaggtggagtctcgctctgtcacccaggctgcagtgcagtggcgcaatctcggctcactgcaagctccgcctcccgggttcatgtcattcttctgcctcagcctcctgagtagctgggactacaggtgccaacacgcccgtctaatcttttgtatttttagtagagacgaggtttcactgtgttagccaggatggtcttgatctcctgacctcgtgatctgccctccttggcttcccaaagtgctaggattacaggcgtgagccaccgggcccggccccacttttttttttttttttttttttttttttttttttttgcgacggagtctcgctctgtcgcccaggccggactgcggactgcagtggcgcaatctcggctcactgcaagctccgcttcccgggttcacgcccttctcctgcctcagcctcccgagtagctgggactacaggcgcccgccaccg

SEQ ID NO: 84114 - DNA, 1048 bp, Homo sapiens
gacagagtgagaccctgtctcaaaaaaagtcataaattttcggtcaaattaagtgttgtggacttgttagtaaatactattatagttgtgtgctgcaaatttcctatttcatttttgaaaacaagtggatggtaattttaaatgtccttgatgggtattcagggcgtctgctgttttctcaatttgtcagaagagggcagcaccatgtctataaaaaacaaaacaaagaaatgagtatggaagcccttttttcatatgaattacatactgtcacatacattttatatttcaaaatgatacatgcttattactttaaaaatcatgttacagagatatataatatatataacatgaaaagtgaaagttctgtaactcccttcccctaaagaaaacaaaaaccctgttaatagtgggcatgttgacaggatttttttaaacttaatttatttatacttaaatttaggcattataaggaattctcataaggggacttacgagatctgaattttcattgataacagatacaaatttgttgtatggatttgagcatatcttttaatttcttcatgtcattattctcctttttctctctgtatcaagttaagagcattactacatcttcaagaaatgtgagaagagctggtgatgacaggaaggaatttgtaggtctaagtgtaaggtagtgttagcacaaagttagtcttcagttttctaactgtattttaatgttaaattttgggctttgatcatttcattttgtttttgtccctacttgaaaaatgtttagcttattaacctaggggaatgggggaatatagtattttgtattctgccctatcacataaccagctgagccagttagctcagactttcctaaatgattcaccttttggaaaaagccagtcatggaaagtttctgcccaattaaagactttcaggaagttctgagcaagtgaaaataaagttaaaatggaatttctgttgagaacacttgaattaactattactaataataggccttttcctgtcagagttccctcttgtgcgt

SEQ ID NO: 84115 - DNA, 1086 bp, Homo sapiens
gaagaaatagtgcaaataaagttgaggctcttctaaatagaacttgttctacaaatggagtagctttaaaaagtcaacaatgtctggcacatataatatgttcttagaatattctttctggatagattaattctgtgattaggtgatttggatgttttctttgtgaaaacagctggtcctgatttagaaggagaacgctatactttgattttaagtgattggagaaaagttagcactaagagctcagtttttttttttttcaattctttttttttcttctataaaatttcagcttaactcttctactcacttcagtatattaaccagtagtcccagaatttaaagtgttcttgggtttataagattacctttgggattgggagagggataactgaaatcgttttgtgctgtctttcctttttcctgtgactgctggtgattaggaagagaagacaaggtggcctctcattagaagaagaggaagaggaggatgccaattcagaatctgagggaagcagtagtgaggaggaagatgacgctgcagagcaggaaaaaggcattggatcagaggatgccaggaaaaagaaggaggacgaactctgggccagcttcctcaatgatgtgggaccaaaatcaaaagtgcccccaagtacacaagttaaggtaagttgagacattagtgaggtgaatgcctctccagaaataccctacattactgagatttgaagcctacggaaatcgaccagatgccttttgataacaattgtactaagtgaaaagcaaagcatttcctgtggtaggagaataagcttctctaatcatgtaagtttccaataggcctttaactggttagagatgaaacatttaagagtagctataggctgactgcagtgccacacaccaacaatccctgcactttgggaggctgaggcaggtggatcatttgaggtcaggagttcgagaccagcctggccaacatggcgaaatcctgtctctactaaaaatacaaaaattagctgggtgtggtggcggttgcctgtaatcccagctactttggacgctgaagcaaggagaatcgctttaacc

SEQ ID NO: 84116 - DNA, 1038 bp, Homo sapiens
tccttttaaacttcttttattgagaagacaaagtgttttttaaattagatttgaaagatacccaagatgaggtagtgcatcagtttcttctttgagaaacacattagtagaattgaaatttctgttcattcactcattcatttagtgaatacttaaaagtcacaatgaacagggtttatgtcctcttggagtatacagcacagcagaaattaccaacattaaatataagtgggatgagttttggaggggaaatagagactgccatggaagcctacgatagaagaacgtagggtagtcttcaggggcagagaagacttccccaaggaaatgatgttttcgttaggtgaagagtaggggaaaattcactttttcttaatgaaaatgtctcggtgtgaaagcttgtattaatgaaaatgtctcatcttgatgtgaaaacctttattcctgtctgatcaccctgttatgtgatttcaggtggagagtatagtgaagatgatgtaaatgaattagtgaaggaagatgaagtggatggtgaagagcagacacagaaaacccaagggaaaaaaagaaaggcccagagcattccagccaggtgatgctgccttcaaggcccttagaagttaggggctattgtcacaaccatcctgattgctaagattggtctcatgatagatttaatgaagccagagtttctaacccttttctctttgagggaaacatttgctgttattttaggattaacttcttggtctctggaaagctttaaacattttgagctttaatgtaaagaaaatgttaataggtaatatgtacatatggttagaacagaaaattcagtccctgaaaagatgtttaccctgttcctagaccttgttgctttgcctctgaagaactatgctaccagagatagtctgtgcatgcaaatgcatatatgtctatattttcttcattttttttttagaaaaaaaatataaatagtagcatactcactttctcattttcatttctctttatttcacatcttggagatagtaccat

SEQ ID NO: 84117 - DNA, 1041 bp, Homo sapiens
tcaaacttcagctgggaaccttacctccgccaactccaaattttcaccctctgcgcatgcccgggaagaaccccagacagtaccgtgatgattgattttagggttacaaatacattttagcaagtaagtgaatttggcattacgaattaatgattaatgaaggtcacctgtatttccatagatatgtaattttatttaagcaggtttattatattaaggcggcgaggcagcgccgaagactacaagttccagcatgcaccgcgtccgggcgggttcgggctcccagcgagggcttcagggacgccagcccggaggcatcggccggaagtgtcgtagggcaaccacgtagtactctctgcgcatgtgcaaagcgctgtcgggggccgccctagctgccgtcgccgccgccggggctctatggtctctccctagagctttgccgttggaggcggctgctgcggtcttgtgagtttgaccagcgtcgagcggcagcaacatggaggaattcgactccgaagacttctctacgtcggaggaggacgaggactacgtgccgtcgggtgagcgattccgcctgaggcgagaagcgaattgccccgccccacgcctcacgtgaggcgcgctctgcccccgcgggcgtctgccctgtggcccaggtggtccaggggggctcctgttctcgagcgtccgctccctcaggcccctcatcctcggccgctccggcccgaggcgtgtgcgcgtggcggttctgtgctcccctcccgttgggcagctccggccgccgccccctcttgcagcgcgggaaccggcacatggacacggccccttgtcgctagggacgctcgtcggtcagccccgaacgacaccgctgcttcagaagtcggggcggcagtccgagccttggaggtttttttcagccctggcccgagagagctgctggccaccaccccgtccaagatagagctgtccgctctccgcctggttgttagaaagttctgatagaaagttccccctttgatgctttttgcctcattgtgacgt

SEQ ID NO: 84118 - DNA, 1010 bp, Homo sapiens
acggagtgagaccccgtctttaaaaataaaaatttttgactgggcgcggtggctcacgcctgtaatcccagcacttgggaggccgaggcgggcggatcatgaggtcaggagatcgagaccatcctggttaacatggtgaaaccccgtctctactaaaaatacaaaaaattagccaggcgcggtggcgggtgcctgtagtcccagctactcgggaggctgaggcaggagaatcgtgtgaacccaggaggcagagcttgcagtgagccgagatcacgccactgtactccagcctgggtgacagagcgagactccgtctcaaaaaaaaattaaaaataataaaaatttttcaaaaaaaaggaaaaaagaaacggtgttgaaaatgaaatgacgggtatgatgagtaccctctgcaatgattgtcctgggaagggcagtgattcacaacttttctttgtcttccctcatagagatgtggtatggtgtattcctgtgggcactggtgtcttctctcttctttcatgtccctgctggattactggccctcttcaccctcagacatcacaaatatggtaggttcatgtctgtaagcatcctgttgatgggcatcgtgggaccaattactgctggaatcttgacaagtatgttagacattaaaataccagtcaaaaatgtttaatatgactagtcaatttcaggacctattctagaaaacatatctgagtaggatgaaggaaagagtgccttttaactgcaagtccagacagggtctccctatgtcaccaaggccggagtgcagtggttgcaatattggctcactgcagcctccacctcttgggctcaagtaatcctcctccatcagcctcccaagaagcttggactacaggggtgtgccaccatgccccgctaattttttttgtattttttgtagagacagggtttcgtcatgttgcccgggtctcgaactcctgagctcaagcaatctgcccaccttggcctcccaaaatgctggg

SEQ ID NO: 84119 - DNA, 1946 bp, Homo sapiens
gcatttcttccttctgttgtgagccactcttactcttttcagggctctcttgtgacaaacatgccaatcactagcactttgcacccctgggcttctccatttcccattcacagctttgatttccagagctgaggcctttaactggagacctggaggggcagggcccaagggcaagggccgcattagcacaggcaatcagggagggccgctgaaggacacttggaccgtccacctgccccagcccaacagtcagtcatctgtcatcagctcagctgagcagccctggatccctgcccgactgtggctggctctttgcccggtttttccctctgtctgtgcccctggatggcaggctgaagtcagaggggctgtttcattctcagccccctcagcagcactgggggaagaaagcattgtcacaacaggttctttctggccctcacccaacagcctgggcacttggccctcctcctccttgacagccctcccccttcctgcaaaggacaggggcgacaggggttggtgttgggattggctcccgctgcctgacaaccacaagtttatttggaaggctagcgggaagcccagcggctggcgtttcccttgactaaggaaaagggtgcccatcagagtggggcgggcagctttgggaaggacacaagaagcagtgagggtgtaaagaggatgctggcctgggcaggccagtccagcctggccactagcagaataccaagcagtccagtggattatcctcgtggctaagcaagtgtctgcaggagcagagatggctggaaggggcctctgcacacggaagatggcttgttcagccgattcacctcctgaggatgcgtgcagtctcctccaagaacacatggagctgcttcctgatcccaagcaggtcgttgcccctggaaggacatggctccggtgatccatgcttcatgcccacccagaaacacacccctcagtgtgtgcctcagtttaccttggagatcatttttcatctccagcatccgtttcctttaggctgactaaaaacagttttggaaacaaagctattttgaagtattcaagcagaggaattctctaacactgtcccccttgtctttttttaatattctggctattttagatgcctaaatttttttcttgagatttatttatttttatagatggggttttcactatgttgcccaggctggtcttgaactcccaacctcaggaaatcctcctgtctcagccccacaaagtgccaggaatataggcatgggccagtgtgccccgtctcttgagactgaaatgaaaaattgcttgtggtttaaatccccagaatttaatgaaacatgggaagatggctaaagatacgtataaactttggtttgcattttattaaattatttgaatgcaaaacttgtataaagaatccattatgttctgtagctttctaattaaaatgttcaacatggaaggttgtattagctatttttgaagcaaggctttggagggaggaagaatagggagggctgaagttgagcacacttctccgagttactcaccagtagccttgctttgccacggctctgcccaaagaccttggagcttttgttagctctttggcaaaagtttcctggtccaaccccaagtatattagtttttagtggaatccacatggcatatgggagctgcgggttggaaaattacaactgtgtctggtgaatatcaaattatttacggatcatttattggtagtttctgaaactgaaccacacagcatagttgcaggaggaagaaaggtaagaaatacacaggattttatcaactgagctgaagccatagataagtcatatttgagataattattgaatttgttttgtgggagagaaatctctaattcttccaaatgattagtccagtttctgccaaagcaggtgaggtgtctaatgccc

SEQ ID NO: 84120 - DNA, 1036 bp, Homo sapiens
tttctctaaaacaagacctaagagaaggaacattattgtctagaaagaaagaaataattgaaagtttctgaaaattgagatttcttcatttcaaatgaccttattattagcctgaaaaagcacacacacaaaaaatctcttccttacgtaatagtaatggtgggaatcaaaatgaatccatagatggtggatccagatgggaatgctgctacacgatagtagaattgttctgggaatccacagtgggaaaggatcagttgtagcaaaaagatccagagttgtgcagagggaccatgtcagcagtgatcacttttcagtaaccgtgctttcctgatcatcattttagcatcactgtttggcaagactgtggatggtaggagtggataccagttttttttcactgcctacatatgcttcataagctgtattttgtcttttttcctctacagacctctgtcttctttcctttcatgcccgtaatttatcaaatagatatggttttaatactttgctgatttgacatagcttcctttttcatttcattgattgctactaaaagatgcacaaggctttcaggtcctcacacgaatgatgagataagatccaacatcaagaatctgaagcaaagacactcgtggtttcagaatctataaacagagtttggtaaggccgggtgcggtggctcacgcctataatcctagcactttgggagcctgaggtgggcggatcacccgaggtcaggagttcaagatcagcctggccaacatggtgagacccagtctctactaaaaataaaaaaattagctgggcatggtggtgggcacttgtaatcccagctcctcaggaggctgaggcaggacaattccttgaccctgggaggcggaggttgtagtgagccgtgattgcgtcactgcactccagcctgggcgatagagttagaccccggctcaaaaaaaaacaaaaaaaaatagagcttggtgattttctgttgagtttgagtttgttggaggaatgcataatgattaggattaggtgt

SEQ ID NO: 84121 - DNA, 1039 bp, Homo sapiens
cacaactggtgccaaagagtatttttagcttaaaaagaaaggagcacccggtgatgacaagtatatggtgaaatagacactggtataaactaggaaattaacctttaataaaagaatatgggccgggcgcagtggctcacgcctgtaatcccagcactttgggaggccgaggcggatggatcacctgaggtagggagttctagaccagcctggccaacatggtgaaaccccgtctctactaaaaacacaaaaattagccgggtgtgatggcaggttcctgtaatcccagctgtttgggaggctgaggcacgagaattgcttgaacccgggaggcggagattgcagtgagctgagattgcaccacccatactccaacctgggcaacagagccagactgcatctcaaaaaaaaaaaaaaaagaatacgacttaaatgaatgaaatgtacgcaaacaaaacagaaaccaaacaaaattccaacaaaccgtcagatgctgggaattcctgacggggaaaaaagtcacacatcaggatactctggaaacaatggcacttgaatttctggcaattcctgcagtcaggtggtgtgctggttatgaggtattgtctcagctccaaacccaccctcctacgctcagcttccaggttcctgctgagatgctggaaaccaccttcttcccctgcagcttcctgttaggttctgccagtaggaggcatgatgagccttgttctgggagtgcagaaaaaaagaaatgaaaccagtcaccactgccagggtgaagaaccactgtggatgccacaaacagggacaaccagcaaacaggaaggagcaggacgcctctcctaccggcttcaaggttccctctagtgcatgcttcctccaagctcagaggtcctggccccatctgggccgcggtcccttcttgaagtctgaggctcagctcttcgaggcctcttccctgaacctctaagttctatcagtcccacccgcttccccttcttctctagtcctaggtgtgggaaatgttccctgcagctac

SEQ ID NO: 84122 - DNA, 1043 bp, Homo sapiens
cttgttcagagaggagcaacaggccaaatgaagaacttggttcttggctggctaaaattccaggcattccaattagtccatccattcttgtctcctgtgttccttgggaacacagtagtgtttcctgtagtgtgaaggtggatccattctggggtcctggagtaacgggccatggatgaaaccctccccagatattcttaggtctgcccagataaaatgtggaaaagcttagtggtaagggctgcatttctcttacataattgaccacagaaaagcacttactgtttccctgtaacacatttatatcaattcttaacctccagagcgtgtggtttattaagccaaagacatattttctcctgctatgcagttccccacccacctccttgcccacactctgttcatcagctcctcagccatgtgaggccagagcctcgctttaggaaacacagtcctgacctctctttactttcccaggtgattgtggaaaaggtctcaggctctcagattgttgacattgacaaacggaagtacttggttccatctgatatcactgtggctcagttcatgtggatcatcaggaaaaggatccagcttccttctgaaaaggcgatcttcctgtttgtggataagacagtcccacagtccaggtgagaggtgtttactagatgggccctctggtattagacatctggttggctgcttacggaactccaaaactttggaagtctgaaaactcttaggggtcctgactagaaatctggattttatgctccctgacatcaggggctccaggaaaataatggctgcaatacataagagtgcattttggattcagaaaatagaacaaggcctggacttttaaaaaaatgatgaaactcagcctaagatctccaagaatcttttaaaacggttgagaacttatttagtcttaagctataggtagaactgaggcctgaaatgaggttttcttccctgaaggcagtcctggcatgctcctccactgggagcctgtgggccctgctgaggctcactcagttaat

SEQ ID NO: 84123 - DNA, 1021 bp, Homo sapiens
aactgtttattttggggttttattctcagaagtaattttttttttgagacagagtctcactctgttgcccagattgcagtgcagtggtgcaatctgagctcactacaatctctgcctcctaggttcaagtgatcctctcacctcagcctccctaataactgggacaggaccacaggtgcatgtcaccacaccgggctaaaaatataaatttgtttctaaacataagaggcgtgtgacatcattgggctttatgcaatatataaatcacccataaacataaaaagtgctacagggtccttcctaaagctggctgtgattcagcttcaccatctcttccccaagacaatttagcagcctcttcctcaggtcttttcagcttccttaggggagcatggagcctcccttaaccttcatgcagtgcttgctggcttcaaagagtggctggggaaattagagaagggacgaattcaggcctgcaggagccctccctctccggtgactgactggtctgcatgaagatcaattatgtctgaggctgaaggggagtgagttctcagttatttctgccttggagtggaaaacaggcggtcaccatgtaaagtgtcatgatttttatttagagtagttagtattaaatattgattctataaatagagacagaggcaagtccctaagttttacttcctaaattctaagttcttgtttcatttaaaaaagagggaatcacaatggccttttcccatttagcattggaaagttgaattctctgcctaggtgccagcatcaagaatcaggccaaaaacggaatggggaaccatgcctttgttcagacagaacttcagaaaaaacatcagtgtacaagtttcctagtcatgacgttagaggggaactcagacctggcagtgaatggtctttggtctttgtttgtttagaacatagataagagtcttgttaatcccctgtttaaaatagaaacaggagtatatcattaaatataatatctctaagatattatttttta

SEQ ID NO: 84124 - DNA, 2084 bp, Homo sapiens
ctaactatgggacagctttacgagaaggaaaaagatgaagatggattcttatatgtggcctacagcggagagaacacttttggcttctgagggccattgctgggctaggtgcaccgtaactgcttgtgtatcttgtaaatagccagccattttcagttattataccagaacctcttcacatagacctattagtgcatttgtaactggatttatttcttaatatattggaaggttttgtttccttagactagtaaattatcatacagagttttattttgagtttttctttttgtgcattgtcctcatgcctgtattctccaggaaacttgtccttctggaaatcatattgaatgatatttctatatcgaagtgaggtaggtgcggtattaaagtgaaagggaaggtgatgcatttattctgggttatgcttgaagtgttagatggctaagtattaaaattatccaaattaaatccttagcagtcagaacacttgcttcactagaatatgccaactgccaatcatgttggactgagctaatttgttcctctttctgaaactattaaggtaaataattaacaataaaaattctcttataaaggcattgtactgtggccatgtcctttattcacccgcatttggatgggccagagaagtggctcctacatctgccagaccaggaagagggcttgtggaggtcatggccgcacatcctgggtcgggaagccatggccagggtcatgaggagagacattgttttgaataactaatatgttcacatgtttgaggtatcgggacaatacaaaaaggtatacactgagaaggcttgctcctgccagcttcctaaccacctctgccctttatgggaaattacttttactggcttcttgtttcttttcaatattttaaaagtaaataggataatttaaaggacagtataatggcacagtaaaaaggataattaaatatgaatacatatccttattttctttcttcttttttttttttttgagaccggagttttgctcttgtcacccaggctggagtgtgatggtgcaatctcagttcactgcagcctccgcctcccgggttcaaggagttctcccgccttgcctcctgaatagctgggattagaggcatgtaccaccacgcccagctaattttgtattttcagtagagatgaggtcttatcatgttggccaggcttgtctcaaactcctgacctcaggtgacccacccacctcagcctcccaaagtgctgggattacaggcgcccaccactacacccggcttcttctttttcttatacaaagaaaacatacacttctatatacactgctttttttcatttaacattatattttagtgatctttccatatcacttctgtgcatctttttcatgttcctgcattctttaaggtactgctttctactcccttcttcctaaaaatcaagattagatttatctatgcgcatgagtttcatttctcacacattagtagagatgtgtaggcttgctaggacacaaatacatttgagaggaaatgcttagatactttcttaaatcttctgcagacatactgtgttggtggctagagcactacacagacaagaataaagaaaccaggtatgtcccaccagtctaagaacatgtaattaaaatgactcacactttccattgcggaagaaacaaagacctttaactttatcttcaccaaattatataagcagctcatccaagctctctactgatgtcatcttctcagttgggatcagaggaaacattcttaatttgtcacaaacatcttgttgggtctttaccaaacttgaggtaataaaatctgtttctctttgctgatagtttcacactaaaagcagttagaaactgacctcagagcgatcaaggtaaagggaaagcaagctctgtgttactaaggaattttatttgcaatgacatgctcccaattcaaacaggccttagcattaaaaaggcagtttattatctcacctctcagagggatggttcactggcttgaggtgtagctagaaccagggatcaaataataacatcaaaactccatctct

SEQ ID NO: 84125 - DNA, 1044 bp, Homo sapiens
ctagcactgtttcctgtacagcctgcagaactgtgagccaattaaacgtcttttcttttcttttttttttttttttttttgagacagagtctcactctgtcacccaggctgaagtgcagtggcaagatctctgctcactgcaacctccacctcccaggttcaagtgattctcctgcctcagcctcctgagtagctgggattacaggtgcccaccaccacgcctggctaatttttttttgtatttttagtagagacggggtttcaccatgttggtcaggctggtctcgaacttctgacctcaagtaatccaccggccttgggctctcaaagtgctgggattacaggcgtgagccaccttgcctagccaaatgtcttttcttataaattacccagtctcagctatttatttatagcaatgcaagaatggcctaacacacctaaaaccaatcctggtggctgacactgaggaagcaaagccacagtttggtcggaggatccacatacacctctgtgatcgacagctttgctccttcacctggagctgttgcttccagatgtgggatggagcggtgcaaacacatgtgcagacacctggtgtgcagcatgacactctacaaacatctgcccaataggcttctcctgaggacagtcatgtttattagcaaaagctctggaaaatgggactagcaaattggaaggagtcacttagaagctggcagacagacgacctcagctggagtttcctaagtgctagtcactgcatgtgtggtagacagccctcctatacctatcacaaccccattgccaagtgggcagagctgccctcatttcaaaggagaggacactgacactttgagaatgaagttacctacccaacatcacacaactaggacatcctggtgccaaaattcacacttcggtctaatgccaaaacccatctttattttgctagtccagacagtgagaattaaagggctgtgtttaaatgtggcccacagacatgtatataaatacctaattttcttgcttctcctgaaaaaattc

SEQ ID NO: 84126 - DNA, 1053 bp, Homo sapiens
tggtagtgtctgtggctgggggaaagctgcctccacctggaccttggcaagactttttggatttaagacagtgttctgagcaagccttagccaaaattttccagctcctaaaacccacttcccttgctggctagttaaatggcttaggacagtgttatcttttcaactgccactgcctcctgagatggtgtctgggaaagccagaggagctgttaaaatgagtcccaccgcagcagaaaagctattgaaaccaggagacagcttccaactggaaaaatacttagtatctaagtgcttactttcaagagctcaagcagctcttcccataggcggctatcccgaaggaatggttgaatacagaaacagccaaggaggcagatattttagacaaagtacatttattttccagaaagagtagtttttttaataccccatattgaagaattgttgaccttcacatcctataaatgtgaatccttttaaacttaaacgtgtctgtactggggctgagactgacttgctgtaacaccatccagatgaatccaaaacaaatctttatacctatggtccaaaagtggtaggaaaattctgtaaagatttaagggcttcaggcaaagttgtttgaattcaatttttatttcttaaaactggggacccaaaatgaatcaaaagggatagatgtcagatgagtggttattgcctgatgtggtgggggatggggagcaggcggttgagttagaaagaggcacaggagcaccctctgggagatggaaacatcctgtgttttgattggagcgttgattatattggtgtaaacatttgtcgaaattaagtctacacgttaatgttcgtgtactttacgtaattatacctcaaatttaaaatgcaaaaaaacaaaaacatagcccttattactttgtgtagtagaataaaactgggcctagatactcaagcaattgtgtcctagtaccagttctgccactaacttctatgtgtatgtggggaaagtatgtaacctctacttataacttctcatctgtcctaccaaattag

SEQ ID NO: 84127 - DNA, 1019 bp, Homo sapiens
gagtggccccagagggtcggcatcctcccagcctaggaaggtagttcaccactctagtggccggtagtgtgggctttagagacacccatagtgggtcacgtttatgctcttgtgacccccggcatgttatttaccctcccttggcctcaatttctttgtcttcagattagaagaatatcatttatcagggttattgggaagattcagtgagaaattctgtttaatgcatttactctgtgcccagcaaataataaatgctcagtgattgttagctatcataataataatgaattatgaaccacttagactactgtaccctggaggccaagcatccaatagcagtcattgtctgtgacatcatatccagctctcatgggtctgtagagtcagagaaatatttttattaaaatacttctgactttcacaagaaattgagcagttttaaccctagaatcttatcttttcatagccatcagctggagtgcagttcctgagcagcctttggatgttactgccaatggctttccacagggaacaacaaagaaaacaattggaagccttcaggcaaggtacagcatattggggcaggaggagatggtggctgtgaactcacactctaccactatctaattctagaacatttttattaccccaaaaagaacaaccatacccattagcagtcactacctatccctccctctcctcatcccttggaaacctctaatttacttaatttacttcctgtctccgtggatttgtctagtctggacattttctatcattggaatcctacagtatatgaccttttgtatctggcttctttcacttagcatagtgttttggaggtacatcctgaggtagctgtatcagtacttcattactattcatgacttgaataatatcccattgtgtggatataccacattttgtttgccattcgttcatgaatggacgtttgggttgtttcactctttggctattgtgaatagtgctgctgtgtagaactatgaacatttcat

SEQ ID NO: 84128 - DNA, 1054 bp, Homo sapiens
cattttgcatgcccttctccagaaattccaactcactgggtccaggatagagtcttcaacaagagccctagaggattcttattagggaattgtgtgcatgtgctcttaactcatctcaggtcagctgggagaatagatgaagtcagtagttctcaaacttgagcttgcatcagaatcacctggagagcttgttaaaaacacactgctgggctctgcctccggagtttctgattcagcaggtctactgtgggtcccaagagtttgcatttctgatgaattcccaagagatcccattgtggctggtccagggacctcacttgagaaccatttgtttaagtgggttcattctctgcaggtggggatgcctccatcattccgatgcttgagtttgaagatcagccttgctgtcctgtcttcagaaattgggcccacaactcatcagtagaagccagtagtaacctggaagctcctggaaatgaaagaaaatgtgaagaccctgacagtcctgtaaccaaaaagatgaggcttgagcctgggactgcagccagggaggtcaccaacggagcagctcaccatcagagttttggcaagcagaaaagtggcccaatctcaccaggcatccacagctgtgatctcactgtagagggactggctactgtcaccagaatagcccctggtagtgccaaagtgatagacgtttatagaactggagccaagtgtgtacctggagaagctggagactccggaaagccgggtgctgcgtttcaccaggtggggctgctccgagtgaagccaggccgtggagacagaacacgctccatgtcctgtagtgacaagatggcccgatggaacgtcctcggatgccaaggggcactgttgatgcacttgctggaagagcccatctacctgtcagctgtggtcattgggaagtgcccatacagccaggaagccatgcagagagcactgattggaaggtgagagggtagggagggctcaattggaacagtcattccaagaggcagtctgagggtaaggcctaagagcattaagaatc

SEQ ID NO: 84129 - DNA, 1059 bp, Homo sapiens
ttttttttttttctcgatctcggctcattgcaatctccacctcccgggtccaggcgattctcctgccttggcctcccaagtaggtgggaatataggcatgcgccaccacgcccggctaatttttttgtatttttagtagaaacagggtttcaccacattggccaggctggtctcgaactcctgacctcaagtgattcgcccacctcggcctcccaaagtgctgagattacaggcatgaaccactgcgcctggccggtaattgagatttttaaagatcttccttgatggaataaaaagttggcaaccctctgttcatcttaaaaatcttcaggaaattttgctggtaatcttttaaaatgtgatgtcctcccatggtttgtctgcagagagagagaacattacctagagaatgtgcctctctggctcccttggtatttacatcctatgagtaattaataatttgttggctgggttagctacttcaggctcttatgagttttattagcatgagtcaggctcttgcattcaggcattctgtcaagatccaatttccaagcctgcagagtgggagatggaccctggtgagttctccaaagtcactgtgaccttgtgaggtctctggaagtcagccagccaacctctccagatgtattcccacttctgtatctcttgcctttcccactcttgagttataaagattacagatgtattatttatacactttagaaaagcaacactcatcaggttagtgtttgaagaaatctttcgcttctcaagggagagctgtggttcttactgacctctagttttcttctgtttcctgtaaggacagaggaggtcagaaatctctaaaccagcaagaggaaacactggaaattttggaaacattggtttagactaggtgtgtaatttactttagagtctttactgtggggccatgcatcataaaatctccaagatggggaaattctgagcaatggttgccaaatttcttttcctttttttttgagatggaatctccctctgtcacccaggctggagtgcagtggcgcattcttg

SEQ ID NO: 84130 - DNA, 1101 bp, Homo sapiens
ctacatttcctaaaagactatgaaggtaagcaatatgctagtcttattcatttctgtatactcagtatgtcatatcgtgcctgacaaatagtagaaagtatttgttcaatgactaaatgaacgaaatgagttttaggataagtcactataggatttccaagccccatgttggcttcacatcttgtgaggtttcagccttacgctcctaatcctgattctgagaattgactaatagtatgagtgagactctgcaccccttgcctctgtcttctctttagatgaaacctttagaagtgattaggtacactagcctgtcataaaaaggcactgtcactacttgtggctacttgtgactacctgtggctacttcagccattagtgctttttaggaaaaaacctacctatggataacacaaacataaggaagtagttcatgtaacattaatccaaaggcttgaatatacttacagggtgtatggctggagaaaaacacaaaaatgaggtctcgtctaagtttccacactcctttttgagttcctgggacaaagatgctatcctctttcagggtggctgccaactggagttggtggagaaggtacctaagggttgcaagatgttattaggatgaacaaccgatctctgtggtaaggggaaagcctctggttgggtgattactaagacagcttactgtagactaatgggactggtagtgatggggaattatgagaatgctctagaccagtgattctcaaagtgtggtccctgtaccagcagcatcagcatcacctgggaatttgttagacctccaatttcaactggcctcggtggctcatatctgtaaccccagctacttgggagactgaggcaggaagactgcttaagcccaggagtttgaggctgtagtgagctatgattctgccactgtacttcagcttgggtgacagagtgagactctatttttgtttctttttttttttttagaaaaataaaaaagaaagaagaaacccaatttctgaggttccaccctagatatgctgaatcagaatctctgtggtgggctcagcaatctgggttttaacaagccttctaggttcttctgat

SEQ ID NO: 84131 - DNA, 1348 bp, Homo sapiens
ataaattaatgtttctcacctgggggtgatttgcatcccagaggacatttcgcaatgtctagagacatttttagttgtcacaactgagggaggggtgctagtgtcatctcatgggtagaggccaggaatactactaataaacagtctacagtgtatggatggaatagatcccccacaacaaaaaattttctggcccaaaatgtctacagtgctgggttgagaaaccctgcacctgatgcattgttattcatgattgtggtaccttctggcaaagctctccaggagctacatgaccatcctgggtgctggtgggactgctgtgttctgcttctaggaaccagaccctctccagcttccatatgtcttcacctggtgtcctatctttgccgcaggagacatcctcaatgatagccatgctgaggtcatagccagaaggagtttccaaaggtaaagccacatctccagagtatggttcagcaggactggggtgggagtcccggaatttacttttttttttttttttgggggggacagagtcttgctctgttgcccaggctggagtgcagtggcatgatctcagctcactgcaacctccgcctgctgggttcaagcaattctcctgcctcagcctcccaagtagctgagactacaggcccgtgccaccatgctcaactaattttttgtgtttttagtagagatggggtttcaccatgctggccaggctggttttaaactcctgacctcattatccacacgcctcagtctctcaaagtgctgggattacaggtgtgagccaccgcgcctcacccagaatttacatttctaataagctcctaggtaatacagatgatattagtctgtaaactacacttttgagtagtaatgtggtctagactagtggttctctcttttttttttttttttttttttttttggacacagggtcttgctctgttacctaggctagagtgcagtgatgtgatctcagctcattgcagccttggcctcctgggactcaagcaagcctcccacctcagcctcctgaatagctggggttacaggcgcatgccaccacacccagctaacttttcctgggtttttttttttttttaaagacagggtgtcactatgctacccaggctggtgttggattcctggggctcaagcgatcctcctgcctcagcctcctaaagtgccggatttacaggcatgagtcacaatcctggcctggactagtggtactcaaacttgattgtacatcagaagaacctagaaggcttgttaaaacccagattgctgagcccaccacagagattctgattcagcatatctagggtggaacctcaga

SEQ ID NO: 84132 - DNA, 1055 bp, Homo sapiens
ggtgagccaccgcgcccggccttcagtttggttttacagtgcttagctatgtctatcacaagctcatcttctactgggaagctttttgtataattgagtccaaatgagatcaggatgtgcctagtgagcattgatagggccaagagtgagagatttccctgcaaagtatcctagggatctgcttgatggttttttaattcatggctttctatgcccattacagccctccccctttcacccccaccaccaggtagctcaaggcaaattaaccaggaaaatcatcaaatgttattttttgtaatagtaatcacagttgaccttaattatgctcaacatagtagcaattgctttttataagtattacttatttaaccctcacagtaaccctaagtattatttaatcttcacaataatctaaataggttagatactattgttatcactattttgacagatgaggaaacagacccagcaaggttaagtagtctattcagcatcacagttaatttgtggcaaagccaaaattagaacccagaaagggtgaatccaaagtccacacccttaagtagagctctatgagaacacgtaactgctgagaaacatttcagtggggatttactagagggcggtagagaaacactctgctgtaggggaaaggagaaaaataaaatgcctggaaaaagaagacagataagaacatctgtccagaaagataaaccttatacagtgagggtctgcccaaagcaagtgagtctgcaaccctttacatgccgtttccagtgaaaactggagtagtgaggacatttccttctcgtgtcctttaatgttgagtagaggatgcagactccttagaaatgtatcagatatataacattaagaaaaacttgaaacaataattttggggattggtagaatttggggtttctttgatctttcattaaagatgaaaagggggcagggagatagtagaagaaaatgatccatagagttccagatagggaaacctcggtctgctccatttgaaagactcgaagcatggatatgagaggctgtag

SEQ ID NO: 84133 - DNA, 2575 bp, Homo sapiens
gtccattttaacagtctgcccgctggcctgttaggaagatcattaaaccttcctggtctctctcaccctcctcaccgttgtaccaaatgatttgttgctgagactgcatgcaggcttctgactgcaatcagtaacacttttgagtccactagaattcaattattgtattagatgtttgatcgttagaccaacctggccaatatggcgaaaccctgtctctactaaaaatacaaaaattagccaggcatagtggcatgggcctgtgatcccggctactcaaggctgaggcaggagaagtgcttgaacccaggagacagaggttgcagtgagccgagatcacaccactgcactccagcctgcgtgacagagcgagactccgtctcaaaaaaaaagaaaaaacaaaatttagctcattaggggcctctatattcagcctcctctttggtctcctgtccctaggcaccgctctaaagagggtctgactgagcgctttgagctgtttgtcatgaagaaagagatatgcaatgcgtatactgagctgaatgatcccatgcggcagcggcagctttttgaagaacaggccaaggtgagaaaggggactgtgagcagaagctgtgccaactcaccaggaaataccagccttaaccctgatctgtgtcagcgtatacgttcttggtgacttcagaagtgaaagataaagccataggcttgctggaggagtcacatttcaagatggtgacttcatctggtattgagtctgtcgtacataagaggaacttcattattaatctccgtatggaaagcgtgacgcttgccttgaaaatacacttgccaagcaagaacattattttcttagattgtacatgtattaaggtggcttagggctgggaggtaggtagagatgaatggagaagacagaacccccacaggctgcctgcagcaggtgttgacagggctgttttcaggaaatgggagaaagactcttgtaattgtcacagtctctgagaattaacctgtttggagtcccagagccccaagcagcagaagggttttctttcagagaaatttgtatgtgttctgaggtcgatttcatcagtcctgacctccaggtctttgaaagaaacggctgcatcttggagttactaggaaatgaattcccagcaagtcctgagtgtcaggagcatctctggaatgatggtactcccacctcggagcctggtaacatgttcactcacacactgagatatcttagaagaaggtcaccttttggttctctttcctcttctaggccaaggctgcaggtgatgatgaggccatgttcatagatgaaaacttctgtactgccctggaatatgggctgccccccacagctggctggggcatgggcattgatcgagtcgccatgtttctcacggactccaacaacatcaaggtacgtagcaaccctccacagagcacacttcctgaggaagctgcattgtgttggagccagggcatggtgggcctggaggataaaattaaggaagggctttgggctgggaagaggagcaggcagaggagttccatgccactcacaggagggccagagcctctgaccttaaaggatttgggttttttcctaccaggggcagaaggaatactaattgtttgcatttcttgaggatccagggaagtctccgtgcattatttcagctaattaagtcagccttatgaggtgtagaaactgttgtttcccatttttatagatgaggaaatcaaattttcatagaaatgcgtctattcatccttttgacatagtgccctaggcagtgctatgcatttgttctttgtcatctgtaacttgagagggtctgagttgaaataaaagaacacatgagccttttcagctggaatatactaatctctggattttggtggtaacaacagaggcaagaggaatgggtagatagctgtgaaaaaatgttgagagtgcttctcagcttcaaggtacattcttatctcccacaggaagtacttctgtttcctgccatgaaacccgaagacaagaaggagaatgtagcaaccactgatacactggaaagcacaacagttggcacttctgtctagaaaataataattgcaagttgtataactcaggcgtctttgcatttctgcgaaagatcaaggtctgcaagggaattcttgtgtgctgctttccatttgacaccgcagttctgttcagccatcagaagagagacaaggaattaaaaatttctttttaatcctgttaccaaataagccatttgtctcttctctttacttttagaatatcaacttttttccccagacttctggcctaatgaatgtttaggattttaccatcttattcatttaacaaatttgtattaatgtctgccctgtgccaggcattattctaagagattggggacacagcagggaacaaaagccaagttcctgcttttgtggaaattgtattctttctttggggtagggagaagaagtagacaaacaaaaaaacaagtaaatacatgttctttctggtggtggtatatactaagaagaaaaatggagcagg

SEQ ID NO: 84134 - DNA, 1299 bp, Homo sapiens
tgggggaaagctcatcttctatgatcttcgaggagagggggtgaagttgcaagtcatggccaattccaggtatctcgaaatacccagttatagacctttcttggttggcctagagcaacacagcaataggctgatgtggtcttactggtatttgaagttagagtaagaaggagtgggacatggttggggaaggctgagaagaggataatgtggccacctggtcacctgtaaagtaatgactactctcaagttatatgacagtaaagtaaaggatagtccttttttaatagtggcccctgaatctgacgtccttcttgggctcacattaactaggtattaacagttgagtgagggttccagaggagaccagtggtcagtgttcatttgaattgttgttactgaattacatttctttttcactcagaaattataaatcagaagaagaatttattcatattaataacaaactgcgtcggggagacataattggagttcaggggaatcctggtaaaaccaagaagggtgagctgagcatcattccgtatgagatcacactgctgtctccctgtttgcatatgttacctcatcttcactttggcctcaaagacaaggtaagcgttcttggcctcctagctgtggcctcctagctttctgtttgttttatcatacctttggatcagacataccagtgatttctaactgctgcttttggtttaggaaacaaggtatcgccagagatacttggacttgatcctgaatgactttgtgaggcagaaatttatcatccgctctaagatcatcacatatataagaagtttcttagatgagctgggattcctagaggtaaggagagttccttgcctgacgtgatgagctgccttgcaatgcttgcctcctcctctcccttgccttccttttccaaagcgtatcctgtgtcaggatccttcatgcctaatgagaatgtccccttttcttgccatcgtctctgttctaccttgtcctgattaggaaggcaggacctgacttccaagataatggacaaggtatagggccatccacatgctaatgatgtcacattcaatatgtattcacgtcattttgcttttttgtagcattaagaaatattttttgattatatgagaaaggcaaacacacgtaccataaaacaaattcaaacaataaattaaatagaagcaaaactgaaagtgctctttcactccttctgactaacttccctacccaaacttgagtttgatatgtatccttccacaccatttactgggcatatatacgtatgta

SEQ ID NO: 84135 - DNA, 1093 bp, Homo sapiens
aaaaaaaaaaaaaaaaaaaaagacctggcactgttggaacttcaccttctagggggatactaaacaactaagattcagtcactgtcctcaaggagctccctaacctaattagctcaagaaaagcctattctaattttctagaaaaccttttctcctattcaaaactaatgcataggattttctttgtcttggtacatcttggttttagttgggacctaatgccaaggacctgagactggcaagcagagactgagagtgatttttcacatctttgttctaagcttatttttccctttgtgtctttcacataaagagtttagtgacaagctacttgagctgagctgtgggtgtggaattgaggggtatagaactgagcaagagcgtttctcctgggcgattcatgtttttgataagttgctaggggcagaacatagaggactcttcaggcagctaacacattgaacgctttcatctttccaacagtgagctgaagagacgcctgaaagctgagaagaaagtagcagagaaggaggccaaacagaaagagctcagtgagaaacagctaagccaagccactgctgctgccaccaaccacaccactgataatggtgtgggtcctgaggaagagagcgtggacccaaatgtgagttccctgggccaccagcatggttgggcacaggaaagcttctgatgaggcttctggcagattctttgggactggacagtaggagggaccagtacgcctgaggtcactgccagggataagggagggtctcccactgcatctggttaaaggcacagaccctgagtgttttttatgtcaacccccaaaaggcatttgagagagtccagcattcaagtgaattaaccttccttggaattagcttgaccttgaggccccagggaaagtgtctctctaaagattgcctgaggtttactttagaccaggggctggccaactacagtccaccagccaaacccactctccatgcccccactttatccttccctccctggttttttgtttttgtttttgtttttttgaggcaaagtctcattctgtcacccaggctggagtgcagtggtgtgatct

SEQ ID NO: 84136 - DNA, 1514 bp, Homo sapiens
aagcaccattttgtgccaggtattgactccaagtttaaaagcagatgtgctccctgcccgagtgaaatagcctcctcaaatttatttgaacacggtaaagaaggtgatctctgtaattctgttgccttccagtgttgataatgtataaacataacgcagtctaaggaccttcctgaaattctcctttccccttgttcctagagttccaaacaagtcttctctttgacacgtatttttgtgtggcttgcatttatctttgtctagagtttgcaattgatagtgacagtttcctcttattttatatgcttcctattgccatcttgtggccaggtatttcctctccaggtgagaaaccacacttcagggcttcagaaagtgcctcacatcctgttcccatattctaggatgttgtgagcaattttacctgtaagctatccattaacttgctgttggctttaccccagatatgcatgttttttccatagtcaggactaagaacattgtcagttacagttgtagcacagagagtgttacagggttgctatcagttaagacagtcttaagttaaatgggactaaaaggtagtagaagcatggtccccctccccaacccataagagagttggttgggtatatgtatactgtctgtcccatctgacaccacatctctgtgtttcccgctaggtggtggtaatcattagttccagggtgctctgccatgttgacgcaagctgctgtaaggcttgttagggggtccctgcgcaaaacctcctgggcagagtggggtcacagggaactgcgactgggtcaacttgctcctttcacagcgcctcacaaggacaagtcattttctgatcaaagaaggttggtgcccattaccttctttattgctctggaagcaaaaattatttccttacttggttcattttccgttaagcctctggctaagtctttggacttgttgctaaggaaacaaggagccctaataccaaaaccaatagtcctttctcattttctctttaataaattcaaatcgtctctccttagagtcttgagatgacatgtggatcttattctagaagagtgctaagaacaaaacctttgtttgaacaaataatttctaatgccagctatttcccttttctgtctttctggagttttgtgtgctcttgagattaatttggtttctagtcttagtgctatccctaggacctttttggattatccttaagattgatttgatttaagaggagcacctggttgagtggaaaacagatttatcttaattctagaagaactagacagcctaatcttagcagtccactgactgaattatagcatgataacaccagcacagtgttttggaaaggttgtctttacaaatgttataagacattatatgtagaaaaagctgtcaactttgaaaccattcagaatctgtttttcttttttacaagatgaaagattcggccaggcgtggtggctcacgcctgtaatcccagcactttgggaggc

SEQ ID NO: 84137 - DNA, 1053 bp, Homo sapiens
gaaatcacccgaggcctcggccagcgcctccccgggctgggccagcagcacggccccgggctcctgcactcggcacacggtgccgccgccgtgcaggatgagcgtcgacagccgacgcttggccgggctgggccgcacgtagaaggacatggagctgccgtcgtccctcacgaacagagtcgaggaatgggtgggcccgttggggtctttgcccaaatccatcgcctccgccatgtctgacgccgagcactactagaagagctaccccctcgcgagcgcctggcacacagagctcaactgactgagctgtcaccgcagacgcctctgccgcgaagcgcagcactgggcctgcgcagcagcagccgcggcgcatcgagagtgcccgccccctctcccccggaagaggtggggcttcgcaccttgacctggaaattaacgtactatcctccttacttttgggtcgggccctccgggaagatggcggccgtgcaggcggccgaggtgaaagtggatggcagcgagccgaaactgagcaagaagtgagtgtcgctgcgagtctttaaagcctttgcggtaggagagtctgggctgggaagcgccgcgaggttcccaccaaggctgctgtgccggggccttcttgccggctctcgtgggtacgcacatgctgagacgtggtggctgcgccctgcagaccacgtaccccgggataccccgggcacgccggctccccgttcccagctggcaccggcgggatgctccctatcatactcctagagttaagagactgtggaggaggaactaggacgagaactaagagttatcagaaaagaaaagcgaaacttcctgcttagcttcatcctcctttctgagaaatgcattcttttgttgagccactcagtaaacgtggaagttggagaaatgttaaataccctagcttttcagaaagaccttcaaaattttctgggcctcactaaggtcattctgaacgttatgtattaaaagggatcagttctaaaactgtcatgcatctacccgtatgggttattcagtaga

SEQ ID NO: 84138 - DNA, 1022 bp, Homo sapiens
catggcggaggcgatggatttgggcaaagaccccaacgggcccacccattcctcgactctgttcgtgagggacgacggcagctccatgtccttctacgtgcggcccagcccggccaagcgtcggctgtcgacgctcatcctgcacggcggcggcaccgtgtgccgagtgcaggagcccggggccgtgctgctggcccagcccggggaggcgctggccgaggcctcgggtgatttcatctccacgcagtacatcctggactgcgtggagcgcaacgagaggctggagctggaggcctatcggctgggccccgcctcggcggcggacaccggctcggaagcaaagcccggggccctggccgagggcgccgcggagccggagccgcagcggcacgccgggcggatcgccttcacggatgcggacgacgtagccatccttacctacgtgaaggaaaatgcccgctcgcccagctccgtcaccggtaacgccttgtggaaagcgatggagaagagctcgctcacgcagcactcgtggcagtccctgaaggaccgctacctcaagcacctgcggggccaggagcataagtacctgctgggggacgcgccggtgagcccctcctcccagaagctcaagcggaaggcggaggaggacccggaggccgcggatagcgggggtgaggaggctgagcgcggggcctcgcggatatctgcgcgggtggggttgggatctttctcctggctgcctggcgtccatcttggcatcttcggtagcagcgcttggccccgccccctgttgacatccgggtaaatttgcaccattttcttgccttctcgctcccttgttgtttattattgttctttttttgcgatgggtctctgttacctaagctggtctgaactcctgagctcaagcgatcctcctgcctcggccacccaaagtgttgggattacaggagtgagccaccacgtctggcctctcgtcgtttttattttttaatttttgagtgggggctcgctccgtcgcc

SEQ ID NO: 84139 - DNA, 1197 bp, Homo sapiens
gtttaaatttaggaggccctcctttttgtagatggtatattggtggattgtggtacgtggcccagatctgcctttggctgctaggagagctgccttgcccaaactcctgtcttcttagggctgccaccatccagtgactgatatttgcagagttacaaagtctgctccttggccccagcttggtcagttctgaagggccttcctagctccagagttgcccatggttttggctgaggtcttgttgaaactctttgataagtcagcttctctctctgcccactcctgctcttccacaaaggttttcccaaaatcacttcccaattctttaaatttccatctccatctcagaatttgcttcccaaggaacccaatttatgacacatttttattaatttgcaaagtctgtaactacaaagcaaaaaatgaattaaacttgagcatttttatatgtcagagtttaagaatgtatcattgtttggatagtacatcttttcagaagcaagcatagaaatgggtgaatgagcacgtcctaggctttttttacccttctgaatcaagaacagatgtcttctgatagtaaaaaaaaaaaaaaaaaaaaaaaaagtgcaggctcactcctggcccagagctcacacagcaaatatatttttggtttatgtaaaagaggctattgctaatctgtgctgttcttctctttaacagaaccacagaataagagaactccagatttgcctgaagaagagtatgtgaaggaagaaatccaggagaatgaagaagcagtcaaaaagatgcttgtggaagccacccgggagtttgaggaggttgtggtatgttaactagatttactcattatttttttccctaccttcattcttctttgaaactggttatcctgtacacctttttcatctacctggggctcaggaaagtgagagaggagttcaagatggaaagggaaaatggaaaatgggactgatctgggcttcagacatgttgccctgaagcttttgcttcacaaagcttttagtttttggcaggacaagttgagggggaaagggagaaaaattgggtagaatagggacagttgtataaacagtataaagcatcccactttgagtactttaatgtcaatatatttttcaaaaagtttatagtaattgttttttctatttttttgagccagagtctggctctgtc

SEQ ID NO: 84140 - DNA, 1051 bp, Homo sapiens
cagagaccttctctaccatatcagtagtagggttacttgtctatgcaattaaaaaatatggtgcctctcttgcagaatttgctgataaactcaatgagcaaaaacttgtccaactagaagaggcgaagcaggcttccatcaaacaaatccaggatgcaactgatttggagaagtcacagcaggtactgccattactttttgatgtgcagaggaaaaacattcctatggcttcagagtttacttaccaggaacagctgtatagagtacataaggaagtaaagaattgcctagactatcatatatccgtgcagaacatgatgcatcaaaaggaacaagagcacattataaattgggtggagaagcatgtggttcagagcatctctgcacagtaggaaaaaggagacaattcccaagtgcattacagacctaaagctgctggcaaagaaggctcaagcacagccagttatgtaaaggtatctatcccaattgagacagctagaaacagttgactgactaaatggaaggtagtctatgtgacaaaatatttctgtattggtgtctactgaagttatagtttacctctcctaaaaatgaaaagtttatttcatacagtgagagaattaatatatcagccagttagatgtttctcatccttcttactctgcatttgagttgttccctgatcacttctgaataagcagtttgcctttattaaaacttgctgcctgactaaagattaccaggttatagtttaaatttgtaattcaaccatcttgcaataaagcgacaattgaatgaaaaaaaaaagaagttatcccccctgaagagactgctcagttagattttttttgctagggcttttctgaataagtgtgggatatttctaaacctctgaggtaagactatctaggttgaagctattagttaatgatttaggtagcttttctgggagaaatagggctattagaaagatgtattcagaggacaggtaaatattaagtgagcactgatcttggagattatatgtttgccccaaagaggtatgaggtat

SEQ ID NO: 84141 - DNA, 1067 bp, Homo sapiens
tccacccaatttataatgtgctcttgttccttttgatgcatcatgttctgcacggatatatgatagtctaggcaattctttacttccttatgtactctatacagctgttcctggtaagtaaactctgaagccataggaatgtttttcctctgcacatcaaaaagtaatggcagtacctgctgtgacttctccaaatcagttgcatcctggatttgtttgatggaagcctgcttcgcctcttctagttggacaagtttttgctcattgagtttatcagcaaattctgcaagagaggcaccatattttttaattgcatagacaagtaaccctactactgatatggtagagaaggtctctgtggtaatcacatatatttctttggataaagcatacaaaataagcccaattccgagcacatagagtcctgttacaccagctttaggataaagaaacaggaagaattcctcagggatcagtccaggatgaacttttcctccgtattcaggaagaggtggtagaagggcaaggtgtggctgcactgtgtgaaatgtccttgttgcctgcaatacccctggacctaggaaggctgcattcttcagagagagggccactgtggtggcagcaaaaagtaccacccaggacagcatggtcagtgaaggtccaggcagcaatcttagcatccctgtgagaggggagataacttctgcagtatgcagataacctctttatctgcgcccccttcacaggactccagggtcactagggctcatcagggaaagggaacccagaagcctggcatgccggcaaaagcataaaaatttttaccagtcagacttcaggcctctctctctctatgcaaaccagttgtaggaatggtaaaaatcaccgtattctctgcccctccatgaatgacttctgacttcccttcttgaattttcctttctctgagctacctctggagactttaaatgttttaaaaactccttaccacctctttaaaaatacctcatatgctcatggttaagtcataaccttagttaagacttattggtttcacctgtgaggtt

SEQ ID NO: 84142 - DNA, 1048 bp, Homo sapiens
aaaaatagtaagatgagacatctagctgttgagaagtctctagaccattttaatatcttcattcctatatccaatgacccattctaaatacaggcttgccttatattacaggtgagttaaaaaagaaacagagatgcttacagcttttacttcaaataggttatcataaaatcctataggatccagtttcctgaaaatctgtaaggaacaacatttaaattcatggagttcatctctttattccatacttctgagcttgaggagccattagtcttgtttcggaaattaaagaatatttccctgtttcaaagctgttgtagaaactgctttcctatattctacatcttacgcaaatccagaatgagattcagataagattcagatagcatgttcagggtctctctgctttttatattaaaactctagaagtttctgctttcttgttgaaagcagcactcttgaatggcagacctcatgttggtaaatgatagatgccttcaaagacttacttgacacatttgatggggaaatcatataagccctttggtagagaaagggggaaagtcattctagcaggagaatgatggccatttttatcaaggggttttatgtttgatctctgcatgtatctgcttgtatctaaagaaaagaaagtgtatgaaaagaaaggtagaaaagcaaaggtcccaggattgcagatagacttccttaattattagtaaactaatttttactgacaatcagaataacgctagaataaagaagttaacccccaggtgagacacatacctctttctgggataagctttgtgtgcatctgagccataaattaactctgtggtgtccacagttgaagaatgaagctcttttccccttagagttagtaatagtgagggtatatttgaaaacagattttgacctgacatgttttatattctaagggcactatgatctaggacagacacctaaatcctatatctaagcactattatgggtgggtttttcctttaaattgttaattaacttgagcatcaaaacgtctcatgct

SEQ ID NO: 84143 - DNA, 1392 bp, Homo sapiens
ttaacataaacaattttaatcacaatagtaatattaatagtgctcttattcctcttactgcgtttaggaacaaatatgccttactttaagattttaacctaaaaatcttgatatatactgtaactaccacaatgacatgtagtgtgcaagattttagaatttaataaagcatgttcaaaaatcggtgctaatgcaggaccacaaaagtattcctaaaattatgctacattgagtaatatgattttttgtttgtatcatatcaatcagaacaagtactttatgagtttgaacatatggggagaatttagcaaatgaactttttatcttaaaagttaatagattctccacatgtagcaatgcattagtgaagctattatctcggaaagattaaaaaataaagacacaaatggagggaatttctgcaagagagaggggaaaagaaagggagagaggagaggaagaagtcttaatagaaaatgtgcacattggccgttctctctttccgtacctggccgagcaggagacgccatcatgggagctgacatctgccacaacaaggaccgaaaggttcggcgcaaggagcccaagagccaggatatctacctgaggctgttggtcaagctgtgcagttttctggccagacgaaccgactccacattcaaccaggttgtgctgaagaggttgtttatgagtcgtaccaaccggccacctctgtccctttcccagatgatccagaagagtgaagcttcctgtccgggaaaacaaaacggccgtgattgtggggagcataacagatgacgtgcgggttcaggaggtgcccaaactgaaggtgtgtgtgctgagtgtgaccaacctggcccgcagccgcgtcctcagggcagggggcaagatcctcacttttcgaccagctggccgtggactcccgcaagggctgcagcaccgtcctgctctccggtcctctcaagggccgaaaggtgtacgggcattttggcaaggccccgggaaccccgcacagccacaccaaaccctacgtccactccaagggccggaagttcgagcgcgccagaggctgacgggccagctgaggctacaaaaactaaccctggatcctactctcttattaaaatgattttggatgcaaaaaaaaagaaaagaaaagaaaatgtgcacattgacattacagtggggggtgagaaaaagtctcttaagtagcattttacatgaggttcctcattgttggtttactccaaatgttgtcaaacttcacggtacatgagaattggctggagggcttaataaaacgcagatttctgggtctcacccccagattctgatttgtagttgggtaggaccccagaattcaaattttaagttcccagctgatctcatcct

SEQ ID NO: 84144 - DNA, 1046 bp, Homo sapiens
caggatggtctcgatctcctgacctcgtgatccacctgcctcagcatcccaaagtgctgagattacaggcgtgagctaccacggccggcctgttttttctttcaagtttttttttttttcttagtgattactttgggaattagaaataatctctcaaatttgtaatgatctattttgaattaatattccttagctttaatggtatacaaaaacctctacttttgtatcgctttgtctctcctcttttgtatgattttcacaaattatatccttatgcattgtatgcactaacatagacacatagttataattattgttttatgcatttgtcttttaaattatataggaagaaaaggggaattacaaacctccaataaaataaaactttcttttgtgtttatgtagtttccatacagtgttctttacgtggctttgcatactgtctagtgcccttttctttctgtccaaaggactccctttgacatttcctgttggacaggcctacaggcaataaactccttcagttttgcttattcgggaatgtcacttcttcatttaaaaaaggtagttttactagatttagaatgtttggcaaatagttttatttttctttcagcactttaaatatatcatcccactgccttttggccgccctggtttctgcccagaaatctgctgttgaggaccctttataggtgacatcttctgacttgatgcttttaagattttttctttgtctttgacttacaacggtttgattgtaatgtgtctcagtgtagaactctttgggtttatctggctttgtgtttcaccttattggatgtggtgattcatgtcttttatcaaatttggaaagtttggggccaatattattattttgtgagacaggatgtcattctgttgcccaggctggagtgcagtggtgcaattataactcactgcagcctccacctcttaggctcaagtgatcctcctgccttagtctcctgagtagctgggaccacacaggcacgcaccaccacgccagactaatttttgtctttttt

SEQ ID NO: 84145 - DNA, 1009 bp, Homo sapiens
tgttgaggtgttgcttatattagcgttgttttgtcatcgttatgttacattttactaattgcttgtatctggaatcatttttgcatttgatagaggtagctgagtctctattattcactaataaaatacaaattattttctaagtattgacggtgagcacacagtccatgaatcagtttataggattctaaaagcaaaagaacaaacaaacaaaaaaactgctacataatccattactgtgaaaggctgcttagggccaacaatctgaaaatatatacttgtttcctttactgagatgtttaaaccgggctgcttataaaaccttttggaatatatgattgattttatggcaatccatagtaacacattcttttaataaatagtaagatatatagaacaacttaacccagagcttttacttcaaaggaaaagatttagaagcagtaaaagagataaggaaataaataggcatattgttaaatgatgcaaaataaaagactggataaaattgtttgtaaatcatgaaaatagaatcatcattcttcacatattttatgtccttcatgttcaggtttaacaatgcctagctagttgatataaatttttactctagtgattgcttttagtcatactgtaatgtaattttatagtaaaatatatcacacatgtactctgtaattttgcttgtttttattatgatacatatgatatacatcatctttttaaaaagtatttttggatagttttagatttacagaaaagttgcaaaaatatagagagttcctgcacacccgacatccagtttcctctattgttcacaccttacataatatacacattttaaagataactaacaatttttcttaagtatacacctacccatgtgtctctctgctaaagaaagatgatcaatgcatgtctgtcccttgtatcatatcttttgatctcctatgtaaatgctctcctgaatttgggttttatgcttgcttcatgtgtattataattttac

SEQ ID NO: 84146 - DNA, 1034 bp, Homo sapiens
ccaaacatagtttcaaaataattagttagagtaaggtgaatcccaggggctgtccgtattgctttttcttttcttttctttttttctttttttgagacaaagtttcactcttgttgcccaggctggagtgcaatggcacgatctcggctggtctaaacctccgcctcccaggttcaagcatttctcctgcctcagcctcccgagtagctgggattgcaggcatgcaccaccacgcccagccaattttgtatttttcgtagagatggggtttctccatgttggtcaggctggtctcgaactcccgaccttaggtgatccgcctgcctcagcctcccaaagtgctgggattgcaggcatgagccactgtgcccagccttcattgctttttctataatgaaattgttttatgttcaagaagtttcttgttatcaaatattgcactgtaaggatgattgttccagaggggagaaattgatgagtgccagaacagagactttcaagtttttctaaaagtgaaaactctatgggttaaactcaccccttctcatggtcccattactgagactcctgggtttagtttccctgactcagtaagtttagaacacaaggtctgggtctctgcattactaacaagtaccccaggtgattctgagataggagctcctgagaccatttcaggagaaagctggagagcataagacttacaatagcataattatttttactttagagatttcaataataaaggccttcttaacagctatgagggttaatacataactgtccattattcaaatgcagtcttatttacatcaagctttgctccagaaggctggctctctcccctcctgtctcctctgctttccttaagacagcacttcctacctgctcttagggtctttatcacatctatcaccttcagctattcagcgtgaagcaacacaagctttgcaagtgtattgcttaaacagcatgttttcactttgcactgttatcacactaaaaaatagcagccagcctaaggtaaatccagt

SEQ ID NO: 84147 - DNA, 1049 bp, Homo sapiens
gagtgcagagaggtctcattgcgctcccgaacagacctgacgtagatccgaagtggcccgcgccatctcaactatgaggggacacccgtaggcggcgggagagggacgccgcgaggagccaataaagctccgcaaccggaagtgtcttctgggaggggtcgtacccggaagtgtggcacctcccgggccgcacccggaagtgtgatgccaccgccgctacggggaagtaatggtatccggccaattgagattcggagttaaaacaggtgtttgtatatctctatttcctgaggcccagtagagtctcctcttttcggaaagtgttggaggggggacgtatttgggcatgattttggatgtctcgtcctattgaaatccgtggggaaatgagcagtaggagtgtgtccaagggggcctgactctataaaggcttttcagaagtttctttcaccgcccgtcaccctcgattcccctcccactcagggatgtgcagatggaggtcggaggagacactgctgccccggcccccgggggcgcggaggacttggaggacacgcagttccccagtgaggaagctagagaaggtggaggggttcacgcggtcccgccggatcccgaagacgagggcctggaggaaacaggtatgactccacttagtggggtcttaaaaggaatccttaggggttgtcattgttggacgggggaagggtcagtgggtgaccagtagggagtcttgggacttaagagaagtggcttaaaccatcgccgggtcaggaggaggtcactgtggacacatggtgtagtttacatcattgaggaagtcattggctgtcaacggatgttcactgggggtttggtgtgagtttaggtcattgaggaatcaaaaagggggctgttaggaccaaagagggtcactgaggatttagagtgtttagatcaaagaatgcgctgaagaaagtcaatagactcaacagaggaggactgttgagaagttagtgtttttgaggagtagggtgttatttattaaataatagaagtgggaaggggaa

SEQ ID NO: 84148 - DNA, 1033 bp, Homo sapiens
gtgactgaaggtctctgaagtgctgggtgttagtggaggttaatgatggtcattgttgggggtaggggggagtagacatggagtagaataacttgtggatcagggcagtcatggagggtcattgaaaaaccaggtgttaatgattgttaatgtggggtcattggggtgtttgtgaaccacagtgggagtgaatagtggattaggggagtcctaaatatctgggtgttagtggatattaacgacagtcattgggagaaatagtggacattaccaagaatataaatgggcaaccaggagagttagtaggggtcatcaggtatcagtgggcatcactgatagggtagtagcgggggttggggcattcaaacagttaagatattaatagatgttaatggtggccattgggtgagcagatatcaggagaaaaaatagcggtcagaggagttaatgggggatcattgaagatgaataatcgtcatccagagtcaatggggtgctttgaagactttggaataacagtgattgaaagggaagtaattggtctgtaggaacatagcaagtccagtggaataacaatgagaatatgttggtttattagggttttaggaagttcattggaacctaaatgttagtggagatcattgcggggtcctagggcagtcatcgggtcattgaggggcataggagacacttggagttctgcgtcagcatgcaggggtcatggaggggctagtagatatttggtgggtccttggggatgtgggattagttaggagttcacatgcagatgacccaccaggggctccctttcaggatccaaggacaaggaccagccacccagcccatcaccaccgccccagtcagaggccctgtcaagcacctctcggctctggagtcctgcagcccctgagaatagtcccacatgtagccctgagagtagctctggaggccagggcggggaccccagtgatgaggagtggcgcagccagcggaagcatgtgtttgtgctgagtgaggctggcaagcccatcta

SEQ ID NO: 84149 - DNA, 1027 bp, Homo sapiens
tgacacacaaggagctccaaaagagatcgtatttttattagagacaagccagttgggattgaaacaaaaatggaggggggtatagccctgtgtatgttgcacagaaaaagtatctgaatgataaaggcctaagtgataactctggacaaggaatttggattttgggagtagtgcagaggtagaggcatttttgtgatttattgttctattttttcttctagaaaaatgtaagtagtcatatataattttaaaatataaaggagaagaggcaaaatgttgaatggcacctgaggatcctatattcatattggatcagtattaacatccaggttttgattgttgtactatggttacctggtagattccctttgtatataggaaatagacactggaatagtaaggagtagtgggtcaagatgtctgcaacttattgttcagaatcactcacaaatgggaaatctgatataaggacaaaatgggagcactgtggcctatttttacaacttttgtgtacatctgcaattgtttcaaaataaaatgtttaaaagggtgctcttactgtgctggccattttcttttgtaatggactttgtgtgtgtgtgtcaaaatgttagttggattatttaaaagatttatttattacccactcttggccttatttcatgactagcactagaaagcagagagaggaaaaacacagatggagcttctgcagaaatggttgcaaatgccagccataaaaaagatgtggagacaattgggaaattaatgtatagcctgggtattaggagatgttacctgatgagtattaatcttgtcagttgtgattataggattggggtcagctaagaaaatgtccttaagtagttgagactcctaatgaagtttctgggaataaaatgtcaagaagccgggggcttgcttaaaaataattcaacccaggaaaaacatagctgaaataaatagggtgaatattaatgattgtcagatctaggcaatgagcatatcagagttaatcataatatcc

SEQ ID NO: 84150 - DNA, 1113 bp, Homo sapiens
tatgtagaattttacctattcatgtgaatgtgtgcaggtctgtgtgtacattcctttatattcctgatttctacactgattaaaaggccaaatggagacagtgtgatagcagcctaacgtaatactagaacaaatactgaagtaatagaacatcaagttaattgaatgactggaagagatctaaaaaacacattttccaaaaagaaattagattagaattaaggtacattggtcagtaatttgcctccaagatgagaagtagaagtgtcctgcttaggagttctggctactgagttaaatccagtctcttatacttgcatagttatttgaatagatctgtttgggtagtttgtgtcactctgagcaagttagctagtatttctttgctaaatttctcctactgaggaaaacggcttttaattcagtgctttgcaaggattagatgagatactgcatgtgaagctctctgcatcatttttggcacatagaagcagcttgataacctgtggctgctgctgctgttactgttattggctattgtaattttgtctcagccactgaactcagtccagtagagtcctcgtgattcccggtagaaaagatgcatgcttatggtaggcaaaatcctcaaatgaccgatagccttccccaaaaacttctcaatagtgttatatggtttcatgcaaactctgaaatggcaattaatccagggaaaagaaaaattaaaaacagaagaattaatcagcacatggcaagaatttgaagaaaggaagcaatatcttaacctagatagagtgcgctagcaaccaagccacacagtaaacagtcatgaagccaaatgtatcgcaggggataagtgaagatttgaaagtcaaacaaccttcccataattctgtaaccgatcccccaattcctcagcaaaacctggcatggtccaaaccccaaccctttggatctaattgcagaggcttttagaaaagagcagttatgctaagtcatgcagaactttctcataatcaaagcactgcaggggttggggattgggggtaggcaacaaaaacaaaaaataaaacaaaaacaaaagaaacactaccagaggctaatgcatcccct

SEQ ID NO: 84151 - DNA, 1168 bp, Homo sapiens
tctgtcttttgacatcctttctattgctaagtcgttctcttgatgtgtgtttcccaattcatagttttacagagaacacccagttcttggaccagctcatttattcagtttaaggaatgggttcccgtctagattatgaatggccactcctccaatactgggcccacattggtgcagtcagttctctgcaagggggaagatataaagagctataaacatggctcttgtatgggcaagggcggggcatagagaagttccccttaaagaggtagagtgtattgcctaaggggtcaggttctaggctttgcatgaattcagatcctgactttgacactttgaaaagatgtgatggcaagcaagttacttacgctctctgggtctcaattttctgatctgaaaaattggtatgatagttcatacctcataggaggagtattgatgagtcttaaataacaaaagtcaagcacttagcacagttcttgacacaaactaaacgctcagcaaaagctagctatatccaaatcaggagaaacaggtctgatccaacactcgggagtactctgttaacaattatttacatcccctttgtgtggaaataaacaatactgacctgtcctagtctccgtctccaaaatacacctgcgtcctaaaaatagggggcattctccatgacctgacagaatcgcctaatgcctcactgaggaaacagggtgctacaggcttttgaaaagtcagtgttagcctcttctcattggaatttaagtagctggctctcagtttaccatcactgggcccagttcatgctggatggcgaatgcaggcagcccagttgagcagcgtaataagtgtcgaagatgaggccttctccagggggctgccatgtttgcagaaatggcaacaaatttcttctagcatttttccaacagggccttgggaaatcattggttttcatgaaaagaaaaacacaatgagctaaaatatacatgaaatgagatggagtgcttgattcaggttgtagaaattttatttactgttatacagtgatgcgttatttatttgattgtgtcagaaaatcggccattttatacaagtgaagttcagagatagctgaagtttttccatgtcagctgtgaaactgtttttaaccctttttttacgagtgccttcc

SEQ ID NO: 84152 - DNA, 1056 bp, Homo sapiens
tcctcccctataaaataggaacagctgactttatttcccaaaacagttgtgtatgagtttgctagggctgttgtaacaaagtaccacaagccaaggggcttacacaacagaaatgtgttgtctcagcgttctggaggctggaagtgtaaagatcaaagtgtctgcagggtctgttccttctgagggtcatgaaggaatctgtctcatgcatctctcttaggtctggcaatctttggcattctttggcttataagcacatcacctctatctctgccttcatcttcacaaggcattccctctgtgggcatctatctccaaaattcccccactttataagaacactagtattggattagggcccaccctacttcagtataatctcatcttaactaattacatctccacaatctccatttctaaataaggttgcgatggagttgctgggagttaggatttcaacatataaatatttggaaaagaggggggggacacagttatatccataacaaactatgagtcacatacgatcaaaaacgggagatgccttgcaaattataaagggctaaagagataaaattttgcatgagggttaaaagggcaaactccagattaagttcaagtctcccctcctccagttatagctgtgatttcttaggagagtggcttcatttctttcctaagccttgctttgctatctgtgaaatgaagatgatagcagggcctcctctgtggggttgctgtgaaaatatcatgaggctgtgtgtgcagggcttaaggcatgccctggcacccagtacgagccagcctctgttaccagatcagaaggggtgggttgggtggggccctgcctttccatcaccttgcagtcaaacctcccagagctggtttcctccctgatgtgctactgctgtgctgcaaacaggcttaccagtgccctttcctcgtgcttgtactcatttccaaaggcaactgtgggagctgctttatggaacagaagctctgaacagcacaaatgataaacacatgctggtgtttgcattcctctaaccctccaac

SEQ ID NO: 84153 - DNA, 1050 bp, Homo sapiens
ttcaatacagtggattcaatttctttcatgggataagatatagggacctatgaagttggttacatcttgcaggaggcagcagagaaaactcccaattagaggtctacacagtgaaatgctggtaaatattaaatattttaacaaccagccctagcgggggaaaaaaagccctgctgtgtagcattggccaatttccacgctgtaaatactcccatcgtgaccaatagcgggttatcaacatgacatcactgaatacagaagtgggaagagatgtgcacaatcagctatcggagtcagtgccccatacgtattccctggactccagttccacagagttggctgacaatacgatggcctgaagggcagattccaccaggcacagagctcacttttgctggtctcctgtgtgcagaaaccctggctatgtctgtgtttgacaacctggtacaagataactggggaaaatctcagaacattgagaattttttgctgtgaggctatataaagaaatcaatatccaggcagaacctctctcagcagccctaggcaccaggcctgccttaggtccattgctgtataatccttttggtctctgttttgctctcacttcttggacaccctatgcccagctcaagtccctcctatgtacccccagcactctattacttccaacacaaagatatatttttttattgtccatattttccataaagctataagctttctaaaagcaggtgtagacatcatgttcagttttatatccccaacagttaatttacaagctcagtacccaaaacttcatagttctcctcctcccctatcctgcagggaggagtggtgtcaagtgctagatttacccctgagctaggcagttgtggtctatcaaaagcaaaagcccttagctatgtttctcaccatccatcattttagtgcctgtttagagagaatcataataaaagcagagagtagcagtgaaagattgaaatatccacttcaggcaatgatagaaaagccatcaaaagggctggacacgggggctcacgcctgtaa

SEQ ID NO: 84154 - DNA, 1032 bp, Homo sapiens
caattgccgggctcctgcaggattggccagaacaacgcggaagtgattacgggtcgcccagcaacgggcggagtcctggcccgaaactggatgcgcacgccccttccctgcggcggggaggctgacaaggctccgctctatctctagcgcctcggagcgctctccggctttgctgtctagcccggcggcagcgcgatctcttaggcactttcaccgccttcctctccaggccctgcccctttgacgccggccgtcgcgatattgcggagactggatttcagcttcgtggtcggcggagcggcccctggagggcgcagtgcgcaggcgtgagcggtcgggccccgacgcgcgcgggtctcgtttggagcgggagtgagttcctgagcgagtggacccggcagcgggcgataggggggccaggtgcctccacagtcagccatggcagcgctgcgctacgcggggctggacgacacggacagtgaggacgagctgcctccgggctgggaggagagaaccaccaaggacggctgggtttactacgccaagtaagggggccgcagtggggccgcggacgcacctgggaccctgcacagcccacggacgccacctgcgcggggaggacgcgcactccagcgcagcgcgtgcggtgcaaagtgaaagtaactgttaaggagcttcagggaaaagggtccagggttcccagtaggggccggcccccttggtgggcctcgggtccagcgggggtcacctggtggcttcccggcgcgccctctgctgttcaggatgcagcactgcgcggcgcggcgagggcaaagcggcctcatccccgccaaaaaataaagatgttttaaaaagcgcacatgctcagctccctcctgcaggctctgggttgcagggataggagttttgttgtgttttgttttgttttgtccagaccggtattgctcagtcatccaggctggagtgcaggggtgccatcatagcccactgtagcctctacctactgggttcagacaatcctctcatctcagc

SEQ ID NO: 84155 - DNA, 1037 bp, Homo sapiens
aattcgaggtgagcctaggcaacatagtgagaccccatctcaaaaaaaaatatgagaaggttcctgcccttaagaggtttaggatccagctgaagaatcaacatgtgcacatgaaaaaaaatggccgtgccctctaatgtcatatgaggtcagcgtatgaatgacgttgggtgcctgccctgcatatacatatgttctttgagctcattcaagggagaattcccatggattggcacaaccagtatggtttatagagcgatcaggaataaaataggttttcttcaaaacaagaggcaaaaatgtggagcccagggtgggatcaggggccttctgcagctgtcgcagttggaacatgtgacgaaagccagttgatgtgacaactgctgggtgggagggacaggcttgggggcggggctgggagggctccttcccttcctgacccagggatggtctttacttctccctggcacctgtagacctgtctttcttgtgtttcagatttgccatacggatgggaacaagaaactgatgagaacggacaagtgttttttgttgagtaagtgtctgcaaagaaaccactctcagctgttttgctttttaataggaatttttaattataaaagtaatacatagtaactgtagaaaaatacaaagtataacagtgtgtatctgtaatcttagcagaagtgactacttttaacatcgctggaacttttaacatcgctagatttattcttctattttccccgcacacgcatccttaaaaaaaaaaagtagggaggccaggcatggtggctcatgcctgtaatcccagcactttgggaggtcgaagtgggtggatcctgaggtcaagagatcgagaccattctggccaacatggtgaaactccgtctctactaaaaatataaaaatgagctgggtgtggtggcacgtgcctgtggtccctgctactcgggagggtaaggcgggagaatcacttgaacccaggaggcggaagttgcagtgagctgagatcgcgccactgcactccagcctgg

SEQ ID NO: 84156 - DNA, 1020 bp, Homo sapiens
gatacgacggcagcaccactgccatggaaattctccagggccgggatttcactggcaaagtggttgtggtcactggagctaattcaggaataggtaggctcttcacttagttatttatctttgggactgctataatgagatccacttagatctagctataatggaattttgtttagtggttctctgatttaaacatgacttttatccttttcagatatcgtttcattaacatcactacctctttttaaatcctaatgttgtcatggaagcctgtgtaggggctgaccttgaagtctctgaaagctgaacactcagcaaaagactgtggctattttggtattcagggatgagagacaacaggctccgtctaagagtttttgacctggtctgcatggtgtatgggcatattccaattacctgggttattcaaaccaaaattgattggtaatagaatacggggaacaacaaggtattatgtctttggaacaaaggatactacaggtttcgactggtcactgagcatatcattttcttttgggcacaggatcttatttctctataaaattggagaatgagttcctgtcttcacctcttaattgccaatgtttacccacagggactatcatgggtagatggctcaagagggtatccttgcttcaatatgatgggccattaaggagacaggagcaaggcgggagcaaaccataactcttcataggattttattctgattttgctttgatctatttacataagtatctgaatcagtgagaaccacctgctttgagtttagatatgcatcttcagatttgtcgacatatgaaacgttgcatttggctgtcttctgtcaagttctctctgtccttttggtcccccgcagccctcacacggcccccttgatgccctcctctactcatttgtttctctttcctaattttgtttttatttttattttttgtgggtatataaaggtgtctatatttatggggttcatgagatgttttgatacagggatgcaat

SEQ ID NO: 84157 - DNA, 1020 bp, Homo sapiens
aaatggagatcccttcacccagaaagacacatctgaaatggagaagatgcctttttcctcctgcaaccaataagagagtgatgaaaattatgacgccttgggaaataagactgcaacgtaaatgtgtgtccaccccctagttttcttttggattgtgaatcctcaccctccgataactagacgtgctgttttgacgtctatgctttccagcttgccaattctggggcctggcacagtatctttcaccccggagtctcagtttcctcatctgtaaaatgggaaccatgacgtcagcatcacagagttgtgagaattcgacaaggtggaatgaaagcaactagtgtggtgtctgaccgcttgtgttagtccatgaggaatttccttacgtattgttttgtgtctaggaccaagttcttattttcttcttatggatgacttcatatatatgccgccacagagggaattaccgtttttctttgtaggtaaaaaggagctgggttaagatgcaccgtcatatgaaacagggaaaaagggtttgcttgggttttagattcctgaaacagtctgctgagggattctaaagttgttgtggtctctgttccactttgggagtttgataaaaattggcctgttttatttgacagctcttaggtagtgtgcaaaattgtcaacagataataaaagttttttgcaaagctatggctctatgtgctgtacttgagcagtatccatactcttaatagaattgatatatgaaagcaggtctttttccttatccgtttagacctaaatcttatccatagtgtgtggatatcacaaacagcacaagaggaagtgaaaggaacagagtgggtgagcaaaccattgttcaaaggaaacagaacctcgctcaaggaaaatgagaattcttctgatcagcttctataatggatgcaatgaggaaagttgtctagcagactgttcttggccaactgtctaaatggctcgctgcatcctcttcacgagagctgatggtaggac

SEQ ID NO: 84158 - DNA, 1106 bp, Homo sapiens
cacgtcatttttctgattgcatctgatgtaacaagtgctagaaaaactgatgctgttcattgctttaaaacgtctttctttattttcttggtattattaggtttacatattcttccgaacacactcttgccatctccatgcagttaagctagttcaatttaaacattgtcataaagttaattttttataagatgaatcaggttattaaatttagtaaaccattgccttcattattttgcacaaactttggcactgtgcagaataggcttagcactactacatttagctaattaaactggccgtcagctgcagtattacaagagtgagggatgttattctcttgggttttatccaggactttaacagtaggtagcattattaagctttttttatataaaactccacactctagagatatggtttactataaaagtgttattgtccttcctgttaaactatcatcttttgaaatagccacgctttgtttctgttccaaaggcaattgtaaagggtaagaaaatggagttgtctattgcagcttttaaaagtagactagcaacgggtaatgcattgcttagataaaggaagatgtaagaaccagagtgtaatttcacaagacacagagacagatggcttacccgtaactacagtcaggaattctctaaaggagagagggtggaagcttgagcctgtagcctgttgctgctgtcttgtcagatgtgccctttctggtaataaaaagtcctttgccgtgggttattttgtcaagtgagatagcaggacttaacaggtttgtttgggaaaataaaatttgatagaaaaacggcgtgcttttcccccacagatttcttggtagcatcattcaaaactacagtgagcagtatctttgcaggattttaatatttattcattattataaaggaaggaagagggccatcgtgttgcagtttgaaacagcctggattgttttaaaatagtccagagctgcagcctattagcagtctgcaagaaccatttgtttcttcagcagatatttattgaatcctactgggtgctagtctggcgaaatacggagattggagggtgtaaggctcaaggagcttacc

SEQ ID NO: 84159 - DNA, 2512 bp, Homo sapiens
tagcactggactccttgattcaaagggcatatgcatttaaaattttggtaacagttcccgagtcattttcttttttcttttttttctttttcttttttattttttttttgagactgagtttcactctgtcaccaggctggagtgcagtggcacaatctcgactcactgcaactttcacctcctgcgttcaagcaattcttctgcctcagcctcccgagtagccgggactacaggcacgcgtcaccatgcccagctaatttttgtatttttaatacagacggagtttcaccatgttggccgggatagtctcgacctcctgatctcatgatctacacacctaggcctcccaaagtgctgggattacaggcatgagccaccgtgcccgacctcccgagtcatttcttatcttgttgctccaatttccattcccactgacagtgtagacagacaactgctgagggcttgcagtgttcttgggactagcaggagggcgtgtcaaaattgtaaaactctgcctatttgatgtaatatttgaaactagaaaggtaaaattccagggacgctagtgacactatggtaacctgattgtacagtgacattcatgtttaaaccagtcttggaagataatgctgtagcacaactgtttttgcatcattaaatttatcctcttcttttctgagaacacaatatatatgagaacacattcatctgcatttatcctattttaattattgtttgatgcttagagcagaaattcctggacctgccccaattagcgatgagaccttgggtaagcctctggatctatttggagcctgtttcctcatctttaaggaaaaaggttggatggatgatgtcaaagacccactgttcagtctttctttcttatattttgagccttaattgggtccctgtgagtcaatttccgatgatagaatttgctgttttatagttttactctaacatgtagtaccttgagatagaccagtgatcccagactaagaattattcagaatcattcaccgtcggggacacagaaaaaggaaaatggaacagaaacaaaactaatacacgtggctccagatgtttaaaattagatttgataggttgtaggctgaagaaactcaacctgttcatcatctctcatcttttcacttgttctctctgtatgccattatattgtgttcctcattttcccaagatgatgattatggaaactcaaattttgcaccagaagctgtagttaccatttcattccattgcaccattcataccctgcagagaggatgtgaagtcgtaaggccttcttgctctggtgacatctgttaggcttcgtctctatatcatcccccaactccttgacccttgatatttgctggtctacttcccttcaggtccttcctcacctcacatctctgcgcaaggatttcatctggtatgtcactaaatattaccttcctgtgtttctcaaggtcaatttgatagactccaatttttcaagctgctggccagcttgagcgtattcatatgttacctacgatgaatcacatcagtgtcggggccgggaaggtactgcaacatattggcgcctcacgggaggctctcaaaatgatccaaagttttttgttgcagcaaaagctcattcagaagtctttgggccatttggctcagcggaggctgtcatgtgccaaggctccgtgggcattcttagctctgcttctggagataagagttcattcctccatcccaacttgttcttccctgcccattcttcctcttcctgccttcactgcacattccgggatcgccatgttctagaacattcatgtctgccttttagccagcagaatgctattctcacatccacaatgggacagctaacagcccccatttatcaaatccctgtcatatgctgtgtcaggcactttatatccctcatccaggaggatgcaaaaacctggtgtttttcttttttttttttttgcattttccagacgagccaagggatggctcagaagggtgaaggaactcacccgaattgcacagctggtgagctcagagtcaggctccttgcttggtccatctggcttccaaactccaagtctgtctgctccaccccatggcccatctttttaccatgtttagtatcaatgttcatactttgcagattttgctttcaaactctctagctgcggtttgagtgattaatttcaggatccatcctatttcttagaggaagccactctgatctaccctgtcgtctctttatattcaagatatcctttatagagctctcaaattacttttgggaagaaggagctatttaataaaatacaacttaagtgaaaacacattccatatagaagtatattaagaacctatatgtaattactatgactactaattatttcatgggaaaatgccctcctgctgagatgttttagatgctccaaagttagaagagaaaaaatgaaaacaattaaaacaggataacatggacagtacagaagta

SEQ ID NO: 84160 - DNA, 1056 bp, Homo sapiens
agaggctggaagaggcatagactttcccaggctcacacagctgggagataacggggtggatccaagatttgcagctggtgtgtgggtgatgccggaagattggcctttttcaaggacttagacaagtattgtactcatacattatttgcatttatttgtatgaatacttctgggttcctaatatgagggtacctaaaaagtacatccgctgcgcttcttgtaatctgagggagttgatgaacatgggccaaggaagctctttccttcgccttccgttccagacttccttttcgagtagtatatcgtgtatttactgttctacttcagttgcctatttgacctttcttgtcacaggctcagggaagattctttatcagataataaattattcatccccctcatagacataatcggttgctaaaatattctgagtttcctgtctccagaatacctaaaacttgtgcttggtacttatcctctaagttttccgtttcatttctcattctgaaaattttgcaccgacttagtcttgaatgttattcattgttctttgatcattgtctttgtgtcttctccttttttttttttttcctggccaccgctcgcagtcttgaaccgaatctttcaaactttatatccatgtaacctttgtataatgagggctgtgattaactgcagagttttaaagagtgaaagtcaagcataggtggctggctctgaaccatcactcccaataatgtgaaacccaaagcagatgcatcctttcattaatgtggggtcccctgagttcttattaagcaattttgacatagtttgaagagacggatttcatgttcagacagtgttcagccgccaatggctgaaaggcctgcttttggccacttggcatttagactccattatttaagaggggaaaaatatgcctgagactgtttttcatatttattgtgggacatttagagaatctcagactagcaggtgttagattaaacagaggagaaacggtccttgtggtgataaaacttccctacgcaaggacaagtagagaaacaactg

SEQ ID NO: 84161 - DNA, 1027 bp, Homo sapiens
acctgatcaggaatcaccccgctttggcataagttcctctctccccatgctgcccatcccatttctgcacacctcttaattagtaagttctccctcatattgaaggcagaatcttcctctgagcgtcttctatgcaccggccctggtcctgccctccgagttccactggctgcattctcatcagaacccagctaaaactcacgtctctcaaattccctaaataataaatccaaagttattgaagatattgggatactaaaagttggcagtgagactggccccactcatttctttgtaacccctgtccctctttttattattgaagcttgggatgcacttggtaaggctaggcagctggagagcgtgcagactcaggagccaagacctgccttgccttccctggagttaatgaatcagtgtgaatgaagagcacagtcttcttttaaatggcaggggaaccatgcacttatttaccggcaattctcagattctaattgttccgactacaatgcgtcctgtaaaccgggtagctgggagaaacttcaatgcatctttgtaatggctttgttgttgtttattgagagggactaattaactttgattattgcactaatattatggcactttgacagcccttcagatttatgactctgggaaaataaacaaatgaaatgcaggtgctggagcagaaagaataagttattactgaactttaattacttggaatgcgtagccaggagagaattagttgatgaattacaggatgcttaaaatctacatcaaattgcaagcaataagaagataaaaataaaaaggaaggggcaggaagggtgctatttttaaggcagggaaggataggatgcatttgcagtggtctccgtggtgtttcattgattaaactttgtggtctctaatgctgcagatatgtacatggtgctactcaaagcatggtccctgacctgcagcatcagtgtcacttgagagcttgttggaaatgcaaattcttgggccccaccccagacctact

SEQ ID NO: 84162 - DNA, 1006 bp, Homo sapiens
ctgagcaccagtgatatggcagtgataaagaaagcaaaggttctcactgggtgtggtggctcacgcctgtaatcccagcactttgggaggccgaggtgggtggatcacgaggtcaggagatcgagaccatcctggctaacaaagtgaaagcccgtctctactaaaaatacaaaaattagcagggcatggtggcgggtacctgtagtgccagctgcttgggaggctgaggcaggagaatggcatgaacctgggaggcagagcttgcagtgagccgagattgcgccactgcacttcagcctgggtgacagagcgagaatctgtctcaaaaaaaaaaaaaaaaagaaagaaagaaagcaaaggttttttcctcccaagaactcatggtccaagttttggtttttaaatatgcatctatgacagcacggatcacatagtgcattgattgtttgcctgtaggtctccttatttagtcaacaagcatgttttgatcctttattctataccagccgtcccactggactctcagcacatataggtatgcgagacgttgtccttgccctaagtgtggagacagacacgtaaattaatagtaataataatatctaccacccactaggggtctatgtgtgtatgtgttgggggcggtgtggctggggagggaagcaaggcctgtattatggcccaagctcaagaatattcgggcaagagcagatacaatgcctgtatttctcatcacttttgggtggcataggaccagttggttatgagcgtgaaaggttttctttgactttggtggtctagttagtggttgagaacatggattttggaatcagcccggtggaggttggaatcctggctgcgccgttctgtagcagtgttgtggatctcagacaaggtgttcctgcatatgcctctctatcttcctacaagaaatggaggtattgcatccccgaaccgtaggatgcttgtcaggattaaatgagataacagtgcctggttagtggca

SEQ ID NO: 84163 - DNA, 1113 bp, Homo sapiens
gtgtttggagaagtgttttcatatttgaatttacggggatggggtgggctggggtaggcaagggacagactgtagcgattcgcttggtgttttctcatgatgccagagaaaatgacctcattatcatcatgctcacattcacctttgccaggacccctgtgtagaaataatcatgaacttagtgactgacaatcataagcgttttatgatttgtggaggatttatatgtgaaggaaaatggatgaattaaaaatattaaacagcttagccggcacccacatggatgaatcaccgagatctattttttccccgtttatactataaacatatggcatgaattttctgctctcattacagatgctgagagaaggcaaagacaaatatttatattacattcatgttttacagtaaaaacactgttcggtttgtttacacagttccactgttacagtttttatggtcggtaatgcaaccaccgtaaaagcaagtctgggttatatagcagatgtgataagccctcatactcagagagatgtctgggaaagaatcgttgatgtcacatgtacaggatcaacaatggaattatgtgttgggacagtctaagttatgctgtaataacaaccaacctcaaaatctctggggcttgaaacaacaaaggtttatttcttgctcaaactgtattttcatcatgagttgcttggagggatctgtgagatggggatctcactcagccaccggggcccacagagcagcctgcactgctggatgttgtgacagaggaagagagggatgtgctgaccctcgctctggctcaaaagtgactcctgccatctctgctcacattccattggccaaagcaagtctcagggccaaggagtgggcagtagtagggtgctgtgtgtgtgtacaaacccaccatatgtgcatagagggaggccgagaactggactatcagagaatagccaaagatttctttccacggtcatgtcaagcctttttgctgttatttaattgatgttctatttttaatgcaacatggaatcagaagaatatagaacaggcgtcaaagaccctcccgcctctgtaaccgcactgtttaaaattgatgagact

SEQ ID NO: 84164 - DNA, 1641 bp, Homo sapiens
caagttttggctgagtttctgtcacttgcaaccaaatcagtcctatccagtatacctagtgactctctggtctccaaaggctatgcctgctgggtactgagtgtctccccgaccgaccccatgatggctacagtgcacatcccttccagccaactctattgtgcacacatattcgtagggtgagttgggccccaggtagagtgattggctcagatcctgcatcctttcagggtctgactgtaatcacactggcatggcagggggaaagtgtattggatttcagagtcaaaaaccacttggtatgaaacccagctcattttctatgtggatgtccaacctgagccagataattaatcttggagatgacgctgcatacttcatcaagttgtaaagttgactgctgtgataatggagaatgctggacaggctgcttttcatgtcatgggttcgctatactttagttcccattatatcatcctgccaatccccatttgttgtttttttgggacccagggtatcagtcatctgatcattgtgtgactttctcaaggacctttacttgagtcttgcacctctggtccacaatgtccacataccagcttgatggtgacttgtgtcattctccatccccttgttaagagaaaatctactttatgagccctctttccaaccgcagtgttgaggactagaccaggcaagatgatgccgctggaccactggatccagctggaccgctagaccacagagcccctggagcctcccaaggccaagcccgccagccacacacacctttgtgagaattaagaaaagatgccccctcctcttggggcccacagctcctccacctgggcacccagcctggtgaacagggtgcaggctgggatttagccctaccttgcttttggaccattgagctactaagttggagcaacaaggcttgggaatttttctttgatcataggtaggaaaggtaaaaaaacataaatctgccaatagaaaatagcatcgtaatgagtttctactatatttgtttgggctttgaaaaatatgccgccacaatatatcaatgtatggtcccaacgttttaggaagttgcatttaaaaaatcttggatacctgttttgtacatattatatatagcatcccgtgtgaatatgttaattcctttttatgagtttcggtcttttttccctctcctatacatgattgctgttttatagctccagtttggtggaattaacatagatttcccacatggggaaggttttgggtgaggatttagaacaaggcaggttcttgatcctcggaagagattcttatctgagaggggatttgagaatggcattgcagagtgggaggcgctgctgtgtggaaaaatgaactggaataattattagaacagttctcagaatttacaggatatttgatcataggagtaactttcctcaggagtgatggatggaatgcctgtacttggaatatttttaaattaatctattttcattacattgaaagtatgacacacagagaacactaaaattggatgaggcactacctggaattatataaagaatgacaaagatgcggttatccatttattttctaggcaagttagttagcctctctgtgtttctatttctt

SEQ ID NO: 84165 - DNA, 1098 bp, Homo sapiens
ggttgcagtgagccgagatcgcaccactgcactccagcctaggtgacagagtgagactccgtctcaaaaaaaaaaaaaaaaaaaagaaagaaaacaaaaacaaataggacccatatccctggattgttgaggaaatacgtgaacatatgtggcacacattatagtgtctggcatacaataaatactttgtaatgttactggtgtcttcttaccgttattgtctcactggtgaccgtttgaaatgttgaagctttattgttacagataatggtggatatagtctcttccttgtttattttttgacagaatctttttttaaaaaagtttttatttgtttggtgagaatttacttgttacaggtctagtgctgttatagttgaatgttttgaattatgtaacttaagtgaaacataaagctatgacttgaattttgtggttagaaattttctcagtcgattgacaaggatggcgtattggccaccttttgccgcagtaacaaacaatcccagactctcaaggcttgcaaaaataaatgtgtgtttgtttgctcataacacatgtggctgagggttggccgtggctccacagtcacgggtgggctttcctgggctcagcttctcacagcgtctccttgcagggcccaggctgtaggagatgtcatcagggcctgcagagggcaaaacctcacagaggcttctgttcatacattgttgtacctcatgtgtgcgtcatattgtcatatatcaatggcagtagccaagaccaacagccaagaccaatgtattctgcccacaggaaagtgaggcaaaggcagggagggaatgataattgtgaacaaagaattcacttgaccaaagatggttttcttgatatggttgccacttacctttcagtaaaatagcacttcacaaatttgtttaatgttttatctcaagctcccagaagtagctaaaaccacgaacatacatgttgaaaatttcaaaagggaaaaaagaaaagaaaggcacatctgagtcaggaaaacattaactagtcttatttctgagaatcaaaccggtggtcttttcagtgatcagtcaccccattaaccacacatga

SEQ ID NO: 84166 - DNA, 1298 bp, Homo sapiens
gtctccactgagactctggggaaaagcacagccttgcaatgtcaaataatagcattagctctgactgtacaggcagagtgctgtaattatattattggccctattttgcttctgcaatgaatttcattgcctgcattgtaaaatcagcaggtagcaaagtttctgctaatgatttaatgtactctctgatcattttggacaaaagtcatggtaagatccacaaggcaattttatcatccccactgactactgcctggtttaagcattttaagtgaagacaaaacatgattctcatctccttgtttcctggtgaattccttcccacacagaagagagaattacttgtctaatatataatttcaggcataaggagaaggtgatattgcattgcaaataatagcagttagtgggagttgagagccagctctgcaccagactcgtatcagccacttgacctccattattccttattccttggtacctctgcgccatctgtgatatcagatccttttttctgcaaggaaactgaggctcggcgatactaagaaactcagccagggtccgtcagctgtcaagtggcattgctggcacccagattgagggccatctgactccaaagccacctgactctttcccatataccacagtttctaatacgatattataccaagctttaatatgagcacacctcctggatgatgctgtaaattagttgcctcccaccacaccacatcaagtataatggatataatatgatttttcagaattcagctaattacctactgagctttacattttgtaacttttttgactgtccatcaaaatgtctttgggattaaaaatttttttcatatgttttgaggtcaatttgaatctgagtttaataaacgttaccatgaaacatttctcccatctttttaggaaatatctgtgaataaactcattttgtgatagaaggctgtgtgtttatccagttttcatcctaaggagagggggagaagggaaataatacttcacgtctttattgcatgccaaacgtttatagacattatatgatttcatcctttaataaccccatgaaaaggatgtcattgtcttcacttgacaaatgagggagatggcagtgcaatcaagacatactgacaaggagaggaggtgagcgacttgcccgaggccacgctgctgataccttggcagaagcagaatttgaaaacagagcccccatatgttttaactgctcattggaaactgactaggtcacatactcctcctccttccctgtactggtagtttttctt

SEQ ID NO: 84167 - DNA, 1029 bp, Homo sapiens
cttatcatggtccataacattcaccttccactctgtagccataattaaatctcccatgcatcccactttgggaggctgaggtggatggatcaccaggtcaggagattgagaccatcctggctaacacggtgaaaccccgtttctactaaaaatacaaaaaattagccgggcatggtggcacgtgcctgtaatccaagctactcgggaggctgaggcaggagaatcacttgaacccaggaggcggaggttgcagtgagcccagatcgcaccactgcactccagcctgggtgacagagcgagactccatctcaaacaaacaaacaaacaaacaaacaaacaaactaagaacaacaacgaaaaaactcccatgtattatctatggattgactgtaaaatatgagaagcaataaatatgttcatcactagggccatctagaaatttctaacccaagggtcaactaatctttccctgtgttgtatttcctgctctgcggatccggcatcatgacctttgtactacccaggaaagccagtgttctcatgggctcttctcttttttatgctctaccagatgctagcactgtggcatgccattcgctcactagcagcttaaagggtacaggttctaaatctccttagtgctactcacctgttatttctgagcctgcgtagatgatcttcttttattcagacgtctgtgtcacatatacatgacatcctacccccttcccataaaaaaaatcacatttgtgaatgtctctcttaggctgagttccagactccaagatccctcttctctcttgtcagaatccagcagctgatggcatttatgtctgtagatttcactgtcaatgagtcattgacaggctaagcaggctgttggatggagtgatcaatggtatgagggaaaacactaatgtatgcaagaagagccatttcctagtaggaaaaatatttatgtatggagccacaaaggtgatcgcttcagtagaaatcaccaaggacctggtagtcaatgtgcaacctaat

SEQ ID NO: 84168 - DNA, 1050 bp, Homo sapiens
aaagtttggtttagatgtctgatttctctgagcctcagtttcccagcatgtaaaatgttgtgagggctcacactggtcttgtccaggtgcttagtagagcatccattacaccataaagtatcacaaaaatttttaatatcatcattattactgtgctttcccttgagtttttttttttttaaatcagttaatccacatactggcagatctgacttccttgttttaggccctggggaatttttgttatctgtagagctggattaattttacagtgtggtgcctttgcccaaggtgaacctgtctgtttatagaaagtgtcaccaagttctgtcttgggcccgtccactcggttatatgtgctggaccctgggtggaagcactttgcacgtgtgcattcacgatgggctgtgctggaggggaaaacaggcatcactcccaaattctattcatgcaattaaaaattcctttcatttttatttgtgagagggtatgggtgcacagcagacggcaaacagaagaaaagcttttgattgaaaggtaaacatttacttctgccttttaaatagacatagcaagtctctttactctcatggaagcagttataaggaacatagagctgaagagaatatgaccatttctggtcttttactatgctcgtattaatccaccctggatagaagggactgtactatttggaaacacctaaataaaatgtttttgtcttaaggtgttaaaatgtactcattaatgtggcagtgtattccttttcttctgtgatcgttgaagtagggaaggaatttcaactaagaaccaaaatgattgtctgttaagacacttattttttgagaagacaaattaatataacattattatgtggggaatgtggaaaggctaaggttgtattgaaaacttattaagcttatgagaatattgaaagcatgaggaggcatgaccggaaggtattaatgatttgggcttgattattctaagactgtattctaagtctaaaatgttgataactaagacctgaaatgataaatgtttggcaaa

SEQ ID NO: 84169 - DNA, 1248 bp, Homo sapiens
ggtgtgatccaccacacccagccttccttttgtttttgatttttcctctttaaactctacttgtaaccacccctttcctttcccaaacttttactagcttcttccatcctggacttgcaatctggctgaaaacctgctaaataagggaacaattttgacatggctcctgtactccccacaaacctagttgattccagaccagtaatgtcttggggacagtgttgtcccatcttcctttctaggctgggctcagattactgacgtggaagagttgttggtcctggtgcaacatgccatgaccatgaggcctctggtagaaaggaaggaatgaagggtggttctccaaacccttggcccatgcctcatccttctgttcccttccttttccaggtacgtagctggtcaggtttcttaaattccgtcgatctggctttatccattttaagccttaggttgttggaacatagctaagttggtcaccttttcaagaattgaatctcaaaaaagccatgtagacctcggttgtaaccatcacattcattgacttggttgttgatctgtttgtcagatcagttttctgtttggggaacatttttgtaagtgcatgtatttcagcttttaacattttaaaaataaaatttcattgggaaagaaatttcattcgactggagtaccaggaacttagaatgaatccatttgtcagcagtatttataccctgtctaaaagagtgtcctcccagttctctgtctctgtactgtgtccccactttaaaaaatagctcaacctctcattatatttgcaattttttgtttttttcattgcctggtgggtttttttttttttgtctttttaaatgctccatgtagaaaagaattcctggaatagttcttggaacagcataggtgaataaatgagcaattattttgtcctcagcactataactgatttgagaaggtcaaaacagaaaataaaaacatgtttcagtagtaccagttcctgcacaggctgtctgccaactatggaagtaaagggaatagaattaggctgtctggattatagtgggaaaacaaaacacaatcacatcctgcctcagcctatccttgaactggtgtctttagaaaggggaggtcaagtaaaggccataaggctggatggtggggaagaaagaggcctgggaacaggtgagaaactgcagagcctggcggagttcatttaacctcactgtggttctgttggacttagtgcaa

SEQ ID NO: 84170 - DNA, 1209 bp, Homo sapiens
catctgctatatccggtaacaggataacagtgcattgctgggatgatgaggctgcagtgggctgtgattgtgccactgcattttcagcctgggtgacagaggaagaccctattacaaaaaaaaaaaaaaaaaagggtctgttatcaaccatgcttttttattttattttattttattttcctgtttctgagttagagtctcttttgctcaggctggagtacagtggcgtgatcttggttcactgcagcatcaacctcctgggctcaagcaatcctcctagctcagcctcctgagtacctgggattgcaggtatttgccaccacgcccagctaatttttgtatttttagtagagacagggtttcgccatgttggccaggctggtctcggactcctgacctcaggtcatccgcccgccttggcttcccaaaatgctggtattacaggcatgagcctctccatctggcctcagcagtgctcttctggctagcttgatcatatgccaatgttttattccttcgtggagctcagagtaagcttgttttactggacgttttctataataaagctaggggatggcgaatcattctaattaccaaaaagctgtctttgataacaatgtaggagataacgaaggcagaaataacatttgagtaattctttgccattctgtctctgaatcttgaaataaatactcttgaatttatatgttcttggtcctttaggagtcataaaaacataccgttacatatgtatatgaaacggtgagaaactgcgtatttattaagagtcacgacccttaggactagacaaatcaaattaaatctcataaaaacctgttatggaatatgaatacgtggcactattttttcttttagggtgtctttattaattttgtcatgtttaatatgttgcagttgcaaacaaaggcataaatgcatgcgttcattcctaattaatttatgtaattgggttttataaatttagctgtttaggaagctgtgcataacacactccatttactgtgtgctgtagccaataaaagcataatagaaagaaatatagtttgaagctcacttcaatggtaaatatagattagttgtaaatgatatctttgtaatgtttattttaaattttgcagtgctgcagattttctgaacataccaattaatgttcttatttgaaataatgactagttaattactataaat

SEQ ID NO: 84171 - DNA, 1862 bp, Homo sapiens
attaaaaaaaaaaaaaaagaaaccttgaataatcatgtacaaatataaatactgtatgtagaataagtgtaatggatcacatttatgatgaaatatgtatgtctttccaagggtaagaccttcataattcatttataagttaccttctttctcttacatgtaagtagcagaatagtaattttcttcgttctttctgaagaattgccacacagggaatgaaaagaagaaaggataaacttttcttaaacagcagaatgttattcagagataactggaaaaaagtacgagaaaagccaaaaagaaaaaaaaaaattgtgggtcctggtgatgttggaaaaatgacgtgtgagctgaagttccagacgccgagcttcatctattttgtcatgttatgacagaaatcattacaagggtgataggtttatttataaagacttgcttcaatattcaaagtacatctattctagcattcctcattttgagccaggctgtggatcaagatgaaagaaaaattaaattgtatattgaagagctcttaattgagccatgctgtatttaacagggaagcatcggcttcaggcagtcgataccactgaggatttttaatgccctgcatcatgagactgtcagtttgctttggagaatgcaaacaggctaatgacaaagccctgcaaacttttgtagttgctgctggtctctttggaaggcaagtgctaatttacccacagttgaaacctgacacacacacgcgcgtgcacacacacagacacacactctctctctctttctctgtctctctctctttctctgtctctcataaggaactaaatcctgcgttttctcaccagagggctaatgacacactgcttagtcacccaaaacctgtttcctaaggagccactttggggcttgtttaaagtttttaatgtaaggcattatataatattagatttcccctgtttttccttaatcaatgtaaattcaattgcatttcagagggtggccaagtggcatttcatcatctctaatatccatttaaaaatgttaggtctacccagttataattctccaaagtagcctatctgtggtttaatatgttatctacattctctaaggcagtgttaatttccttttgtagttaatctatcctactaccaaatttagtatatttatagttaaagattctgttaagagctaagtgatttaagtacatctgggataaagtggccttggctttaactatgaaacaaattttctttatttcattctcttcactgataaatccatagtaactggaggcatttttagaattgtgggcaatttcagcctctaaagtttgattaaagatacttcagatattcctactgagaggctagagggctgaaaggaatttattttgggttctggccctagtgcagctcagtggaagagaacagacattgtgagtttaattcccacgctgccaatttcccacgagtctagggtgggtgttacttctcaagaaggcgatggtagaaccgctggagacttcttatggctgtggcaggggactcacacgtcacaaggagtccagaggcatggctttgaagagctcttttcattcattcttccttttgttcacttgtacatcaaatacatgctgtgggcctactgtgtgctgagcactgatcttgtcaggttcttggggaagacttcattgctgaggtgacctttgagctgagtgtatgagtgcaagagagagcgatcacacctgggaactgcttaataaagtccccggcatcttgaagccacttgcagaccttggcagttgctgttgctcctgctgctgctgctgctgctgcattgtcaagactacattgatg

SEQ ID NO: 84172 - DNA, 1080 bp, Homo sapiens
tgaataacggagtggctttgcagtgggaacctggctttgcagcacagctaggattggagaagatcttcccagcagggagaagaactcaaagaacatgcatgaagggaggaaggttgcaccagtgggagggaccagaatatggtgtggaaagaacgaggttcaaatccaggctctgtcattaactgcccctaccctctctgagctgagtttgttttggacactggagataatgcatgttaacatcctggtagctctatttatttgctaccatggtacataatcatgggagctctatttatttgaacatcttcttttgttattatttggtgtatttgggaaaggcatgtgggagcagcaagcaggtgagcatcctgtttggaatgcagggccgggaactgccctgcccagtccagcctcattccagaggctagcacctggcctcagctgtagagctgctgggagcatttcagctctctgcttctttggcagtctagtgctgtcacagaaggaaagctcactccatggaaaaggggggattgatttcttctctgagggcagaggctgatcaatctaggctggtaggaatagatgtaacctcagaggaaacaatttgcattggcgaaagcaagtcaatggccatccccaaattcaaaaggacagggaagtgtaatcctactgtgatccctaaagcatccaggccccaggaatggtggtgatttgccagggggaaatggaggaacaaccccttctttgactacctctgtagtttatattggattctgcaaagtcccatgaggactgatagatgggctgtgtctgcatttgaattttgtagctgaaatgtgggtgagttcacctaggtccccttcatgacaaggtggtgagaaacattttcttgttctacaaatctgaattaggtccacgaaagagggtatgcagcatagagaggaaccaaaaaggacgcaagatttaggatagatattgccccttgggaggcctgcctggtctgcccttgataactcatgaacagtctggtaatgctggaaggcaaagtaaaagccaacctcttgagaaagacat

SEQ ID NO: 84173 - DNA, 1967 bp, Homo sapiens
agccagccaaaaaaagaaaatggaagtgttcaagaaactgccttttttcatgtaatagtatttctgtgtcactaaatccttcaacagcattatttttaatagctgcccaatgtcctaatggatgggtgagtcatgatttacttaaccaatcccctgttgttggacatacaggttattcacagcttttctctattgtaagtggaattgcaatgaatgtttttgtagtacacaccagtgagtgattccttggtgcgcttggaagtgctggttccaagaataagataaggctttgagattaattgccaaattgctttcttgaaatattgaggctactattttccagtatcttcactaggaataagtaacgtttttctaaagctgagtagtaagagaaaggtagaatctaattttactgtgcattttcttgattattagtgaagctaaacattattttttattgatgtgttaacaatttctttcttttgcaaatgatctattaatgttctgtgactgatttctatcttggtgtctttacgtttgtgaatggtaagaatttttatgtgttcaggaactatttaaatgttcaagacattaacctgtggttatgtatatcacaggtacagtcacatcgcttaacaagggagatacattctgaaaaatgtattgtcggaattctgtcattgcatgaagatcatagagtgtatttacacgagcctagatggatagcctactacacatccaggctatatggtatagcctcttcctccagggctatgaacctgtatagtatattactgtaatgaatagtgtaagcagttgtaatacaatgggacatatttgtgcatctaaacacacctaaacatagaaaaggtacagtgaaaatatggtattataatctgatgggatcggcattgtgtacatagttcgttattgactgaaatgttggtatgaggtgtatgactatgttttctcatgacctctgctttttttgtctttaagtttttaatttttgttttacttttgtcttttaattttaattctattgcaaccaaatctatcagcctgtcttctatgatctctgcttttaattgttacgctttaaaaatccttctccatggtaacattatattgactcatatgtcttactggttgaacgtgcctatgtttgactttgaaatcattaaattcattgaggatttgttttgccatgaggaattgggtaaggatccagctgattttctccagatgagtagttcattgtcccaacaccagttattgcaataagttattccttccccaggaaatatacctgggctaattaagaaaactgtgcttcaatgtaattattccaccttaatgcatgaaatattaggttaacatggaaaaaacatggcatcccatgttttagtattttttccttatttccaagcagcacctctctttgaattatattctgttctctgtttttataatttgactcccttctattctacatctaaatagtgcattgtctgttttcactcaggactttaaaaatagttctagtactaattgtatttttattctaatactgctattccttttactggtacttctgcatcttaaaaaaacaaaacaaaacaacgaaaacttggcatgttggctcacttggtgaatgaaagcatatactgttcagttgtttattcttcagcaacatctgagtatcctcgagaaatgagtggaatgaaccgctagagatgaatagccttaagccctcaaagctgagccctttggggtaacttgctctaattctgccctctccagtttgagtttaggttaaattcagcttgcagattgcaccaagcctgatgcctcccagccatcaaggaaaagggtacctaacattttgaatctccattaatcttacagctcagatcctgtgtattaaatctcagcattttcagggatgtatactctggcagaaaaac

SEQ ID NO: 84174 - DNA, 1033 bp, Homo sapiens
aaaaagaaattactttggacacaaagaggtgtttcttttgacacagcaggcatgtgaaaaaataagcaaaaaaacaagagggatttctgttaccattggcatgtgcttctcttttacttctttagttcacaatgccagtggttcagcttcccgttctgatcctcactgctctaatctcttcatctgtgcttgcaatcacagccacgcgggctcgcaatattaccacgaaatcattttatctgttggaatctctttcctgttcattactcttttttatccccaggtagacaaacaccctaagtttacctcttgcgaattgtacgctttaaggttaaggaattcgtagttgaataagaatgacttttcacataaatttaatggagttttatcttctgagccaaggctttatttaaggagtcttgggaggtaatcatgtgttacctgagactctccgcccataggatgtagttcctttccattggaacacatggggaccgagggaataaagaatgttttcatctctgaaaatatctctcattcttccaatcaatgctgctcttttcttgcatactgtatactgggaagcatttgtttcgatttgtggttaaatgtatgtgtccactggacttcagtatccaccctttgaaggaccgcaggagaagttgttcaggtagaaacatacaagggccggatgcggtggctcacacctgtaatcccagcactttgggaggcctaggcgggtggatcacttgaggcctggagtttgagaccagcctggctaacatggtgaaaccctgtctctactaaaaatacaaaaattagccaggtgcggtggcgcaaacctgtaatcccagctacttgggaggctgaggcaggagaatcgcttgaactcgggaggcggaggttgcagtgagtcgagtcgtgtcagtgcactccagcctgggtgacagagcgaaactctgtctcaaaaaacaaacaaaaagaaacataccgggagatctggttctattgaaccccagtgcagccatgggta

SEQ ID NO: 84175 - DNA, 1157 bp, Homo sapiens
cccatcttgatttcaatgtcttttttgaggaggccttcccattgcacttctcttcaagtttgcccagatagtaagttctactagacatgtcaattttttctgaggtctaatcttgattttttttttcctgcacaatatggaattcagtgtttttatttaatcattcagtaagtcttgactgcctgctatggaggttaagccctttactaagttccaaggatgtacctgtgaataaggcaagttcctttttatcattgtctttgcagtctattaggggctacacaatttaaacagagaatatatataaaatggtagaaagtacaagtaagtataccttattttttttaaaaaaatgaatgtggtatttcacccacagcctcaagaatcactttccttaaaattgccagagtaggaaaacttacaattgaagaatttcaggtatttatgggaaaaatagtattagggcaattgcggtcaaacacattcgtctgttcgttcaattacagcagtaaggatggaagtctaaagagagtttctacgtgatcttatttatcctgcatttataaatacacaaattcttgtacaattaactcagtttttcactcctttcttgcttgcaacttgtcaggtcgttccctccccagtagttgtgaacttctttatgctagcttcttccatcaggggctcacaaccagggactgtagaggtttgcagaggtaaatcttggtagataaggattttatgaaaagggagctcactgttggtgaaaaatccttgtttctacagattttgggtcaagataagaaaaattaacttttaaaatctgaggaatttggagattatctccaggggctgaatatatttttatgggagaaataaaatggatagttttaaacttgaatttagtttttcctaatggaggcccttttgaagatcaaatgggatctgtaaaaactctttgaaaaatgtagactgcttcttatgtgattcttactggtctattatttatcaagaaattaaaaaggaatgaatatctgtagctgtttttctttttctttcttttcttttctttttttttaagatggagtctcgctctgtcaccgggctggagtgcagtggtgctatttcggctaactgcaatctctgcctcctgggtt

SEQ ID NO: 84176 - DNA, 1519 bp, Homo sapiens
gcagttactaattcctgtggaatgaagtaggcgggcccgaaatgtacagcccttatccagtgaattctcataggagcaaaaaaaagtgttttctttcccccttggagttctgtttcttcttaaaattagctatttctcatacacaatagggacatattcataaaaaagggaaaatactccaaagttgaaaaaaagattgaaaaagaaaatcctccaatatatatctactcttagcattttggcacatattcttacagtagtttcaaatgcccaggccattttgttttattttgttttgttacaattgtggcatatgtactcgtgatggatttgcttgttatctctaaattaattctcctcctgcaattcaaatattccagagatatgtatatttttaacacattgttaattatcccatatggataatagtttcttttctctcttaacattttaaaagcatgcctccaggttgttctagacggtcctgaacagtgctttgaatggggacatgttagtaaaccaatgagaggaaccacggtttagttcatcattctccttctaactgtatttttaggttgtcactaactcttttcagtcgtcatttccatggccacgaacatctttggttctaaagcatttttcccatttaaaattatttctatgggattgatttgccagaagtagaatttctaggtcaaaggtacaaacgcttgagaagtcctgatacatattaacttgggccagaaatctaccatgtaattgagagcaccttgagcttggcttcagagccaggatgaggacaggaataagtgggccttttgatttgaaatgttgagatacgaatgtattctagatgggccaaataaccagcttattttattttaaagtcgagtgaattttctgcctcactaatgtgcatgtcttcaaagacaagtagtgggaacggagtggggatttgtcatcccatagaatgccaccacatggaatcggtcctgaggcttctgaaagcagttccaaatttgaatgtttcctaagttagttcttgcggtacagcgcagacaatattcttcctcgacaatagctgagacccaagtgcctgggcgcttccaggtcataattaacctcttcaaaataagagcaaagaaaggcaggaaaaggtcctctccattccagaaaggagaacaaagagggggaattctaaccctcttgccacctctgttctcgtccgttccatattaagaagcattcaaagactaggatgccattttgcaaacgtctcattctccctgaatggtaaggctccacgctttagcacaagtggtacaaatctgccttccctcattcttttttgcagatcatcccgctccccacccctttctttatcatggctcatttggagcatctgtgcattttttaaaggctggattttctttctgttgccattgaaacattgcatttgtacaggagaactacttaatggcacagtttgttattacatggaattaaatacaacctattt

SEQ ID NO: 84177 - DNA, 1081 bp, Homo sapiens
ggcgtctctcagcttctcctctctttcccatccaactgagcagcaccaataaatagataagaaacctgaaggtctacatcaaatcagcttctattgctgcaaaactcttctagctaacttcattctaaaagctgtctgaaatatatttacttacacccgagaagattcaaaaacattaccgctgaaccccgatgctttgggaacacatggtgtccttggccacttccttgcttgttaccttgtccaacagctgattggcatagtacagatgtagacatcaagtaattctatcgttaaaggattagtcagcctctccctactccccacccacttatctcagtaaggtttagtcaagaagttggaaattaatggggaaggaaggttttgggttatgtgtggatttcatttatccatgctatctcttccctccattagcatggttaattaagagttgtcaatacatctttgttggagtatttgattattttttcaacagggaagattagaatgaagtcttcagatctggcaagtgtcatgggacttgtaaagtaaattgcaggttaagccctcattttgatctctgggatgagagcaagcaccgtttcattgacatgtcatcagctatgatctgagggagcacacagaggtgccctttggggaaagaggggcatcttgcacttgtctcccacattgaaagggtttattgcacagtgagtgtgtgcaagtgaacaaatagcagatgggttagaatggacagaagctagctctgagcacctcctgatttatgctttatttaaaaaaaatcatatgtatgtatatgtgcatacacatacattgttttgtatatatttgtcagatggaggtgtgtgtaaacaaataacagaaatgagttaaaattgacaagttagcttggtaaacatcttgatttataatttattaaaaactacgtgggtatgtatatacatacagacacacacacttcttcaccacctgaacaaaaatcccttttgaatcatccttcttgccttccaaacaagtacactagcaaacacttttcccagatggcaaatgactatgcccg

SEQ ID NO: 84178 - DNA, 1056 bp, Homo sapiens
acaggggcagagcatgggctgaacaccagacctgtctcacactaaaggtgaaacaatttcccctgcatcaaactgtctctgatatgaagggtctacacactgtggtttgaaggtcagatgtggcctgtcatgtttttgtacagcccgagagctaagaatggtttttacatttgtaattgtttgggggaaaaaaccaatagaataatgttttattacatgtaaaaattgtatgaaattcaaatttcagtgttcataactaaattttaaaaacttttattgaaattccagagagatctgaagtagttttattggaacacagccctacacaccttcatttataagctatctgtggctacttttgcactatgccagcaaagttgagtagttgggatggagactatatggcccataaagcctaaaatactctctgctcctttccagaaagcttggcaacccctactatcatctccacgtctgcctttgttcttcttatttgtcccttccctctgaaggcaggatagcatagggtgaccataagactctctggaactagcctgcttgagtctagtcttggctctgtgctgactacctgtagggatgtaggtgagcttttttatttttctcaacctcagattcctcatcaaatggaagaaataatgagtatccactaccttgggttgtatggaatgaaccaagttaacttagctaaactcatcgcttccaacatcgcctcctatgtaataagtgcttgataaatgcaagttctattcttctattctctctctctctctctctctctctctctctctctctgtctccctctctccccctctctctcatagtgatatggtttggctgtgtccccatccaaatctcaacttgaattgcatctcccagaattcccatgtgttgtgggagggacccaaggtgaggtaactgaatcatgggccccagtctttcccatgctattctcatgatagtgaataagtctcacaagatctgatgggtttatcagagggttttgcttttgcttcttcctcattttctcttgccacc

SEQ ID NO: 84179 - DNA, 1051 bp, Homo sapiens
tatttgatgttaagcctcaaaatcatcaaattttttttacggcactgaaaaaaatacataaatctgcttgattggttcatagaaaaagacccctgtgattaaggtaatgctagtttttgcattttctcctagctgtcattggttggacacagtgatcctcgggtctcttgtgttttcacatgtcttgggaacagaagtgctggcagctttggtttcaggccatctttccaaggaacgttgtctagcaaagaaacttgcaaggtacagatagtgtctccctcaggagcagaggacaggatggctttctttccagtataataaagacagtgcctccttccaggacaacggtttggcagatttgcttgataaaggttggggtttctaagcttggggctcctcagccatgactgaaacgtactatgagcacggcatctaccgggctgttccacatcctccctgtgggactaggggccagggcaatgggaatcagtgcagaaataaagctcatgctgtttgctctgccatgagtaacgaagtcctctgtatctgatcctgggtctcctgttttctgctagcttcctcaaaacttggtagctaactcattaacttacaaggaagagggtgaacgtgtagacccttcacagtttgaaaaatcacctgatcaataactgagattatgaaaaggtaggaatgaaccaattatggcccaaaggctaactccagccagtagccttttatttatgacccgttaaaaaaaacaaaaatgaacaaaaaatccaaagaaggctgtgtgccagagacgatacgtggcccgaagatgaaggtacttaactatctggcccttcacagagaaaatgtgtcaaccctttcctgtttgcgttcaggtcaaatagttgcattgaaaggcctcatcttacaaatgaatcaatatttagtggtttgaaaatatgttgtttaatttggggcgattcaatatcaaattaagatttttaggtttatttatcgatctttagaattacatcaacattaagctaattactttaaattgtgt

SEQ ID NO: 84180 - DNA, 1064 bp, Homo sapiens
ttatgcagggcatagcactagtgtaatgctgggcagagagtgagcatccagcaagtggttttgacaatgataataattataacccaagcgacacatacaatttaatcaggcactgtgtgtccacagcgatgtcaaggaacaatgcacaaagcagagtttttccagtctcctgatgtttgagccctgcgcgagccccactcttctcccttttctcataactgctgtgagcaacctcaaatccttctggaagtaggttggttatgaattatgaataattaaagaaataaactctggctctgcagctgaaattgggatcgcatggagaaaatagaaagtccagtgtttgtagctgtgatctctcagttgcttgcatgaattgtgctttaagattgtaaaattttagcccattaaaaataaaatctgttgctttccacccacacctggcaatttggtgagggacgggggctaggatatttactgtctgaaagttttagggaggcttttatgaactgggccatctctccttgtccccatttttctttgcatctccgaactctcattaatttttcacaggcttgtgatggatagtttttatttattcacgtctgagattccgttgtgtgaaaaggactcattttataacattacatattcatggcttgggatggatgggataaggaacttattattaatgtgtcactgtgggaaacttactctagttcatttgcgaaccttgttaaattcggtgtggtcagcagacccggtgaagttttggatacattctcttaacagagggcaaagagtttgctgttgcttttccttgattcagtaaaacaagtttaaatcttatttaaatcgtttgaagtagcaatttgaaaggggaggaaaaaaagggggatggcagagattaagtagagagagaagctccgattttcttgttgaatagccgtgtttcctcagcattctgtagatttttggccaggtttgtgtaagggatgaacgactctctataaaatgatgtcaggatcctttctttcctgcccattgccatttctagcattctc

SEQ ID NO: 84181 - DNA, 1056 bp, Homo sapiens
cctcctctttccaatattgctggcttctacttgttctataagagccatgttctacaagttctgtattgtgtgtgagtccctctcaacaaaacaatttccctagtcatctcttatttatactccttgatgcagatttccattttactcttacctcattctatcataattatctatttgtgtgtgtatgtatgtccccactaggctgtgaggtctgtaaaaggatagtctaaatacagctatctattgcaaatcttataatgtgactccatgatgagatagttggatatagccttatgttcccagcaggaaggaagaaaggaaaggagggagggaggtaagggtgagagagagacaagaaaggaaaggaggaaggaaggatgggaaggagggaagaagagagtttggtcaacatttgttgattgtgaatgaacaaactaatgaacactaaatgaacaaatgaatgaatgaatggacaaatgaatgaatgtatgagtgggtcaagaacaagattcggccccaaggagatacgcgactttctactttgttttctatttggatttcacacaaaggctctaaggtctcctggtaggccatgctcagaagtctgggttgtcccctgcccaggacaggctcaccctggcctgtgtcctaggtattgtggggccgctgtaggaggatggtggttaaatcttggaggaaatccaggagtctcatgtccccttggcttctgtcagaaccagtacctctcatttattttgaggtcttggctgaagatgtatcatctacaaccctgcagatcagatgtgttagagcagagagagtggcgaggattaatctagactgaaatgtgctaatcaagctgtctcagatgccattttctggatagggaggaacagcagttggcgagtttaagagcaatatggaggaaccactggggattctatgcatgatcttaggggaagtagcattattatctccaacactggctgtttacattatcagaataagaatggttctccaaggccaggtgtggtggctcacgcctgtaatcctagc

SEQ ID NO: 84182 - DNA, 1035 bp, Homo sapiens
taccacgtatgacttggaagccctcatccccatcactttgagttgtccttcctttatggaccaaaccaatgtactccttacatatattgatagaagtgtgcctgtaacttttttcccctaaagtgtataaaatcaaggtgtaacccagccaccttgggcacacgttcccaggaccccttgagactgtcttaggctttgttcactcttgtttgggtcgggaataaacttctttaaatattttagagtttcactctttcaatcaacgtacgtgactacccagaattaaactggaatgctgttaataagagaaatgaaaggatgatgggagatgtgcacccagcagtgtctgtcttgtggtcctgaagtctaactctaatcctggctccactacctggaccatgacaggttgtttaattgttctagttagagtgttctcctatgtaaatagggataataattggatgtatggcaggatttgggggaggattaaattaggttatatgcgtgaagttcgtagagccagggtctgggcattaatacgcatttagttactgtcgctcctgtgatctgcacaattattgtcattatcttcccttcctcctccttccccctccttccccctctctttttccttttctttctatcatcatccatagctctcttgccccattgttttaaacccatctgtttttgttgctggtaactgtatccaaaagtaatacagaattttccgtaagaacatttattgtgtttccttctacccacgaattttcttatgctacacacacaacccactgaaatttcacctctattgtatgtggcttttctagaaacgtgtgcttctgggctttgtctcacacctcctggccagtgtttggcatgtgctcacacatgcacgcacacacagcctgcactatgtttgttgactgaatgaattaatatttcacagaataacaaacacatgctgattatactccttgggaagctaatttgttttcagctctgagagcaaggccaaatcaccagattgatgcc

SEQ ID NO: 84183 - DNA, 1024 bp, Homo sapiens
tctgttgactctgtccagagagtaagcgactcagcaggtgtgcctccccatgggcccccttcacggtgtcctcaccttgatttattagagcattttattcccccaacagtgtttatgacatccaaggacttggtggaaccatgaggaaatgagagtggacagtgagactactatcattcattttcactccccgtaaacatcttctgtttctgttttagaagacattgctaatcccctcatgcactggctttgcgaatttctttttcagcctgggtttgaaagcaaagtggtagtgactttttcctgatagctgctgaaaaggttccacagtatttggaccgctgcctgcttctaccctggagcacaaaagatccaggcgtagaaattggttctaacaatatccttttagagaacaccaaggggatgtgagtcactttccctttgatttaaaggcactgcgtccctcaaattcagagttagagggtgacatgtagttgatctttacttcccgggggcagaggaccataattaaatggctgtggaaacccagaagcagcctacagaaactcttaggagccctccgtctgggaggaatttttttttttttttttggtatatctgtgtttacagttctagaaaagtgttggttttgagggcaatggagacaggaatgaggagaaaatgtataaaggagaggttgctgtgagccgagattgcgtcactgcacttcagcctgggcgacaagagcgcaattctgtcaaaaataatattattctgttgtttcctaattgttgatttgtggtccatatatttggttccttaactaaattggagttcttaaaacaaatgttaagaacacaacatttaggcacacagtacttggattccagtagctttggataaattaataaaatccttccattttctcagttgtagaatgggaatagtacccaccttataggcttgctgtggggagtaagtgggataataaatgttaagtgcttttagctgtactgtacataca

SEQ ID NO: 84184 - DNA, 1069 bp, Homo sapiens
acatcacaggccctccctgtcagtggctgtcgtctgttagtgtttccagcacagctctaaagagcgacgcttggaggctggggagagggggatggagaggcatatgattctgttgacatttagtgacatgcgctcttcccaaccaaacagatgcaaatggattttagttgtgagtggttgtttaacacctgcataagtgacagacctgcagagacaggttgtggatggaacgcaaattcaaatcagtgcatgagaacagcagctaaagtggacagacccaaatgttttgcctaaatatttggctcctagttgtacaaaaagccaaatggtttcaatttcatcctatataaaccagatgattgtgtatttacttctcacttgccctgccagggggatggttggtggggggaagacaaggacaaacaattcgaaagagcaaatgagccaaaatccatctggattttgttaatgctgattatatagtttcttctgttgtttttaatgtcttccaagccttctgtgtattagccagcattaaggggaaaaaatgacattttgactttgactccctttgtaatgtaatgcattgttatgtatttctgaagtttttcttaaggaaatagtatatgataataatgactagcactcactgagtgttcgtgatcgccaggatcaggccaaaggttttcacgcttgtgcctttttaaacttctcaacaacccagtgagatagatgttattagcccaatttaaggatggggaaagtggggattcacagatgaagtaacttgcccctagcatcgtacagtcagtgagtgtgagaggtacaattcaaacccaggtagacctgaattaaatcttctgaagcaactcttcatcaccaggtgtggctacctccaatgattactttgtttttatgattatcaacaaagttactctgtggagcaggggcaggcaaacattttctgtaagggagagacagtattttatgctttgcagtacagtcttttgcaactgttccactttgtcaccacagcacaggagcagccatggacgctacgtaagaaaat

SEQ ID NO: 84185 - DNA, 1022 bp, Homo sapiens
gcagtggtagaatcatagctcactgcagcctcaaactctttggctccagtgattctcccacctcaacctcccaagtagctgggactacaggcgtgtaccaccatgaccagctaatcttttagtttttgtagagacaagttcttgctatgttgcccacagtaacatagtaagtctcaaattcctggcctcaagcgatcctccagccttgtcctcccaaagtactggattacaggcatgagtcactgcctggtgctttctttttgtctttttctaataaccattgctatagatggttgtccttaacgcgtaaatgtttaaaatacctaaatgcctaaacgtttgaaaacattccttaaaaattgaagttatagcatactaacaagtgttcatttttataattgctgatttaacttaataaaaaccaataactataaatatccttaatgccactgaattgttcacttaaagtggttaaaatgataaattttgttacgtatattttaccacaaattaaagaaaattaatatttccaacaagccaaagctctatgtaaatgtcctaaattaatgtgtttaaagagaaaatttcaccagtgataattttttttttttttcccctgagaaagtcttgctctgttgccaggctatagtgcactggcgtgatctcagctcactacaatctctgcctcctgggttcaagcaattctcctgcctcagcctcccgagtaggtgagactacaggcgcatgccaccaccgccagctaatttttgtatttttagtggagacgaggtttcaccgtgttggccgggatgctctcgatcttttgacctcgtgatccgcccgccttggcctcccatagtgctgggattataggcgtgaaccaccgtgcccggcagggagtaacatttctatgcaactatatgtgggtgtatttttctgaacatgtcagtgaagtttaaatattcatctcacttctttcagtcaccctcaaaggggaatttaatttacgacttcatttgtac

SEQ ID NO: 84186 - DNA, 1051 bp, Homo sapiens
tttatatagaaaaagttgccttatcaaccattataatcatggtatttagtgagtgtaatctgttctgatgtaatacttagtttaactggtaaaaaatattttgacagaatttaagattagttctttttgctttgtccgtcaatgtgaaataatcagtatatcatatttatagaattctgctaaaacatgcatatatacataaacagatattcatcttaattgatgttaattgagatataggagtacttcattaagtctccagaatacatacttcataagcaggaggcatatatgtttgtatatatgtatgtacatagacttgatacacatgaaataaaatttcaaatggttcctctgttcagcaaacgtgacccaaagttttggcttatttggcgttttgttttcttgaagacatacttgaattttaaatagttaatccatttaagaagtttcatttaaggtactgttaaaaagaaaaaacacagaacaacacagtgagagcagaaaaggtatcatctcctccccctcttcttctcttttagaaaccttgcgtgatccactgatggtaaatatttcatgtactttgcatatcagcctgagttccttttgtgaagtcaggtaaatggaatgtaaatcccctcgtcctccagacagtaaaacggcattatttgatgttacatcgcataaagatgcagatttgattccccctttactcacactataaaaacaaagtttttaaagtggttagccatacctggaaatgtaaatgcattcgcctaatgtaatgccaaagaaaaattaagacaaatgataccacatcgctgccacaaactgcggctcgtacaaaattcactttagttattatgctgtgaatacgggctctcaccctcctccgtgaatgcacaatttatgttgaatgcaacatgaatcattttaatagaccaagcaaaaagtccccaaagtcgattttcaaattatgaaccttggaacagaatataacaacagcgaacaacaaatagttcagactttactctgagctatgagtgaacca

SEQ ID NO: 84187 - DNA, 1048 bp, Homo sapiens
attaccattattattcctatcaccagcatgtattccacctgttgatagagttttctgggtttactaagccagggtgttgcctttgggatcgaggtccgtcagaatccattggtataaacgagtctttctgcttttgtactttctataaaggagttgtctttgatttttgatgcaggtttaatggagatatttcagaacctggatggcagcttttgaaattaagatattgtccattgcatctttccatgatcgaggcgttgtcgtgcattcccctccttacagcgttttaggatgcagattgagaggagataacgttagcccgaagcgcctttgcagcctcttttgcgcggctgaaacacagcacaacccacccccccgccccaccccccagcctgtaggtttagcagaatcccagcctcacatcctccccgaacttggcagtaaaagccctgttcttccattcattccgatgatttatattctctctgggcgtcttatattaaacaggggaattccgacatgttccataacacatttactgtaacttgataccatgaactacacttgctgttatttatcatttctttttattttctctcattgcagcataaagccaaggtagaagcaatgaccctggacctcgctctgctccgtagcgtgcagcattttgctgaagcattcaaggccaagaatgtgtgagtgttccagtggagggttatagatcataatttcttgctattgtaatatctttatcagatgaacacaattgggagaatgcaaggctgttgtgttgtcttggcgtccaaacaggaggctcatttatattggccctgttaaggtgaaccgtattttcttgactcacagtcaccttcattatgagatgtgtcatcaatctaataacagcttcccacataccaaaagagaagacactattaaagcactagtaaaagtggctaataaaagcttggcaatagtaagatgcatcctgattataagattttttgtagtgcatttcagaatggagtaagagtatatttaaattgcattc

SEQ ID NO: 84188 - DNA, 1136 bp, Homo sapiens
catgcctcatcctccagagtagctgggattacaggtgcaggttaccacacacagctaatttttgtattttctgtagagatgaggtttcaccatgttggccaggctagtcaactcctgacctcaagtgatctctccaccttggcctcccaaactgctggaattacaggcgtgagccaccctgcccgaccctttcattttaaatgtgatagaaacagactcagagaatgtgagtgactttcgcagggtcacttagcaggttggtgacgggcatggggtttcactccagtctgcctcttgttcttttcctcatagcatgtgagatctcacaattcactgccgctgaataactttgtccagttcctctgtcagaatgtgttggaagtgagcagctttgctgaagagagccaactgttacataataggatcatcttccacgtcttaactggaccattagtttttaaccattaagtagttgggaaatcatcaagttcaagtgccttttgtaatcaccaagctcaaaaccttggaggaaactctcacccattttgccctaatcccagattttagcacaggactttggaattttagaaagtacttctaggttgagaaacaagggtgattttccatatagagacctctgtagcacaaccctctttgtatgtgtcccatgagagtacaggattttacatggcttagagaaatactgtggtggtgaaaatatgcataaaaaagcgagagattttacttttgaaatgctgccaaagtgaaatctctcttggataggcagatgacagtttagtacttgcaggtctttcgattctgacaactgtcagaagtgaatttaagtgctggtgactaggctgccagagaaacacatgtaactctattcttatcaccccccatcttcagacattaaaattttcttgtgtgtaaaacataatgacaaatgaaagaaaggctgccagttcagaaccaatctcttttcacgctgttgcattgaggagaggaaaaaatcccttaaatttgaattccatgtggatgctcttatttaatatgccgtttcaaagcctgtatgtgatcaagccagagtattatcaggctctgagttcctgtgtgtattcccttggtccatgctc

SEQ ID NO: 84189 - DNA, 1047 bp, Homo sapiens
ctactagaaatcctagctagggaaattgggcaaaaaacaaaaaagcaaaagaatggaaaaaaaagatccagattgaaaagaagtaaaactatctttatttgcaaatgaaatcaccttatctgtagaaaatcctagaaaggtacttaaaaaatattaaaatgaacaggttcagccaggataaaagtaggataaaagtttaatatgcgtaagtcaattgtatttctatatactagcaatgaaggcatcccatgttcatgtatcagaagatttaatattgtatagctgaccaaactctgcaaattgtgtacaaatttagtgcaatctctattaaaatttcagttgacttttttacagaaattgaaaagctgatcctacattttgtatatgaatgcaaaggaacctgaataaccaaaacaagcttgaaaaagaagagtgttggagggcttccatttctcaatttcaaaactttctataaatccttagtaataaagacagtgtcatattggcataagaatagatctatagataataaaatagacttgagagtccagaaatgaatccatgcatattgtgaattgattttcagcaaggatgccaagacaattcaaaatagtcttttcaacagtgatgctagaaccactggatagccccatgcaaaagaatgagattagatcacacttgcataaactacacagcaaaaaatagcaaaaaaaaaaaaaaaaaaaaaaaaagggtcagagacttaaatgtaagagctaaaactatacaactcttagaagcaaacataggggtatatttttctgattttggcttagacaatgatttcttggatacaaccctgacagcacaagtgacaaaagaaaaaaagatatccagaatgatccagaatgaaaagtgtttgtgctgcaaatgataccatcacgaaagtgtacagatgacctacagaatgggggaaatacttacaaattaaatattaaataagggatttgtatctagaataaagaacttttacaattcaataatgaaaactcatttaaaaaatgagca

SEQ ID NO: 84190 - DNA, 1031 bp, Homo sapiens
tttcacaagtatacaattactttctgagaatttagctttttgattcacgtgaaagccttacttgtattgttaacaattttgttacgtttgtgaggcctaggcagaaggattgcttgagaccaggaactcaagaccaccttgaccaccttgggcaacatagggggagcccatctctacaaaaataaaaaataagaaataaaatagccatgcatggtggtgtgcccctgtagtcccagttactcgggaggctaaggtggaaggatcgtctgagcctgggagtttgagactgcagtgagttatgaccacaccactgcactccagcctggatgacagagaaagatcttgtcaaaaaaaaaaaaaaaattaaatatatacaaaataagggagaatactatgacaggcttccacttacctatctttaggcttctttataaaatgttcatttaatctgatctctataagaaattctgtatccttaaacaacatgtgcccttctctttacacagagcgattacccccttgctatgttttattaacagctagcaagtgctgggtcctgtgtcagttgttttgttttttctttttctttgtttttcttttcttttcttttcttttttttttttgttttttttttttttggagatagagtcttgctctgttggtcaggctggagtgcagtggcatgatcttagctcactgcaacctctgcctcctgggttcaagtgattctccggcctcagcctcctgagtaactgggattacagacatataccaccacacctggctaattttttttgtgttttgacagagatggggtttcaccatgttggtcaggctggtctcaaactcctgacctaaaatggtccacctgccttggcctcccaaagtgctgggattacaggcgtgagcccccgcgcctggccctgtgtcagcctttttaacagcataatttttcctttattagtcataactactttaagggctattttgatttacagacaaagtgagacttggatgaattaagaaagaat

SEQ ID NO: 84191 - DNA, 1014 bp, Homo sapiens
ctcagagtcccatcggtgggtttgaattgcatatttgttcacttatcccctttctcataccagctaatattcccccaaggctctcattctgaaaataattttcattagtcctgcttgagacatgtgggtggactcagcttggctcacttaatttttccaggtcttttttgttcgcctgtgattgtgggggactgtttagaaggactttctagagcaaggaagattgtttttacgactatacttcaagctcctcattgattttgcttagagatggaataataattgatgaaatctgaatggcatgacctttattgatttgtaattcaacaacttcaacatcttaccaagaagaatgtgcagttattctagcaggagaaacaatgcaattagagcctgcgagatgaaatcaaattgttttataatgagaaattagggaattcgaggcagacattagctgtgtaattgtggaaagggaagaactgtagttagagcatattagaaatctggccgtgcctcttttggttaaaatttcaattaaaacatcagatggcacttttttcctattgccattaggagaatattcaattgactgaaaaggacatttgaaaatttcctcgtattttcagcatatttgtttctagagttggagaaacaactatttgtctagagagaagtactctgaaaagacaaaggccttgctgggtgaggctggatttaatacatgttagggagatttctctttcacgtttgcttggtgtgtgtttggcggggggaacttacactcttagcaaagtagctagaaaaaaaaataacgtgcaaggggcctattttttcctccttcttctccgtcttaagtcctgaaatgttttagtgacccagaatgaagcttatttttttaatcatacttccataaaatgtaacccctgggacttggaagagagagaccagccaagggttagcttgaaccctttatcactcccaaacacaggggcttatggtataagtgacacactg

SEQ ID NO: 84192 - DNA, 1035 bp, Homo sapiens
tactccaacattcatcgcagctggtgggtgtacacactgctgtttaccttggcgaggcctttcaccaagtccatggtaagagaacagcttctggcgccgcaaacaccttgggtcctagagaaacctgcacacttgtgtctccacctttttacctcttgcgggcatgagtctggtctcagtaataacattgtccagcccatcataaagggctcttgaacacattttcatcaactttaggttaagtctgtttgggtaaatgcgtcttggagggctgggtagaagatgtgggtttcagtatcatgttaagtatggctgaaagtccttatggaaatggtgatttttttgtttgtttggttttgttttttttggggttttttattcagaaactttgaaaatctattttgttgaatggagcacttgaaaactgctgttttgtgtcagtaggtaaacaacaaacattggtgactactgaattttcagcagatgtgattcctttgtttcacagaaaaactgtatcttttgttctaaatttttttcttctaatgggtataatcctctgttggagagtcctttgatagctaggagtgtgttttcttctttactttcccaaagacaattttggatgaatcatggtactgtggttacatttggaagtgtttacaaaggtgataagatgtttttatagtttggtgttcatttatcgaccatattaagaaccttcttctatgaaatggttttagtaggaagtattttgaatgaagaaagcgtattttccacaatatatttggtagattatttttcaaaaccaaaggacttcaaaaatgtcttcctattagtggacaccagtattccagttacccaaacttaaaatctacttgacagaaatcacccttttcccaaacacatttgccttttagcgatatcacaggccttcacagttggacctaggatattaataaaacaaagcaaaacaacaacaaaagaagaactattgcaggcctattatcctccagctgatctcacgaccttggaaac

SEQ ID NO: 84193 - DNA, 2602 bp, Homo sapiens
ttgcacctgcacgcattaatgtgtattgtttggtaagaactttcgagttggtgaaaaaatgtattgtattttagtatctatatttatatatacatattagtctatgggttttaattcacaaaaccaggtgttgtatctggtgcacataagggattttcaaggctaatcttgggtttttgcagttgtaaccatgtgtgatgactttagaatcctaccacacttccaaatagagatgcagattgaccattttcccagataccacgatgctttatgtatcagcatatattttcattaatttctcataatttctgttagaattaataattccaagttctacaatcttagaattattatctttattttgtaattgaaaagcacagaaacctcatgcagcgtgttcaagaaaatgatataccagccttgtaaactttcacttgctaattgcagctgcatttgctttgtccaatgcacggtaatgcccctggcatccatatctagttatgcagttatgcttcctttttaaaatgtttgacagcaccttcactgaaatgaatgctgccaccaccgccaaccccaccttttttttttccacataagctttcatttctggtaaatacatccttgccagagttcccaggtccaagccggtcctttgtggaccagtatgcagatttgaagttgagcactgtcacttgcctcttaggagtgttttgtgcaaccacatatttgtgttggcagataacagtagaaagaatatcatgtgttagggtagcaagagcttagcagatgttttagggaactgcattttcaaatcattttacattaaaaaatggcttacgtttatggaacttctgcgacgatcgggttacgtttcctgtgcccgtgtaaagccagtcatcgtgctgagttttaacggatgtgcagctaccctgctaatggatgggccggcaatgctggtcctgttgcaaagttataaattataactagaaaaagcacaagatgtcattcttctaaccttcgtgaaagccaaacggggtaattctgcccttgaataacccgctgcagggtgatttatagttgtacaatttaaaacgtaatgaaggagataatagatgttgatttgttcctgaaattagtattttagaaaaatacttctccccctttccatctttaaatacctgcagctgactacactatagatactatcaagggcaaagccccctgtttgaatgtgtattggtacattggtgtatcacatacaaggcagagggtgtataaaacaggctttctgttgcgagggggaaatatggttttcaaagtggaaatttcattgtattcttcatgaatctaaacattttgagactcctgagtgaggtttgaattttctggttgcctttctcttgccagtccagatatgttagaaaactggactctcaggacccctctgtggttggaccacactggcgctttcctgcagttgtctgtcaacagaaggacctggtagctggcttgtcctcttacaccactgaggccaccttcttgcaggaagaaacatacttcttcctgccctggattaacattaccattggttttagtagtcttacgtcattatgtccaaagcttttaagtttacagtgcttgcttagtccagtgaccaatggatgtaagtaagttggaaaagggcaaaggatttagaatcatgagggttgtattcaaactgcagcctctactcccttttagttacataattttgaaatcatttgacatttctgaggttaattttctacatcagtttagctgctttaggccgcaagttattaacacccacttaaaggtggctgaaataatagaggttttgcttcccatgtatccagagttgctgaggcagcaagggttgtgtttggctactatatgagtagctcctttgtgataatctttacttttccctcatgcttacaagatggcttctgtggtgccagccattgcatcctatttgataaggtctgaaggcacagatgggagggatgaggctcctcattgcatgcctttttcctttatcaagagacagagcattctgcttcagaactgtcctcctgagttgacttcccgtcagatcccactggttgggactgagtcatctgtttgtatcctagttataaaggagactagaaaagtgcataactggctttttgagcctctagagtggcaggcgaactctgattttgaggaaaaaggatagggtaatggtgttgacacaggcactgttgaatacgtatgtacatattttaatagttttctcattaatcaaatggaaatgctatcgattttataggatcgttgtgagaagaagtgagaattgaaatgaaaggcatctagtcttccccggtccccatccacttgacccaccatacctcaagccacttctggctccatgctctttctttccttagggttttgaaacatgttcttcagcctagaatactcctcctccactcttaatttctacccatcctgcaaaactcagtctgaacagcacacgtcaaggaagcagttttggtctctcagattatatgaagctctccaatatgttctttcagaacag

SEQ ID NO: 84194 - DNA, 1046 bp, Homo sapiens
ggtgactcgtgtctattgtcccagctacttgggaggctgagacatgaaaatcacatgaacctgggaggtggaggttgcagtgagctgacatcgcatcactgcactccagcctgggtgacagagtgagactgaaaaacaaaaaaacaaaaaaaaacccaaaactatatgtgcaagcctcaggaaccactaagacagattacacaatgctcatcagaactcagcaggcttccacagtgcagattttaagccctccagttgcctgttttactggcaccaagaacacaccttagcttggaggaaacattggccactttcttgttaaaaacaaagagagggaaactagatctgcctttgtgaggctggagcacctcatcaatgtattttttctgccttgctttatagtgttttaaatccgcctcggcctttgttcctgaatgagcacccgagaaggggagaaagtgactatctggccttagtatgtgtaacaaattatttaatgaacatttaaccaagatttgcaattcccctagttttatcttcccggtttccttttcttctgtgtgcccgttggcattttggtaatgtgctgcctctttataactctttgtagctcttttattacttttcttttttcttttaagtttgtggtgccttctttgatcctcccctctttcagtttccttttctccaatttcatacttatttccagtgatttttggctgcaacgcagtttagatattggaggccagcgtgattaaaccgaggccaagagtttgtattgccccatgacgatgtttctggaatgtttcttctgtgaacagtgatttttgtataactcactggacatgttgatttttccctgtgaggtgtaaggtaatgttttcctagcaaaaacaaagagggctgaaacctggtgctcagaatcgtttggaaacggaactcctctccctcttctttttacaccaagataaagaaatactttgcaaatcagctgagcacatgttcccagctccgtgccgggctctgtggtcatgggtttccttctt

SEQ ID NO: 84195 - DNA, 1027 bp, Homo sapiens
ccacttgcaagcccacgtgcttgctggtaggactcagttccttatggcccagtggattgaaggcttcctttcctgcctggtgtttggttccttgccacgtagggatctccatcatggctgctggctttatcgaagcatgtaagccaagaaggaaatagaatccattggtaaaatgaaagtcacagttctttgtaatgtaaccacggaagtgacgtcttactgcttttgccatattctttttgttagaaggaaatcactgagtctgatcgttgttaaaggggaaaggatttcacagtggtatgaatcctgagaggcaggggtgatcagggccagctaccacactctacaacttgaattttgttttagatttcagtgccttttggggaccctgctacattgtggtagatttactcacaggacttgatgatttttcttgacctgcctgaagccatagcatttattacggataagtttgtcttttcttcgttctttttctgtttgcatcctttcgtcatccttttcttccctctttctggactgagagaggcaccaaatgcacccatttaaaacatatatgcatttctgctttctgatgggaggtaagatttagtcatttaataagaaagcttatgaaaagaataaacaaactggtagataatgtatcctaaagtcaagtatttgctttcatgttgctttagtagaaggggcccttgttaatcgatggcccaaattgtctttctcaagaaatgtgtattgcagaatttggatttgagttacaaaaactagccagaaagcgtgaactttttttttttttaagccataaagcttggtaaggctagccaatcatttcaaagcctgtgtagaatatctagactatatgtaatcctaggatttgttgttgttttgttatgattttttttaagcaggaagctaaaaaaaataaccacccgttactttgctgcttttagaaaataggtttgagattgattttgaatactaaagtatagttttcatgttataaagccaa

SEQ ID NO: 84196 - DNA, 1191 bp, Homo sapiens
ccacccacagcctctgttggccccaggttgtgtctgagattcagaggttgtttttatagcagcaacacagtaagttgggaagagggacacatttttaacatagacaccaaaagagaggctggaagagttgaccacttagaaatgtcacgagtgtctgtgaatagtgttgggggctgagaggcaagagaagaaaatagtcctaatgttgtacaagtagcaatggaaacaaacttgttaaaaaaaatttaattttgtttatgcatgtgtgcataaacaaagcaatagaaaatatttgatatttaagattgagcacttaacaaaatactttgtctctttttggtttgctgtcttaagcaatagccttaaattcttgtcccagggatacctgatagagctaatatagaacaatattttaacataatttgaagtatttttttcttctgatgggtatgtagttcatttttataaaaaaatttaaaaattctgaatctgtggtgtttctgaaacatcctgatatattttttgttgatgactcttaacaaaggatgtaagacagattctaagaagagaaaaggtagaatatccacatgtctcagtttcataatatgtgtaaaaattatcatgcccattcattatttaaagtgctgtggctttttagtgaataccaacattaacaaaccatgttaacatgatttaaaatatgtaatgaaatttgcaatgcatcagatgatggaactatcaaattagttcacgtggcgttggctgatcacccttatgaagagttacttgcattgtttgaagagggaagatgcacatccccttgtgggctggcagcatttttgctaacactgccttaaatgatgctactggcaggatggttaatttgatgttgaaatgtcacacaatatgtgcccaccctacgatttgaatcttctgtgccgttaagggaattggcagtgttcagacagaatggtaacattctctctgatcgtgtctgtgtctgcacccttttttgttttgtttctgttgtcttcattaatagacctttcaggaaccttcctgggatctcagataacagttcttctggaacaggattatccagaggtagcaaaagctctcctgcaaatattccattgcacgactttaaataaagcagcaagaagtcttttcattcagttcagatttgctact

SEQ ID NO: 84197 - DNA, 1035 bp, Homo sapiens
gtcttgacctcccaggctcaagcaatcctctggcctcagcctcccaagtagctgggactattggcaatgccaccatgttcggctaatgtttttaattttttatagagacaaggtttccctatgttgcccaggctggtctggaactcctgtgctcaagccatcctcccacctcagtctcacaaagtgctgggattacaggtacaagccaccatgtcaggccattggtataccattgtttttcttaaacatttatttattttcttatatttacagcatatgtggtcatttaaaattattttatagcatataaaagtaaaaagaatataaattaattttttagcattaatattagggaagataatctgacatttaaaaatacatgtctatatgtgtatacatacatagaagtatatatataaataccagtactagtgtctgctaataggtggcgccactttttatctgtgtgtgttgggggtggaattagcatgtagaggttggcaaaggggacaggagactgtgggatgattagtatattcttatttggcctgggagggaaaaaaaatctttcatttccaacaatattcattctctgtgtcacctcagcatttaatttacttccgtcacaaaactacttgaagttgtcccaggctagttggtcctattaattacaacctagagggattctattagtaaactaatggattacagtacctaaatggaagccagcagatgactttggaaggactgatccgcaagggccttctgtgtgaagattaaatgaagcttcctttagccttctcaggtggccacagtttcccataaccttagagattatctaggccaaggctattaatttagagattaagaagccaaacccagaaaggttgaaagactgtcgtaagttcacactgaaagagagtggtgtaatgcccttttcaccaggctccaagaaatttgcctattttatgttttaacggacatggtatccccagcatttttaataaatgcccttttcttgcataagtaactgga

SEQ ID NO: 84198 - DNA, 4094 bp, Homo sapiens
ttggggaaaatataactgtaacttggctttcattagagtagaaagagataaagctttgcttaattaatgtctgttttccctctgttcagaagtataaggaaaaaggggactgaaattagtgctgataaaagcttgaattagacattatagcactgaaacttctttttcttccttacttagaatttggaagaacatacttcatacaaagctatgaagcatattggaagattttaggtgccctgtcttcctggatataaaatgactccaaactcagtgatactgatcagcctggcttcttttccacctttctcacttcattgtctttttgtgtgtttctgacatctgttgacaaatgggcaatcttggggatggggggttccactggtatattttctttactgtttaagaaagctcaaaattctctctgctcttttccaagccaccaatcaaaactgacattttctaagtgtcctcattgccctctgggaatgttcatggcctctgggagtccaagaactacctttacactggatcttcactgcttttactattgtgtggctttctaccagttctctgctcagcttctcttttctggagacctgatatgctttgttagcttagcatgctgttctaggctgcctttcttttttttttttttttttaaacttcatggtgagcagaacactgtactccagactgtgaggccccacctgtgcagcctgctggcttctcataccagcttccttctcaccttaaccccacgtattgttgcaacggcaaaaaagagaattgcacagaggaacaccacctatcagagttcacactgagtttgcagattcatccttttgcttccagccatcccatggaatgctgttcttggaagggtcatctcatggtccattgtcggccctcttagaagagatttcaggccttcccttgtagcttgatagttacagggagtgctagggtaagtggaaaaagcacatgacttggaataaagacttagtacacatcccatgtctgatttatactaactagttcatggacctagcctacgttactgcacctgtttgagcctcagttttcctgtctgcaaaggagggatgatggtacttacctcaaagaattgtagttggatcaaatgagttggagtgggatacagcaacaatctatattctgatttcagcaacactgtgcagtgtaattccatattatattacaccacatcttctgtgggtctttctttgggggaagctaacattttaaaaggtttccctttgtaacctgtaaccccctctaccccaaaagtatattcaagagcgaaacttttggtatgacgatgtcttacatcagtagttctgaatgacttgacttagctatctttcttgagtctctcaaaagacagatggatggatagattgattttgttgtaacacctgttcagttttgctggccttactcgttttcaaatactcaaatgccattgagtcagatttcagaggcaaatggtgatacctcaggtttgaagttgcaagaagtcaccacatgcttgttatggaaatcgtcagggatatttattccctctcctgagaagcataattgagcctccaaaccacccatcaagatatccacctgtaaaatatttaagaactggtactatgaagacatttcccttatgcaatttgttttccatctaagagcagaacaaggaaaatatagctgactataagttacaaaggcagactcttaagctacaaaatacatctcttcacaggagcacttggagaagggctgaaggcaaaccaaaagtgagcaacaaggagactagtgttctgaaacagagatgacaggctccgcagtgagggtgatgatggtgttacgaattacccattcagtttaaactagacattccctggaagcatgtcatggggtgtgcagaagggcttttggataaaaggggtctagttaagagatgttaaaaaaacaaacttgaaaagcatagcaggctgccaggacatgtctgagtaccgcgcagatagtggggaatagtctatggattctgcttacaccatggacaaccaggctgggccatgggttgtgttttttttcctctcattttatagaaatgttaccaggcatattttccctgtttccctaagaagagcttcctctcagtgctagccagccacagggccaagtgacacctagaggtgatcctttggttatttgctaaacagatctaagacaaaccgatatctgtaacctgggattagatagagccaataagatgtaactgaaattctcagggattctaagacatctacattgtatgttggtacgttattgaaggtgatgctagctgctataacaaataagcacgcctgtgcacagttgctcaaagatagtagaagtttatttcttgtttatgtaagatccataatgactcttgccaattagcaggctgctctcttccaagtggtaacccagggactcaagctcttttcatcttgtggctcagccgtctgacacatgtggcttccagcactgccctgctgttgtctgcacaaagctggtggaagaagtaggaatttgcaggaccatgtgtggagcattttaaggatgaggcctgggagtggcacaaatctttgaactccaggaggctaggaaacagagcataaccttgtgcccaggaagatgcggggcatagtacatctttgcctcacctgatgtattgtttgtttaaaatcactttggattctcatttaccttttccccctcaagatctttgtttttgactttggagataaccagaaataactaagcatgcttccttccctctacgatttcatcctcatggggaagcaagaccccactcttttattttcatgtatgtatatatgtatgtatgcatgtatgtatgtatgtttgagacagaatcttgctctgtcgcccaggctggagtgcaatggcaccatcttgacttactgaaacctcctcctcctggattcaagccattctcctgcctcagcctcccaagtagctgggattacaggcacgccaccacacctggctaatttttgtatttttagtagagatgggggtttcaccatgtgggccaggctggtcttgaactcctgacctcaggtgattgacctacctcggcctcccaaagtgctgggattacagtcatgagtcaccatgcccgaccagcaagaccccactgctattgtccagtgtggtaggtacctttgcctaccttctactctacaggctggaacaggtgatattgtgcctacttcacagccttcctagcaactgaggatggctgtatgacagattctagccatcaagtaaaatcagaaaccaacagcacgtttccttgaataccttttgctttctataaaatggtgtggcattgctggtattttcactcttccttcctaccctggatgctgatttgatgcttccagccttagcggttttcttgcttctaggactgaacagggaagagggaaaagtcaaaagaatgacagaaggtcctcacgttgcagaacactgaccaatgttggcaactacaagacaatcaggcgtgattcttcatccaggatctgcttttccctgtcctgccaattcttgagctgctaataaacattctgatgcaaacatggaatacagatttcagagggattctgggtagccctcggagatgaggatgctttgcgaatgtaacaggcatctctcacctcatttgtctggtggaatgtttacaaatgctaattaagttttgcttcaaatggggaacagtcctgtgcagtgtttctaggaagttaccagcttcatcataggaagacgttctccatcgtttggatctttttcaccagcaccttttgattgtggtggtttgggatgtgatgatctcagaactttacatcctccatgaaatctctgcagcgatagttgaatgtcttgccttttctattattgccctttttcttctgtgactttgtactgagacacatttatattagggtaatggcctcatgctatttgaaaatctttatttgggccacattggttggaagataaaaatatat

SEQ ID NO: 84199 - DNA, 1876 bp, Homo sapiens
ttcttacctgaaggagaaagcctgcaccccatattttttacctcccattctccacttcaactcttccccagcctctgcgaaccgctagtctgctcttcatctccatgcgtttgtatattctggacatttctcattaatgggctcacacgatatgtggttctttgtgagtggtcctttcactttgcatgcatcatgttttcaagatactgcacctaatttttcagttccttgttttttcttacaaatacatttttcaaaatgagtaaacatatgtacaaaaatatttaatttatttaggcacgccaggtttatgagattcatctttgtagccaccaagagccactaacagtgctaacatagccaggcattctaaatgtgtttgtcaggtgcataaatctgtgactgataaaaccactgctcattacttggttcttaaactctccctcaatatagctgtagggacatgcaaaacaaaggctggctcattaataggatatgtctagagttctgctttagaaatcataatgtggacatcattgatttctctgatgctggaagctgctgctgcttcttcatctttatcttctcctccctgtgtattgagagcagggacctccttgtgctgttttgggctctccttgttcacccagattggctgcatcagcaccttcttaaaatattagtgttgctgagataggagcttttggtagatggataaactgggatttgtaaatattttgcttagtttttttcccagagttttgcagaagagaataaggtgttggtttgttataaggtggtcctttataaagtttagacctattttaataaggctgacttgggttgaagataactagagccatgactttcatcttgatggacaatgagtactcactctacttttttagtttatatttttattttagttcatttcatttaagacagcgtctgttacccaggctggagtgcagtgacatgatctcggctcactgcaacctacaccttctgggttcaagtgattctgatgtctcagcctccccagtagctgggattacaggcatgtgccaccacaccggctaattttatgcatttttagtagagacgcgtttcaccatgttagccaggctggtcttgaactcctgaattcaaatgatctgcccacctcaacctcccaaaatgctgcgattacattttaaaactctaccttttaaaaattagaacctggacaaagaggtattaaagaatgtgtctcttattaatttattatggtaatgagaagagtttggatttggacctacctaggtttttctttcctccagctccgccaccccaactccttactcatgcttcctctgtaaaatgatcactccccagtttgacaggaattgcccctggaatcccatctggtgttctaattgttaccaaatccaggcaaatcttgcctgtgatacaggtggtgaagctactggatagaactggagcatctaactggtgtgagatggtatctcattgtggttttgatttgcatttctctgatggccagtgatgatgagcattgtttcatgtgtctgttggctgcataaatgtcttcttttgagaagtgtctgatcatatccttcgcccacttgggtggatgaagctggaaaccatcattctcagcaaactgttgcaaggacaaaaaaccaaacaccgcatgttctcactcataggtgggaattgaacaatgagaacagttggacacaggaaggggaacatcacacaccggggcctgttgtggggtgcggggaggggagagggatagcattaggagatatacctaatgtaaatgacgagttaatgggtgcagcacaccaacacagcacatgtctacatatgt

SEQ ID NO: 84200 - DNA, 1706 bp, Homo sapiens
ccacgtgtgactattaaaatgtaaattaattaaaattaaaagttcaattgctctgaaatagcagccacatttcaaatcttcagtagccagatgtggttattggctaccatattgggtagcaccgatatagaacatttctaccatagtagaatgctcttttggatacatctgctttaaagcattagtccccaaagtgtgaaggatgaaccacttgggttccgagaggaaacattataacttctgtttatccattaaactctttcatttattattaaacatctcaacacatttattgggtggcaggtactgttttaagtgttttgcatatatttacatgtactgtcctttcaaatattctttgaaataggactattgttgtccatatttcacagatgaggaaagagatgtgctaagaaaagaggtggcagagtagggattccagctcagtagccactttcagggtcccgtacttttcaatgtaagcatattggctctcaatttaaaaatgttattttttacagatagtacacagatgcactgacacaggtaccctctccagtcctctgatggtcaggaattgtgtgcagtatgcagtacattccaaagtcaggctggccatttccccagggagagggtccatgttggaacctttgctccttgtggactttagctttgaaatgtattgtagttttgcatgtgtgcttagttggatggattgagacatcagattatgtggtctgaactaaagcaaccgtcacagaatgaacaagagacttacaaacatttgtgcaaaaagatcagtgtttggatatagttcttagaatagcaaatagtaagaaaagagcaggattggtacttcacctactcctaataaaagcccttcatcttgtgcaaagtaaacacaatcacagtttgatcagaagtggtcaatggaaaaacaaaaatctaaattagcaaagagaaatttgaaattgcatgcattatttttaaagatgaacattgctttaacctataccattcctggaggtagtagctaatagaatgatccaagtttataatttgtaaataagtagacatcttttgaggcgtatgcccttaatttttctaactgatgaaagcgtacttccatcaactcaagacagttcaaagcagcttggagcctcttggattttaaaaagactctgtggcctctgtctctcttggttttcagtgctcagctgaggtctactctgtttatcctctgcctactagaaggatatcctttcaatagaggtgaaaatcctgaaataaaaggtttcataaatggggaaaaaagtcattgattgaaagagtcatggcatagatgctgaagttttgatgggaactttgcaggatgttcgtttgtttatcattagccctgggagagtcatccctcacctcccaccaccccttaatttaaagggatttaaaatattttcaagtacatcctgatatcagcacgtggtacactgagcctagttgatggaattgtgaaaaaaaaaaagaatgttttcccaacaatttggctgtatttgccagaactgtttcaagaatgctatgacttttgctcagggcaagggaagtgtgtgtgtgtgtgtgtgtgtgtgtgtgtgtgtgtgtgtgcgcgcgcctgcatgtgtactgtggatgtgataagagctgtgtttgtgaaaactgtgaagacataa

SEQ ID NO: 84201 - DNA, 2500 bp, Homo sapiens
cttcaggtgatctgactgccttggcctccgaaagtgctgggatgacaggcgtgagctgccttgcctagccaaataactccattatttaagaaaaattaaccagtatttattgaatacttactgggccctgtgctaagtgctttgcatgtgatttctaatttcctgaccattctatgaagtggctactataattatcctgatttcccaggcagagaaactgaggcttagagagttgaagtaatcaactgggtgttaaaaagctggtaagtggcagagcacttattggcgctaagactgtttctcaggaccttgttgtacgagagtcaacgataagacgcagaacgtatgtttcatttttcttgggaaggatctatctcactcatctgccttcctgtgtctagcaagagggccaggcacataaaatacacatggtacaatctgttaaaaggcatgaaaaagaaacagtcattcatatctgttcgtagaagtgggcgtcaagattttggggcactgagatctatgcatgttgtgggcccactttaagaaaaggagtcaaacatttagtgtggaatactggaaggggtccctagacatgaagggcctcttcaacctaccttttgttggcttcaaggttatgccatattttgcaaagtcaagttggagatggctctcgatatgcatgagtgtgttagactgcttttcttctattttttaaaaatgcacccaaatgtaaaagatacttttacctttttgatttgatgttgaaggtcatttgaaaaatactctgtctttattctttgaaatggatttactctcaagaaagttgcatgtcactttacttggaagagacgggtctcagtgaggtgtgcctccgctttcatgaaaagtctcccgtctgcagaagcattggctgacatggaagattttttttttttttaatacttttctttttgccggcatctgcgtagaatttttttttttttttttggtagtttcttaatggtctttagcaaaggaagtaagtgacactgatcggtgaaggcagacagtaagatttataatgtatttgtgctagctgattgccaacagaaccggcctttcccagtggtgctgtacgcagactcggaaaatcaatagggattaacctttgacccccttcacatacttatactgtgggctgcatcgcttaccaatatttcatctgtttcacttagctgctgttacttactcaataatgtgtggccaatctcacaagatactaattctttttttcaaatgcagcatcgcttgaagctgtgataaaatatcacacctttggaaatcaaggctcttcttgtttatttatttaactcacattaattagccttaatttaaaaaaaatgagaagagccagcatcatgatgcaagcattgactttgctcacaaaaacatcttgtggtcaacagtggggcttagggggcaggttttgtggctgtgacagaacacgtggcccctagtgtgtctgttgaaagatgggcccctttcaggaaaatggcttaccttactttttagacataatttttgttttctgttaaagggtcagttatagataagtatgctcccttgcaatgaaatgaacccactttatcaattttgaaggaatcaaaattaacttgaatacattgtctttttgcatatgtatgtagtgctttgtataaacatatgaatttgtaggagctgctcttaatgattattactgcataggctggaatagaagcaaaatttgcagtaatacttttgtacctttctctttaggccttggcatatattaaagtactatacatttgtcttaaaaattgaaattgtagattattttcatctaagacccttttgttcacagatttttttttccaagtatacctattccccagagtttacttacagtttgctattgatccagcagctggtatttgaattggtcgatatactctgtaacttgtttaagataccctacctgagctattagtttaaataatgtattcataaattgattaatcattacagtaagacttattagctgcatttatatctgcgtgttatccacaattgacttatagtctaataatcacgtatacttaagcagaagttgggttttacgttacaatttaataattatcaaggtggcaaacggtagtatttgtgtgtagaagttgagtggatgtggggctttaaaggcaggagtctctaagcaggttgctaattttacttttcctagataaaataattctctctcccaaaatgaaatacaggaagtggaccaaattgtgtcagcctgaaagaagtgattgagtttgcggaagctgtcctgaagtcgaggttctggaagatgggtggggtggggggaagcgaatgtgaagtgccattgcatttgtctccatttctgtcccagttacatcaaggctgggaggaggtctttccactggttttccgggctgtttgtgtactacacagcctgtgtacc

SEQ ID NO: 84202 - DNA, 4804 bp, Homo sapiens
acctttttaatatagcttattgaatcatacatttatctactttaatacttaataatgagtgtgcccaacaactaggtcttaaagttcctgatagtttagcagtgtgctctcttaagccagtcggacctggttgttgtacactactgggtgtgtttaattgacttccagttttgttttgttttgttttgttttgttttgttttgaaacagtctcactctgtcgcccaggctggagtgtagtggtgtgatctccgctcactgcagcctctgcctcctgggtttaaggaattctctgccttagcctcccgcgtagctgggattacaggtgcatgccaccatgcccagctgatttttgtattttcagttgagataagggtttactgtcttggccaggctggtcttgaactcctgacttcgtgatccactcgcctcggcctcccaaagtgctgggattacaggcatgagccaccgcccccgaccattgtctgtcaggtttaaattgcaccttgggttcgggtgaagttgatgatctattcctaatgcaggctcattcctaacagggcatccctgcacaattttccgctggggtgtgatgagctgcttcgcatcctgctaagtgtcctcgacagcgagcagacacatgtaccctgcttggtacatgccagatgattctgttgtagtgatattaaggacaacagtattttgccagaagctataacgagatgattctataacaacagcatggtgacatcagactatgttttgcaattttctttaatatttatgctggataaataatttatcttttttctcagttttttttcccttttctttttttttctccccatcttgaacatgttgctgtagacaggtgctaggtttccctgaatgactaaagcagagatttggttattttcctcccagaaaaagtagatgcatcagcagagttgagcccctgggcattatttccccaattccgtatcccatctactaatacaaactaatgagatctattaaggatgagtccacaagtttgaagggagtctcttactaatgttccgtctttgcatggtgttacaacagcgggaccattttacactgagggtttgcgagaggcatggctcccctgttatgtatttgggacttactgcagatgcttcctctggttcagggtgttgaggcttcgtgctgttaatattggaaggtgggtcatttgtactgggcatctgtcctgtatcttggagatgtttagtaacatccctgacctctagccattagataccatctctcccagtagggataataaaaacatgtctccagatgttggcaaatgtctggccttctggggagtaaaatggcccctggttggaaactagtgttccagagctacattcttagctgcttactgcatcattgtttttagccctccttttctctggcttccaggaaccaccaatcccccaacactaggatagggcataaggcaaccttatgtcaccaaattaatgtccgcctaggcaagctggactgcagaaagaaaagcagtatttctaccctaggatcattatcccaccttccccaagcttcgaaagaggtacaggagtcctcagaaatggggcttctaaaataagtggaactgggacctcttctctctcaggctgttacttgttgtggttccagcctattttctgagctgtggagcagggagggatctcacaggaaacttggtaatgtagattttggaggacttgaaaggttcctgctacctttggctggggatggagggaacatggaagatgggtctttgtttagaggaagctctttatcctggtacgctggaagttggcatagtcttagcagttagtccagatgtgaatttcaggattattctgtgagtcttccaagtcctgtctcagcagtgaaataggctcagtgtagcttatgtctaggtggctgagttcattttctagtctaggtaaagggcacctcctgtaattgaattgtgtaaaacctgcacagtggtacacctgagcccttttttaggacccaagagtgctgagattggctcttcctgagattccctctttaaggataagactttctgatttttcaactggatttaccattgtggcatctgcacatgagcagactgactgctttttggccctacctggagcctgggtcctcaggtagctgacccgagagaccgtggagctgcttgtgatatacaatgtcagtgctctgagctcattaggcgtcatctgagacagtggctgtaggggaggggaggtaggctctgagtcaagcagacctggaattttctttatgggccattaggaactgtgtgacgctggggcatctgacttcacctttctgagtcttagtttccttacctgttgaataggtctaatgatatcattatggcagatcagtgggacgattgagtcaaataacatgcccaatgcctgtttctcagagtaggctttcagtgggccacatctgttgtcactattattttgttctttctgccatttgggatgtgctttctgataatggcactaggctgccttgttgcctcctgcatgtagaacacagaacttcgcagtctctgcagagtgtctaaatcctgctctgggccagccctttcagaaacacttcaggagatcaatagttatctgcttacctttctagctgagatgagattttatgcttgttactagcagatcaatagtgaaagcaggttctgttaagttttttataggagtcattaatctccctcagcctcagtttccctatctgtgaagtgagtctaaccaggatgataatgaagagttaggtcaagtgaggttggcagccagacacccaccaccagctgtaacataagaacagatgttctctccagacccccaggtcagctgaggtcgctctgcttggaataatgaactgccacattgaggatttttttcctctctttacttggccaaatatccgagtgtggaagctctcactgtgaacctgctaacatacatttcagtgtctacaaaatgtcttttgagagaaaacagcagggacattcgtgagctcttttttttttctaaccactttcccagtgagacttcagttttcattctccccttagcagctttcaaatatgtacgtaacacaaatgttacatgtttgagcatttaaactgaatttggacagggcttctatttccagaaccttctaactctatttctttgtgacctgatagtcttgctctccagggtaaaagaagaggatggaaatggctgtggggcgcctgagctgggccctggcatgatggcaagatgccgttctgggttcactgggatggctcaaggggagtttggaaaccctcctaacatgtcatctgaaatctgggaccacagttccggctggaacacttgtcactaaagctgctgataagcaaagggtgtatcactggtatgggtaacagttgtgggaggaggaggggtctgacagatagccggatgattttaatgtttatattccactggggtaagctctaacaaagacccatcatttcccagataaccaattcttttaaaagaacatctgttgaaactggcaatttacattcttcttaaaatacggagcgacataattaaccctctggggagactaatattagtttattagagacaatttctagttctgtttatttttaacactaaacgatttgttcagattggggaaaaaattttttttttttttttggttgtggtggcgttggcttttacttggggttgacctttccttatcaaggacgtacaaggtgaatagctgggtgataatatatggtcccatgatcatcaaccaagcaccaacggaagccttttggaagtgcacagtattgtttaacacacaaataactcagcgtttagtaactttcaggtacaatcagtctattttaaagggacctcatgtgttattcatgtatgtgcacatgtgtttatgcagttacctttgtcttcattgatttggactcctttggtgctcgtaattggtgaaattctcttgtgatcattgttgtagttcccgcaaatctatttacggttttcacaaggaggtcacgaacatgcgttgttttcaatgctgggctagtttcagacttctggcttgttgtgggacggaggagaaagaagacagggcattttgatgtggcccagagaccaaatgaaacaaacgatcctctgattgctcagatgtcctctttgacttggaaagcacccacgtgaatgttgaaccatttggccctcagttctccgtcctgcagcaaactgcattgactcctgttttctacacagtggtcttcagctacaccttaccaagcaccccttacccagcaaacgtggcttctcttccccaggcagagcagtccgttacttagactaggaaatggctccgagaagctcacccatcaccatttgctctactgcaaaacaggactcattagcaggagctcataaaatgaaactggcagtgagctcatatggaagaggcatcacgggcaactcggcttggctcaccagcccctgagctgcccccgagtgaccgctccagccttctttccttccacctctccctcttggccaacttcatgcttcagccaaagtgaactgagctcaccaggctgagtcatctgtgccagctgtgccctctccccgaggctgcctgccatgctcgtgctttcttgtctattggcaaaaggctctccatccttcaaaatccagctcttggcctcatatcttccacaaagcctt

SEQ ID NO: 84203 - DNA, 1061 bp, Homo sapiens
tcctggacctgacactcactctttaaccataagcagaagacacatacacaaatgtcctatgttaagaatctttatttaagacaggtggctagcattatttgggtccagaagcttccctggaaagaaaggattcactgcaagatcgacaggcttacccagttcatttaggcgtggcttgatttatgcacacaaagctttgggaacatatcagtcacatcaagctaggtccacctgtgtgagtaactaacgtgtttatttatgattttctttaacagcacagaagagcaattgcatttggtcattctagtatcaactgagttctttataaaatatctttggggtgtttaaggagaattattctttttacaagttctgattaatgacaccgcaaaaatgaaaataatgagctaatatgtatctagtacttgctatgcacttatatgtatagaagcgtataatccacagcactccttctgaatacgttacgtaaatggaaccctcgcaacagtcttacccccattgtagagatgagaaaactgaggcatacagaagagatggaactaggccaagagcatagaggtggaattgttgtgtgagcctgtagagtccgtgttcttacccactgcatgatgtctgatcatcgtcaattttctttccatttggatagatgaatggtaatacttccctactaggtagagcaatgattccagaagtttataataattggaaagtgtattagtcgattctcacactgctataaagacattcctgagactgggaaatttataaagaagggaggtttagttggctcgtggttctgcagactgtataggcttctgcctctcgggaggcctcaggaaacttacagttatggcagaaggtgaaggggaagcaggtaatgtcttcacatggctggcagtggaggaagagagaaagtagggaggtgctagatgcttttaaacaaacagatctcaggagaactctttcacaagacagcactagggggatggtgattagaaagcacctcatgatcccgtctagttcctgcagagaacagatta

SEQ ID NO: 84204 - DNA, 1835 bp, Homo sapiens
tcccattgtctctggatgctgagaccttgaatttcatgccatggacccctcccttacattccgtctttaatgtgctataaatagacattcctggccttgcctaaataggattaagtagtaccaaatggtccttaccgttctgaggcctcactgagactcattttgaatctttaaagaaagcagtagagggatggagaagaagtgggtcaaaacctggtttctgcctgtgggaaaatacaaaacaacacaacagcaaagcagactagcatggttcaaagcacacattgaggtttttggtgtgccattctaatgcatgagctcattttgagccaaggatagctttttggtgtagaattttgccagtcctacggtcaatgcagtactaattgtgtgtgtgactttgtgcagtggggaaaggtggggctttaaaataaaacagaaggtatgaattgcttggcatttgctgtggttcctaagtctccattccgcttgccaagattaaattgaattattcccgctgccattcagttttactctgcacaaaatacagccaacatttttgcatttctttcttccttcctccttttcttctttccttccttccttcctttttcccttcatctatctttgttccgcttttgtttgtttttttttagatcgctgcatgctgccgcgttgggttaaccatggtagcattttaccatgagaagccatagcaagatgtgccaggtgcatgctgctggaacacctggctgaggctccaacagcattttcctatgactgagggtagggtaggtagatgactcattacaatttataaaatggggggcttagcttgggtatcatcgtggttattccaagcagtcttccagctggactagcttttcgggaacacgtgtgtgtttgtgctggaagccccagtaatatcatttaattcgaaagcttttttctatgatgaattattcaggcagtgtttaccaaaattgtcattgatcagtacagacccagagagcatgtacaacagcgcctgtgctgggcctgctaggagtcgatattttctggctcaaagaagttccaaaagaattcaaagccagtgtgtctctttctctggacggccaagtgatgcaggtaccacgcttaggtctgctggtgtttagcttgacttaaaacccagccagggaaatatgtttcactttgctggggtgcaggtggaggaggctattattcttaggcatttaacagtgaagaatgttgggcagggcagagggtcagctgaatggcagggattccaggtctcagttaatgcccacaaatttctgaactttgaacataaataccctcactgcaatacatgtttttctttctctctctttctttctctttttttttttttgaaaaacttttttggagcagcacctgcatgttgtaaaaacacaaaataaaaaaaaaataaataaaagcagaccccttggttcagatatctttgtttgtgtaaatgttttggcattctttatgaaaatcttcagattttcaagagcttaagatgacctcctctagccggctgcagcagtgtctaggtatctgtgaatgtgtaagaaattgagacagcctgcaaaatagctcacccagcttttctttaaagttccaacctttttgctggctctctttcaaactgtactgctcactttgggctgtacgttagaaccacctgagaagttctttttctttcttttttttttttgagatggagtcttcctctgtcacccaggctggagtgcagtggtgggatcttggctcactgcaacctctgtctcctggcttcacgccattctcct

SEQ ID NO: 84205 - DNA, 2345 bp, Homo sapiens
gcttgggtaatttttgtacttttattagagacagagtttcaccatgttggccaggctggtctcgaactcctgacctgaagtgatccacccacctcagcctcccaaactgctggaatctgagaagttacgtgaaactagcgatgccctgggctaatgaaatcaggctccatggtggggaaggatgttgcggtggggttggggtggcaatgaaaggtgaaaaccactgtggtcccacctgcccatcgtcagatttcggttcctctcagagttaacgtagaaggtttctgggggcatggacctgagtcttatcccctttgcaaaagtaagaattgtatcgtagcctgactcagggttttagccaacttctctggatgctaatgctattctcttctttatacttgtcttccttcccaggcacacatccactggagctttgcagggcctatctgcccttagccctccaatatccttttcattttctttaatagttttattgatatataatgtgcctaccatataattcatctgcttaaggtgtacaattcaatggcttttagtgtattcagagtttgcatccaccatcacaatcagttttagaacattttcattaacccaagaaaatgaccccttagtcatcaccccaaatacctcctctctccagttcctggcaaccactaaccaatctacttgctgtttctatggatttacctattctgcgtacctcatataaatagagtgatatgttagtcgtctcttgtgtctggtttcttcctcttagcatcatgttttgaaagtttatccctgcgacagcatctaccagttcatcatttctttttgtggctaagtaatacgccattgtatggatataccacattttgtgtatccattcattagttcatggattttgtgtctattatgaataatgctgccatgagcatctgtgttgtccacaagtttcagcatggacttctgttttcattccaatatcctttgatgacatgtcttggcagtgatgtctatgacactgggcaagtgtcttaaaatgttgtgcatcagaaaaaagtcatcattgccaaggccagcagatctcgaaaagggggctgggatacgttggtgatttttttcatgctctacttacagtatgactcgtaactgttaatggctgagctcctccttaggtgaagaaggaaggcaatggcgttttctattctgggcctccctgcttccagcgatagcaaggagcgaaatgagatgctgtctaagaaaggaaggtgctgcgatctttgattactacacagcctcggcagtgtttgtatgattaatgagtccatgtttcagacgttcccatttaatgtatttgagccttctaacaacattgcctttcatatgttgctgactgtttttgagatttatgaggcctaactcgcaagcgatgtgtgtctggattaagagaacctgagaatctctatttatgtctgaccccaggaaattccctttaagctgcttatcagaggtgcatgctgagagcatgatgggaagatggagtcttccatccgctggtaaaatctggaatctgctctcatttcattttcactgaactgaaaataaggtaacagaccctcaggtctacctataagtaccttccaactgttccacttttgtaaatttagttcagataatacatatgctgaaattcctatatcccccccatactccagatcttcagtgtggaatttaaatataattccttattgtaaaaaaaaaaaatttttttttgatcaaggtgattttgataaactaaatgcatctttaattttactcacagcaaagcgattctttattttctctctaaaagcataattgatgtgccatgatctttgtctttgcatttttaaaactgaaagaacatttccacaccattagaaataagatttcttcttaaaaatattcacaaggtgcaaacacttacatgtgtatatgcatgatttcaccaccagggggcattgtggtttgactgtccagttaaagagcctgtgttctatcagtttacccagaaactagaaggcctgcgagtatttctgattccttccaagaaggattcatatctggaagagaacagatgtcgactctttttcctctctagcaaacagtagtgttgtcaaatttgctaaacttagccagttgaagattaacatgcaatatataatatgcatgcgactaagtgtacaataaatagtaaatcacatttttatgctttctctgaacttggaagctgcaagttatgttttttttattccctgggtgtgatgaaataaataacattcaaatacatcttaaagatgtca

SEQ ID NO: 84206 - DNA, 1547 bp, Homo sapiens
atttcatactgagttaatacacttgccaagactccgaggcagcttctggcttgacaatgccttctttaactagcctagtttctagaataaagttcgggtccaccaggccctctgagtggggctcaggacactctgagatggaagagactggagaaagccaatctgtttctccctgaaaatcatcttacttttttaacgcttcgtacctagatttggcctgggcagcccagggagactgttcaagcactggatacctagactctgctgggctctagagaagtgctgggctacagcgcccagtgccctacctcttggggccagccagcctcaccaaaaaatcacgcttctggcttgctccaaactcaggaagttgctgggaagtctggctagcaacaccctcattcccagtcctggccatgcctctctgctctccctagcacagggagcatgcaggcttaaggctggaagaaaccccaagcatttggccaggaagaggcaactagttccagctggcccacatactacactttaaaaattacccagatgatctgattctgtagagagagtgggtggagaggactccagggccatggaggaagattcggcctttctctccctaatcatgagcaatgtgatttggagagagaaggacccggttggctctgcaaaccgcatttccttggctgaacgccagaggagagaaatgatccggcaagaagacacaccattccccgtcagccccttcccgacccttgcacccctggatcttctgctgagtatcggattggtctgcgtccaagagctcctcgcttggccagcaggggctgcctggagaaggggaggacaggcttcgagttttttgggtagtgacttctgtggacgtgaaaagactgcaccagaaatcggaggcagccctccaaacataacttggcctcttcgttctccctgtggacacacaggctgtgttctcctggccaagagtccaagcgtgtttttggcgcgtgctgacactctatatcgcttttgcttcggaaacgaatctggtcagtgacttagccactctataaaaatgaagagcagagctcgagtgcttataacacgtcatttttacccaagacagagaagaaaaacgaaagagagcctgagcattcctttgactccctccacccccggaaggtatattcagagtctccaagactgcctccgcccactcacatgtttatggcccggtgagaccgcatcctccctttctatatctgtcccttttctggatgcagggacacagaatcccctaagtgggaagagctttggagtggaggctgttcaaagttctgtggtgattaattattacctacccaaggtctggtcattgctatacttgagttcttttcaggctcaagatctctacctttttgtgtgtttttttttttttttttttttttttttttttttgtacagagtcttgctctgttgtccaggctgtagtgcagtggaacaatctctgtatgctccctgcaacctctggctccaggtttaagtgattctcc

SEQ ID NO: 84207 - DNA, 1114 bp, Homo sapiens
acgtagctaattgctctgcagaacagggttggccagcctggccttgatgtcggagtgttctctagacctcacacccagtccctattcttaggttttatttctcaaaccaggttttgcctgagaaattacagcaaatgattcagagcacaatgatgttgctcatttttgataagtagttgaaagctgatggtgccctccatttcaaagcaacagaagaaacgctggtggtcatggagaaagagttgggaagcagagcgtgaatgccgggatctgcagatctgagcactatgcctgcagccgatgtctctccacagggctgatctggtggctggggtgcccctggtcagaaggggtgattactgtttcctctctctccttggtctctgtcaaacctaccaactcttttcaggaatgcagatatttaattatcttctgctgttacatctgcatcatgtattggctggctgttcaaaagtatcctctctaggcaaataacgagatttcgccagcaggatctcccgttaaaggcgtgcatgtgtggctttgtagacacgtatgtgtgtgtgcgtgcacacctgcctgcccttgcacagtgggcactgtttccagtgtgcagtgaggccctcccttcgtgtagaacaggacaggacaatgacaaagttattcaattaataattgaagcttgccgggcatggtggttcacgcctgtaatcccagccctttgggaggccaaggcaggcagatcacctgaggtcagaaattcaagaccagcctggccaacatggcaaaaccctgtctctactaaaaaatacaaaagttagccgagcgtgatggccagcacctgtagtcctagctacttaggtagctgaggcaggaactcgcttgaacccgggaggcggaggctgcagtgagctgagtttgcaccactgcattccagcattggtgacagagcgagactcagtctcaaaaaaaaaaaaataatataataataataataatcgcacctcaatactccgtagccattttaccgcatgtgactattagctgtgcttttgcggttatctacgtctgttgtgtctatacggtggagtatttgcagacgctctgccagtgt

SEQ ID NO: 84208 - DNA, 1071 bp, Homo sapiens
caatgcaacttgcacttaattttaaaacgctggaaaaataatgataaagattgtgtgatcaagtatagcagccctgtggtgtttcctcagaatggtgtattacagaaaaggaaaaagccatatacatggagaagaaactcccgatatttaatattatcaattgctggttcctgtaaatttgcatttatggatcacattataaaagcaattactcttatggattgttcatgcagaaatgcactatgatgataatatacttttaaaagtatatttatttccagaattcaatttgtaagaggtttgagggaaaaataatactgagttttgagtgtttctgattttaaaaatgtgttgagtagaattaaacgtgttcaccaaaacccattttatcactttaaattattgggcaattaattgtatttacttagcattgaatgcatgattagaaatggaatttttaaaaaagcaatactcaagtggagtgagttcatttgttcattcagcaaataggacttgagtcccctactatgtgcggagccttaaaggatgagaaagatttctgggtgggacttcaatgagactcatttcgcaggttttcatgttattatgtatatgtggtaaataattaattttttcacaagtacttgcactagtgatgctaaaataagcttgactggcttgtaaatcaatgaaggttactgttgcattgctttgaaattgaatttaaaaacagaaacagagcagtccctttgcttccgaatgcagccctcccattggaatcactttggaagaatctggatctgcgtgttacccagtcttacttttcaggcagtcccaggcaggaaggcccattagtgaaaagagccctgcatatgctgtgggtcatcacagctgctgctttgcacatttaggagatatttgtggacctttcattaggacaatttttatggcccgagattaaaagttaaagttaagtagtaaacgtaatgaacatgtgcctttggagattccaactggtttgtattttcattctctccgttggtcatggcccattgaattttgatgatagca

SEQ ID NO: 84209 - DNA, 1047 bp, Homo sapiens
gtaaaaggattctgtgtcaaaactattaatatttgagaaatacaatacttatcagagcctttgtatgtaaatgtctcatatacccctctaagaaggggagcgaatagtattttccaaacttacgtcaccacttaccatccacctgcatactttacacgtcttggaatcaaccttacagggaacacttggtcgaaaaacagtgttttctaaatttatattacagttcccactccccccccccccacttgtatcactttgtatgacagtcttcttgggaacatccattgggaaactcttcccttgcaggtgtctgttacaagtcctggttcacacagtgttgcgaaagaatagttgtatgtcacaattttctttatatagtatttattgagaaacctattctgttaatagaatgactcaaaatcagccaaccccataaatactgctcaagcatttagaaagactttctctatagaggcttcagacgtcagaaaaaaacttagagagtgactttcagatacagcaacctagtctatgttatagaacattctaaaaagagcagattttaatatctttcctcccacacttgctttgactccctcctttagtaattagataattatgtataataagcacattaattatgtgcaacagctgccattgagtgtgtgcatgtacaactgcttgaaaacagcttgtgagttcactattaggtccatgaaatttttctccttggcaggttttcactattagtttgcttgacaaaggatagatacattttccatgtgtggaggtaaaagcagtgcagtgagctaaaaagttagcaaaggtgaagtggtcctaatctgcggccctggtacacttagataggcatcattgcctttcctctgagctcttggtgctgataacagcttccttgaccgataagtgtaccagatttccttacctgtcccagggcaagatagcaagagtttcttgatgcatttaaaaaatgcatttagtgttggcaaaaggctggcaatttattattaagtggaataagcagtttaa

SEQ ID NO: 84210 - DNA, 3011 bp, Homo sapiens
aataatgttactataatttgtctgcctcccttctctcagaaaagaccaatgaattatctattatgtgccactcactatttgagtgctgggaatacagccccataaagtgaagtttcatatatcaggtagcaagatggccatggtctgtgttttgagaatcacaggcgtttttgaggctcatggctataatcccagcacttggggaggccgaggcaggtggatcacctgaagtcaggacatcaagaccagtctggccagtgtggcaaaaccccacctctactaaaaatacaaaaaaaaattagctgaacctggtggttcacgcctgtaattgcagctactcaggaggctgaggcaggagaatcacttgaacccgggaggcggaggttacagtgaaccgagatcgtgtcactgcactccagcctaggcgacagagcgagaccctgtctcagaaacagaaaataaaacaaacaaaaaaatactattccatagctgactattttctgaaatgattttgttacttttctaatgagaaaaaaatagatctcgtgtgtggagggaattgaagatgtaatttcagactctgcgtacagctaagctcatcgtagttacttaactaacacttaaggaattaaatggcatatctgtgtttgagaggcacactgagatgagacaccagctctttttatttatttctaatggtttgcttggtgtactggtcatttccccggaagtgtgcaagaagaggtaggtgacttgcatgttgtctatgaacgtttttagaaacgtctggtggaaccatccgggcatcacatagctatctctgtgcagagccaggccggatgcctaggtgagatggaaagcttccgtcagctttcttgccggcctctcctcgcagccgctcccttccacacctgccttttcacctgccagactgcgcgttgcccgttgccctaggtctgcgtgttcagcacttctgcaacagtttcttctgcaaaggtaacttagcggagggtacagggtcttcttccaataagtcagcaccttcagttaaaaaaagcaataacattctccaatcttggcagtctggcaaggtagaaagacacctgaaggtgaacatctttggcccatgtgaaattttgttacgtgttgttaggtttcatttgtctctcagtcaatcagtcaatcaatcagtctctctccttccatccccccttgtcccccttttctcttctctccccttccctgctccctctctttaaggttttctcacagattaagagagtagcatgtgctcatcccaattattgaaaccgtgcaaatgaatagcaagaaaaatagttcttggcgtgcccctttctttccgcagtgcccaggccagaagtacctgctgcccaagaccacagctgacagcgccccgggagtccttcacactcttctctgagctcttccatccttaaacagacatctatgccaaatgcagggagggtttgctgttggcttttacaagaacactgtcctgttatgcctgctgctctttgcttggttttccctggacggtcacaaacatacctccaggtcaacagttaaagagagaacccacttcttctaatagttgtgtaatattccatactacagatattctgttatttatggtagctagatttctattcatttttaattcccatgctcagagctttccagacatttggaaacattttagaaaattgacatcatctcttcaaatatctgaactcagatttcctctgtgatgttggaatctttaaaatatcatgcatacttggcctgtttctacaattttgttccccagccatcgttctccattttgcacgtgtattgtctcctcctattcctctgtacccttcacacgtgcctgcagggtatatacttttgcacaggcaaaagtccagctgaaatgatccttacttagcataatttaaacgcgagggtttcctaatgctccttccatttaaataattcaaaaatccgtggcaaggtacctgaaaactactaagagaagagaggtgttaatggacacatcattgaggctgaagccaaactgtgtgattctgtctgcagttgagaactgtaagaaaaagatcaagattaacattattattattggtgttacctcatgtctgtacctttttggagacttgggtctgtttcccgagaaatcatttttcctcctccttgaaaatagtgaatttcaagtggttttaattttaactgcattatttgtttgctttatatagtttttaaagttttatgaaaaagtcttccatgtgttttttatttatgaaatcggggcagccatccttcaaatatgaagcaggtatctgagaatactaaaatcttacagtgcattttataggagtgtgaatgatttttctgcaattgacatatcaaggagcttatcatctattattaagttaccttttcctgaaacaaaatatttgtcagatgtaacttggtacccaaatgccttttcttgctaaactaggaactgtcacacacacccacccacccacccctttattcttggttctctcctatattttgacatttgaagcatccacagaaaagtaatagaatgagcaattgaaaatcaccagaactgaaattatttccagctatgtttaaatatgaatgtcttgttcgacgcttcgcatatgtatttatggctgtgtgatatcattatggcatcctaatgaatgtctactgaattatgtgggattcaacaggggatacaaatggatttgaattctgtaactgtcatattgtggtccggagagggtggaaactgaagtatccctctgcgtcgccacatctgtcaaaagtcctcagcgctccccgcaatccatgtctggtggaagcgcgaggtggtgaggatggaaagggcatgcgttgacttcatgttgggacgggtcttaaactaaacacatgtcacgttatggagctgtttaccttggctttgaggtttatttccttct

SEQ ID NO: 84211 - DNA, 1041 bp, Homo sapiens
cggcagtatgtgctctccagtattttcataagagtcacatgaaatatgtacctacagagtctatcactgtgctttttaagttggggcttaatatgtggtagttgttgctgtttttgttattattattattaatgttattttttgtttgtttgttttttgagatggagtcttgctctgtcacccaggctgaagtgcagtggcgtgatctcaactcaccgcagcctccgcctcctgggatcaagtgattctcctgcctcagcctcccgagtagctgggactataggcacctggctaatttttgtattttatattagagatgggatttcaccatgttggccaggttggtcgtgaactcctgacctcaagtgatctgtccgcctcggcctcccaaattgctgggattacagacgtgagtgaccacgcctggcccataaatgttatctttatataacatactcacagctcccttaggagtacttttgtccatttctacacaatggaaacttataattttagccttagcaacatgtatttactgggcatctagatttcatttatttaagaactttttattgaatgccgattgttcagcagccaccatgcaaggtcctggggaaccagtgggcagccacacagagaaggtcccaatggcaccagaacaaggccagcttcctaggaggtgtctggcttcaagacagggatttcctttagctgggtggtagagaaatggattgcctgtgatttcactgtgcataaaatgacctttcagcccttaacctgcgacatccacatgtgttctttggtactcacgggtgttatggttcatagctgtggtcttctgaagtataggaaaaggcagcttacagaaaaaaacttgcttgtttactgtcttctgagctgatttctcacctactggcaagtggataggtctagtttttgtttagctgtttttctaatttaatcttatacatgagacagctatagatggatgtatagtctttgaagtggggccagttggctccgtctattagctgtgtggct

SEQ ID NO: 84212 - DNA, 1097 bp, Homo sapiens
aagagagaccgttatccattttaccatgtgaggagcccacaagcaggtgccatctatgagccagagtggacccttacccaacaccacatctactggcccctttatcttgaacttccagcccccagaactgtgagaaataaatttgttactcataagccacctaagttatactattttgggatcgcagcgtgaatggactaaaggtttttgagattcttttttcagtagtttcacctaataaaacatggaatcattctacgcatgctgttctgtattgtagtatggttttccacactgagaacatactgtgaccatgcagtcatttcccagatggaacttattgagggacattcacttagtttcgaaaggtttctccctccactcccatcccggccacagatagtgatgcaataacatccttgttcgcatgtccagtctgaagcttttattcctatgggatgagttcccaggcataggattgccaggctggactctaaattttgaaaatggatttttatcattctgatggattacggtgaagagagccaaagtcttgatagaaacactcaacgcagtgaattttttagatgtaaaagtggatggtacttaaggatacgcacattagaaggagtaatttgaccagcccatcacagtattaattgattttcatgtctcgaagacttctgatttcgttttcgaggctggaaaggcaggtggaaagcccatcagttttacacacatattttgcagacaagtattagaaagtaactagcctgcttttactaatggttctgtggaagaaacacagcttgaataaatgtcgtcttggatgctcagcacagattggcagtggatgtcaggattgtctggtgggaaggctgctgggactcactctagactgggagtggggtggggtggggcagggcaggacggccctggctgattaataatgtttgttatgaagtctagggtacgtggggagagcttcatgaatccctgcattggccacccctgtaccacggccaatgattcaccctccctaaatcccagggccagatattagaacatctgtgatgaggactgattttctgttcgtg

SEQ ID NO: 84213 - DNA, 1054 bp, Homo sapiens
gtggcgtgctggggtcaggggtgctggtcaccagggcgagcagttatgggtgaagggctgaatttgcagggtcaaggagattgcctccaggccccttctggaaacacactccctgagccttgtagaattgagttgattctgtttaactgcccagtgaagaaatgacttccttgctttaaaacatttgacagctgtcttatataacttaattcttcattccagtggcttttggagcagcctcaaaagtcattttatcttcttggctctttgatattatttgtagtaatttatttaaagtaattagagacgggatcttgctgtgttgcccaggctggtctctaactcctggcctcaagtgatcctcccacctcagcctcccaaagtgctggaaataaggtatgagccaccaagcctagccttgatattattttttaatgggggtgtgtgggtgggtggtgatggggatattccagcagaatatcagaaacagagatgaggaaggcagagagagctcaaagacaaggctcaagttcatattccaacgccagtacctgccacctgtgtgaagctgggctaattatgtgtttaggtttcctccttcgttaaatagagttctacttatattacagggttgtcatgcaagttgatgaattaaatacgctaatatatataaattctgagtaagtattaaccaaagaaatggaacatcaatattggttcccagtctagttcacaggtgttatcaagatggttacctttctaagtgtctttttatttcactagttccaaaagagtatctctcaaaatattaggtagtatttagtcaacactttaacacataacttgtttttttttttggcataagaagcccatgtgaaaacacagttgaccctaagcctatgaaaaatgacttgtgtgtgggactggggtggctcataggagaaggaggatattcgtctggatttttactggtatgtatatatttttgggtactggagatggggacagtgagtatttgaagctcacagcaggcccattttgcaagttttcagga

SEQ ID NO: 84214 - DNA, 1815 bp, Homo sapiens
tctttactaaggcaggttgtagactcatgaaacctagaaggagttgaaaaataagggttaggattaaaaaaaaaaactagtgaaatcaagacaccattttgcttaattgaaggcttgcggaacattaaagcacaacaaaaacctaattctttgagtgtttctgaggccaagccttttcccacaaggcactgtgtacacggttctggaagctctcctctgtttgcacagtagtcactcatcctgctctcgggctctgcctgcagtctcttcctctgtctccgatgtcactcttctctgtcttcttcagaagctgtcatatgacctccagatttctctttgactccctgtattaccattagaagacatctacactgggaaattgctcagttcctgtttttgattaatattttatcagccgcaagaggaaatggtattctatagcaacactaataagtaattgagcagatgagatgctcttgctagctttggtaaaaagtcggggcaaggttacaacagaggagctctgatgagacttgggatgataaagtcaagtcgaatatctggtagggttaaaaatctaacagtgggccaggcgcagtggctcacgcctgtaatcacggcactttgggaggccaaggcaggtggatcactcgaggtcaggagtttgagaccagcctggccaacatggtaaaatcccgtctccactaaaaatacaaaaattagccaggcatggtggcatgtgcctgtaatcccagctacctgggaggctgaggcaggagaattgtttgaagctgggaggcggaggttgcagtgagctgagatcgtgccactgccctccagtctgggtgacagagtgaaacccatcccccaaaaaaataaataaataaaaattaaaaaacctaacactggtacgagaagaaattatgctctaaatccttctttgagcagtggcttacagacctaaatttatcaaaggtggtggcagtaatagtaataattaccatcttcatttaaaggcacgtatctaaaccaaaggacctaaataaaatattaatttttcatagtgtttaatatgtgccagtatatataaattcaaggtaaggtagacagctgtaaactggatcccctgctgtacccagcaaatgctgagagccctgcttcccctcttgtattcaaatggctctataagagaggaagtagtacagctatcagtaacaatgccatccggtaattaccgaatcataaatgtttggggagctgaaggtcacgggcttagtagcaattctagtctgatgtttgattccttgtgaattttaaatgcttgtactctctatctgggtgatggtgttttagttgccagtggacagtctgatggaggtgggggaagagttattcttccatatttatttttctccaccttgggtgaaaaaacttcgcttttcgtaatgtggtacagtgtgtgcttctgtaaatggaaatggtttcagcacatcacagtcatgcttccctgttgaaagatgctccgttttcccgcatacatgatgtccagcacaacgtctgatttatgagagcatgaccctgggggcctctggaacagctgctcacacactccctttaggaggcccaggctctcaggggaggcccatagtgcagctaggagctagagttttaggatgaagaaattacaggtaagaacacagccccattttaagaaataccagtgatttctgtttttccttgttcttctttccctcagtattttattaacatgtgctactatacaaatacacaattcacttaggactctgtttcgtg

SEQ ID NO: 84215 - DNA, 1790 bp, Homo sapiens
ttccctgcattgagatagcattgcatggagatccttgtactcttcgaacagaggctgcagatggacacaggatctgctcagggagataagatcacctgctaattctgctttctccatcagagtctgaatgatcagtgatggggaccagagctaggttaggtctctggaaacgccctctgtctgagtccgggagatggatgatatgggtaatgacttgctgctttatcttctctccatctccttacagcagctccaactactgacttttattgtgtggcagctaattgtaggattctatttctgtaaagagaaggcaagagaggaatgcagtgtccaccatccctgcagccctttggcgccttccccctcccattaccttgaagtagagggaaaggggacgacagaagaacccttagaagtaagactttttctgtctctgatgccacggacctttgaaatatttttttgaaaagaaggcctcccttggctgataccttctgactgttagtgaataaaggaagtttaaacaatctcttccctgtaatcattaatctcgtcttctttgttacaatgtatgttgtggtctttgttacaatgtatgttcacgaattcctagaacactgttcccgttggccatgggatcaggggaagagagaaggaagagagaaccagacacaagttggagggaatccatctccagtgctgctcagaggtatgacctagagcaaggggtttaggctttcttggactcattttcctcggtggtgaagtggggataatttattgacagtggaccgtgaggttctgcgcacaaaattcgttgcatagcacctgatacacacaaagctttcaggcaaggttagtttcgggtatttccagccttagtcttggctgtgggagccataatggagttgttcagaagtttacagctagtgtttataaattgcttgccatggggccttgtatacagtaagcattcattaagtgttccctcctattatatccttaggtttaagatacaggcaccacaacataaaccacccccagagtacacatgcatgggtgtaatttggtgccattctcctcccttttgcccccaccaaaatgaagtttttagtgtaaatgtcatgtagattttaaccaaaggttgattggagggtctgagtttctcagctaaatgaaggcatgaggactgtatccctcctgaagggtgtgatcagttccatgagaaagaagctgcgagctgtggggcatccaagataatgtaatctgccccggggtcctgtgagggactggccgacaaggcaggctgaatgcagccttgcccactgagctgggttctctctgctttaggtcctctctggaggtgaagagggaagtccgctgattgtttttctcttggtgcaacttcgcaccacccttacatatcccagtgtatatggtagccaaggacagtactgtttgagcctcccccattaagtgtcaacattgaatcaatgcaatcccatgcaaagaaagctgagcatgggattgtgccggtttagccagctaaagtgtggtctctgatgctgatcatgactatgaaaagggaaaatggaggagaatgatgacgaaggaggaggaggaggaaaaggtgacttgcctctagctgatgtggattatttctcttttttaatttccatgtctgtgtagcttcatcatagatctcagcttaaggacaatgaaagtcgtttattgagtacttagtatgtgctggttgcagagccaagtcttttttttttttttttttt

SEQ ID NO: 84216 - DNA, 1627 bp, Homo sapiens
tgttggtgccacccggcagtggaaaagcctctggcctcggccttctccggaaggttgtccgcggtgccagtgagagctgcttttcaccttacagcagccccggcctatctctcaggaggcctgctgataatcagtaaatgaaattcacctttccccgattcttgaaaacggaaaagatgagggttgaattatagggcaaatcatgaacactgtcttttttccagcatggtattttgagcggcacagaagggggtaattattttatttggaagaacaaatttaagtttggcagttacctgaaagaaaatttagtgattgccagtccattctctagccttctgaagaagatagattgtaatctttaattaagctatcactcacaccaaaaaaaaaaaaaaaaaaaaaaaaaaaagcggggcaaggggttggagaatgttcatatcacattattttggatgtctggggttgcacctggaagctcagatagcaatatctaggcacggctgccagcgctctatacattgacgtttgtttaatattttaatttccccatgagtcttaaacctctgcgtggtgtgcaagttgaggcctggtgtatgcacttcggccacgggctttcccactgtaatgaagatggaatgactccatggatgacctttccgtgcctttgtctgtagcctgccctcctctttaactgaacaccttccagacgagcatgctctgaactcctgaactgctcattctgttctctgagagaattgctcaagctgcagtttatcattatatgcctccaaagactttgtgtttcctatgtttgacatcgagatagaatttttcataaccctttactagtaataaatttgattgttaagggaccaggttaatcttatttctaataccagcatctgattttaaaaccctgatttaggagcattttctttctgctaccttcctaaaacgcatgggtggaaatgtataaaatatgtcacctgatattggaggattgtttatttctgttcatttggtcctgaatagtacctatgagatgcatttgaaaacttaccttgtttatatgtttcttctgttgcaatttcttccattacctggaatagctgctttggacggcaaaccaagcaatgccctttcacagctgtgggatgaatggggaaagaagtcttggtaaggaagcaattcagagaacatggaagcatctcatggcagcagtcacaattttgtgttgcgtaatatttcaggaacttgcaaccctgataacttgtgcctgcctgtctgtaggcctttaatgatgttttattgaattttggttttcccctagactttgcagtgcatgacacatagtaattgctcaataaatatgtgttcaactgaactatggtggttaggttagtaattagatgcacagacaaaatcacaggaatctgcgtgagccttgtcctactggtaaaggagtcttgtgaggattaattgaaataactcgcaaaaatatccagctctctgtttccctgctaggggctcttgtcataggagccattgttgtagccttagaaaacatacagcattattttagggggagaggttagagtagaattttaaagagtgcatttctctt

SEQ ID NO: 84217 - DNA, 3059 bp, Homo sapiens
tctgtaaggtggcagttacaataatacccacctcccagggttatatgtcaatgggttaggcacagacctaggaactcagcaaatggactactatgaagtattagctttttactgtttctggttttctgatttttgtctcctgttgtgaacatacgttgcttttgtaatatgaaaaataaaaaataaaagttaaatttgttttgtttgtaagaatcagttgaggacagatgggactatttgcatggattggtgtcatgtttgaagtcagttaccagagggtttctttcaacagagtataccaaaaaaaaaaaaaaaaaaaaaaaaaaaagtaaattgcacagaccccagcttaggacctggacttaatcttcatgatgtttgtaaagtaatacttcttggagaaacctcccaaatttctatcgacactagacatctcaggatttgaaatgttaagctaacagaaattgttcatcaggtgtatctccagccctccgtaaacactgccggatggatgaacctacgtaatgatctcctggtgccattttcctgactgtagatacttgggtaaggaggagactttgactctagatgacatgatgtaccctgtgttctgcaagctggagaacatcatgtagaatctgaaaattaggagagagaggcaatcagaagaagacagagtggtgttgcagggacctgcagtcagcctagtcccccagtttgcgtttgaatttggtcccagattttttttgtttttgttttttagtagttaaagctgagagcaaaccacattgcttactattgtcagggaatgaaaactatgcaacagaagccgatgtgcagaggtgaccgtgttcgctggaattgaacttaagcaggttcctaccgcacagatccacacaggagggattgcgtaatgcacccagcagagttgtgctcaactgtgattttataaaagacacagaaacacatattaaatagacaattcttctatcagccctctaaactggcataaccttgaatcataattcaatgaatgcatttctgtgagaagtgaaggtaataagctccaagtgctttcgtttcctttctttctttcttaatgcagggaaaattgagatgggattctcagttaaaacccaaacgacgggcctgggggttgtcacaatgtgatccctgaggatgttagccccaatgtctttctgtagccagaaccaatagaaaaatgagaggaggagagtagaagcagaatagcaaacaatttttcctttcatggtctacctgtgtgactgtgtatatgtccagaaggggatgtggttggggaagggcatagtacacatatttgagcagagtacatgtgtttcatttcttgctcatacgacatgtccagtgtgggctggcatgttcttctgcacagtccctgagggacccggacttatagagtctgtgatctcacagctgctacatctggcacagatggccttcttgatctccagttagggcgagtcacaacagcaattaaatggtttggtctgaagtgtcacgagtcgtttcctcttggctgcctactggctaggccagtcacgtggccctgaagagggtgggaatgtctcatccccctgtgggcttagaagaaaaccagaggtctgtgcacactatggatttttactacaatgatgccctttcacatacagcgagaaggattaagaggtactgtattgttggttgataaagtcaaacttgtgaacagagcaaaagggcattgcttggtcattgcagcttccacccatgcaccttacacagaagtttgggccctaacatggaaacttttcaacactggccaaattctgtttgaagcactgtattgagcataccatatgctgaaagacttggaatgcaaaaacctaaggccaagggcacttctcaatattaaaccctcagttgtaatggaggcatcaagactataagacccaagaccttaacttttgtgctccttgtcttgtggagggaacatccatcctcaaaacagaaacctgtgagatcccttgaatatactgacaatacactgatgagaattgaatgccccataaattgcatctcccgcagggcctgataggtgccctgtcttcctgcttatgactctgaaaccctgtttatttgtatcaaggacggttggtactttaatcatcaataaactaacatctcaacagcctgccataaatttcttgtcaaaaaaagaggttatgattagaatactgtgattaaagagaatttgtagatagacttacatccctcagtttcaaagcttctagtagtagggcttagaggttcctagagtaggaaaagcctagccaagcagaaacccatgtttttgactttcaggatatttgtgaattaatttacttgcatatattggccaagatctagcataatctcttaatattcaatgaataaaaaattgagttttgagagcaaatattttggtaggaaatagagaactgacactaatattctctctgactataattgtaaaacagtagatgtctttcaccaagcgctaacattatattaattattaataaaatccaactccttaataatacaatcatagttaccatttattgagagcactcttctgaacattttgcattctttatttaatcttccctacaaccttattaagtagacattatcttcatcttattaagtagtcagttcctcatttgcagatgaggaaactggctgactgagttaaatgaatgccaaagtcacagagctgctgagtggcagagttgtaattcccatgcagaactgtgtggcatcaaagccattttttaactcattgcaatgcacagtgggttaaaatgagatgattgaaaatgagatgtggctgggcatggtggctcacacctctaattccagcactttgagaggataacttgagtccgggagtttgagaccagcctgggcaacagagccagaccatccatctctacaaaaaatttaaaaattagctgggtatggttgtgcactcctgtggttccagctactcaggagactgc

SEQ ID NO: 84218 - DNA, 1050 bp, Homo sapiens
ggggagacatttttttaagtaaggtttatttttaaaattgttttgcaaacattttaacagtacatcactgcctcattggatgaatcatatttttaactttcacttcccatcaatttaaacatcatctctcaaggaactgatgggccggttgactctaaatgattttgcctttcatgcagtattgttccatccgcctgccacagaagtgattccaggtcattccaatttatttaattaattttggagatgaaattattttgcccaataactagaatgctaatgggacttagtgtaatggtttagttcaggtttgttggtttgaaaataaacgccttcatttcaatatttgccttttggctgcagcccgttaactggtcacatgctgtaacctcattaacatcaaggcttaattgtaagttaatgtgcacctagtttttgtaaagaaggtttctatcttaactgccaagttttgccccccaaatatagccccaaactggcatttccaacagatggatgggttggtgtaatataattcatgcttttaaacatcatacttttatcggtgccttgataataaatatttgaacttatttttagaagttagaataaagtgaggaaaataaatctcagctctctagagtgtcactgtggtattgagatttgtggaggtgtactacatccgtaattgggagagattgccggtcgtaaaggagggacaatagaacctctgtagaatcaaaggcagaattaaaatctgcatgttaatagctttcctgccagccacgaatagattcattcttcacgtctcagatatataaagcttatttcaaaataaattctggggagcgttcaacctgattgaatctgctgtaagctctgttaatatatttgttcgagtcacttgcactcaaaaggtttttagacagaatatcacttttttatattattcatggtaatgtaattcccccctttaatctcttcagggtttcccattcagtcatgatatgcggttcagagaaagttggatcgaccattaatcatgctatctcg

SEQ ID NO: 84219 - DNA, 1055 bp, Homo sapiens
cctcagcaaactaacacaggaacagaaaaccaaataccgcatggtgtcacttgtaagtgggagctgaacaatgagaacacatggacacagggagggaaacaacacacactggggcttgtgaggagtggggttgggggagggagagcatcaggaagaatagctaatggatgttgggcttaatacctaggcgatgggttgataggtgcagcaaaccaccatggcacaggtttacctatgtaacaaacctgcacatcctgcacatgtaccctggaacttaaatttttttaaaaaatgtttttattgtgattttcacaggaaagaaggggccaggcagggtaagcaggcttaggattggctggcttgggtcatttccatgggctctgggacacaggggttgtctttaggtgtctgacccatggctatggggtgattagggtaggtgggtgtggcctggagttcgagcccaataaagccagtggtgagggtgtggctgtgaattggttggtttgcatttgaactgtggttaccagtgagctgtctactatctctaagaatccgctagagccctgtaaagaaagcctacaagggagcaggttttaggcaataataagtgagcagtatggcgccctaatagaaggagggatgcctgtggccaatatacacggctcaaagttgaccatgatagagaacctttccctagaaggtctgtgagggaggaggcctgggagagacagcagggtgaccagagtaagtgaagtcaccgaggtgccaatgagtgtggccctgcaggtcctgcagacccccctggtggcagtattggtggtcacagctggcaaagggaagtgtggctgcccggagagcttggctgaggttggaacgtgggagtttaagagagcaaactcccacagcttggtgcagagagaaaagtgtagaaaggtcgggtgtcatacagcagagggctgtgatgctctactgaggagtggaagtgtttttctgagggcatcaaacacgccgtcaagcagggaggcaacaaatctgagttgttccacagatac

SEQ ID NO: 84220 - DNA, 1047 bp, Homo sapiens
tgctaccatgcagaaaagtgctgaaggtggcctgccctaaggcagtagcactagagcagggatggggaggacttggtggccagatgcatgtggacatgatggaaagggaagagaagaactgtcaagattttcactatcagtggtataagccccgtagtaatatgcctagtgttccattattggaacactaagtatgtgggaattatttatatcctaccgctcaaagccatcaccaaggtctgatcgtgaaaattcaaaaaattgcaacctgaggcataaatgggttttaagctccatacagtaaaacctagcatatgaaaacagttctggctgatgggttggtagaagtgatagatatagatacatacatacacatatatgcacagtaatagatataggtaaagaccttgatatatgtacatatattgtatgatacatatccatgcatatacgtgggtgtacacacacaggtacacacaaatatatatgtgcctttggacaagaaaaaatccccaggacagtctcatttggcttttaaaatgctgcagttgaataggaccgtagaggtggcctaaggcagccttccattcagggcacgcagatttggttcctcagctcccttcttctctatttctgagtcacgtgggctgcacctatctgtcagaagcccactgcccacccagagcccctgactctgaatggtggcccagtgctttctgaagacagaggtgggacctggtgctggagacaatccattcctttcacaaagactgtaagccttacccaagcattaattttgctgcataggcggcctgttctcccacaaagcactgagtaagaagaaaaggggcccggataaaccagcagggcctggcagacaacttctggctcccttgccatttaaggtcccgaggaatgtggagacattggtgggggccagggtgggtttggaaggacggattttttcctctttgtctctatctctctttctctctgtctttttctctttctctcatagttaatgctatgattttgtaaaaaaaaaaa

SEQ ID NO: 84221 - DNA, 1012 bp, Homo sapiens
tatttcctgaagattcattcattgttccataggtacctagagggtcaattagagaccacagacaggctttttcaaagacgcaagagggtcaattaggccctccttataattttctgctttaacagcaaatgccagcctatcgtgcatcagatgcaagggagtttggaaataaacagggtactttccctcctcctctaaaaaaaaaaaaaaagaaaaaatccaacacagagacatggagacagtcggcgattgggaacgcttggcttgctggctgtcaggatctggttcaaggaaggcaaagggaattttatcaccaactgggacttgagaggagcagagttcttctggtctcagagcacggggaacggtcagggaatttgtatgatggagcaccctgttcccatatctgagatgattcatttatcttgagtgccatcttaactacaattagagtacaattataaagtatctacaatggaaatgggtcttgaaatcaatcgcagctggaccggcgtgcggtgagttgccgtgcccaccacgactgctgtctgtgtttaggacagagttcaaccaaacgtaccggtgtgtgattttgcacaacactgctttgtatttgttttccctgagaccggcaaacacattttttatttattttatttttatttttcgagatggactttcgcttttttgcccagcctggagtgaagtggcatgatctcggctcactgcaaactacccccgcccccgggttcaagcaattctcgcacctcagcctcccaagtaactgggattacaggtgcccaccaccaagcccggctaagttttctattttcaatagagatgaggttttgccatattggtcaggctggtcttgaactcttgacctcaggtgattcacccacctcagcctcccaaagtgcagggattaaggcgtgagccaccgagcccagccggcaaacttactttaaaacacattgcaataaaataaaaagaaaagggattgtcctaagtg

SEQ ID NO: 84222 - DNA, 1762 bp, Homo sapiens
gatttcctgcttatctcgacaaagcagatctggcatcctttgcctgcattttacatttggctacagttggctggacttgagcagcggctgcccctctttagctggggcatgtgccctgtggtttgccatagtacccatcaggcctgcttcactcattgtagaaatggcctggcctcctaggcattggagatttctgttatgctcattcatgagcttgcctgcttacacctagctgttgtgttggttctcataggtctccctgattccagcctccaattcactgagctggcctctgccagtgtcacttctccccagtcttggctttgatcaagcttggaaaggcctggcctttgtgttgtcacattcttctgcctagagtatgccttttccttcaccaaaccaagtggctctttcggaagacttgcctgaatcctagaccccttctctctacaaccttcagtctgagttgggtaccttgcatcctcctttgttcccatactaacccctacaaccatggtcattttgtggttatctgtttaattctctgctggctattccaggctgtcagctccctgactacaaggactttgttgctcacaatcatatccacggcatccacacaagatctggccgctacgtggaaggacacatagttccgtctggcttggagcctagcttgggagagggacagtagtggggaagggtgagcttggagatagagctgaccttcccaggtgcttcagcagttacagcaagattctagatcttaccctgacagtcacagaaagcactgggagcgtttatgaatgttgtggtatctcacataataaggggaccatgcatgtattttagaaagagccctctggcttcagggaagaacgatggatttgtgagggtcaggactggtagcaggtgggctcctagaatagtcccggcaagagatcatggaggccagagccagggatggatatagactaagacatgcctgtagactgagtgtcgaggagcaagtagatcaaattctagcatgagactgggagaaagagatgttctccagccaatggatttatgaaatgaatgaactttttccctttcctcccaagcattgcctggatcaccttgttaatatggtttcttattaaacgtgctggaaaaaagaggctctaagtgcgtatgcttttaaagcaacactattagcaaatggccactggcttcatttttcctgtgcatatatttttgtgtattccgggaggattttcttttctttttctttttaatcctcctcctcaagggaaacattcttctcacaatagcttcctggtagaaagttctaactaatgactttaatcgtgtgaatgtattgcagaaatggacaggacaattctcagcccattcatcttacagacctcaagtgaacaggcacaaaacaacaggctccaccctccttcccccctctatctcatactttacctcaatttatgacttggcttacaatccgttgcagaaagcctagctccccagcttctcctgaatctacgtttttctattttgtctgaactagccaaggtctctggagtttgctgttatattgcttcagagaaattagtgacattgaaaggctgttgtcttttttagtgtacttttggttgttaggagaaatttacaaggccatttttttctcccgtctctgcagttcaggagattatattagaaaatattctatacaaaaaatatgcatagtagggcttttctccagctagta

SEQ ID NO: 84223 - DNA, 1054 bp, Homo sapiens
tgcttatcgggtttgtcatcctctatttgaaattaaaatgtgtggtctcgagatgaccttaaagtatctgacccccaaatctaatcactcctagcatctgtgaaaattgacaaatatgtcaggtataacttggggcatcaaaacattgttttaaatatttcgtttgtagacaaggcaaagatcattttcaggttagtcctctgagaaggaacgctgggtgcagaagcatctttggtttctctgctctataatcggcactcattatctatgggtttatacgagcagaaaatgtacagttatatgttcagcacaagtgaattattgattggatttacggccagaagaatgttcctaagtggtcaatacatggccaaagtgtgtcaggtgaaggtaaaaatcaagtaagatctatacttttgatagcaattgctgttggattatgttacgcttgtcatctgaggttactgttgaatatagataaaaatgttaattgtattaatttagacaagaatgtggcttcaatgagtatttcttacaaagtgggagtatcaatttttcttaaatgtagagatttagtttttcaaaaattatattttttatatgacctgacgttgattggcttgcctacattctcttttggtgtatgatgacagtttaaaaattcggatgcattttgcacagaattaagacgttatgtgcaatccttgtgtttctaattatatgttgatcaatgacacctttacaaaactgtcatcagtctattggtggttgattggtccaaccttagcccgatacctctatctccgcttagtcattcctggtgggtgactgatgacccctgcttaacagtaaacttgttatgcatagggttgttagaaaagtcttcatcaatttgagccaaactgtggctcccagctacttccatcaggggtccttattccaccctttgattgcaaaatgccctgaagacctggtatgtcttatgtcagttacaagaggcccttctagtgatgtaccgggaacctcctatgggaaccagagctctgctaatttt

SEQ ID NO: 84224 - DNA, 1060 bp, Homo sapiens
actcaagtgtaagatgagatgccactgtggtatcttcaaaggaatttagaatcatgtcttaatggctccattaagaagaattctttttctcttttctctgaaaagcatcccaggtcataaaatgtaatgtgggattgtaggttttgtgggaagatgcacttggcagcaattccttgagaggaggccttgaaatgtcagggtcccccattcatcttcccaagctgggattgacccagtgataacataatgataatgcagctgctttcaatgtcaagccatcaggcagcgggttgggggggttgcttggcccaggaacccgtgccctgatgtggagttggtaatctagagggttttgagttaagtgcttttgacatggaaaatcaggagccaagggcgaagctgccttttaaatgctctttctgaaagagtccactgcagatgtaattgagcctctcaggtgaagagctttattcgagcaaagctggttagtgttgcatacctgtttgggggaatattttaggcatcctcacaaaactgctatgtgacattgctgaaggtccccagcctccttgctcccaaacacttcaagaaggaaaatgctgttgcagaaatgttgtctaagctttaccattcagtgtggcccagatcaacctgtcccttctttttgtgatcacagtgtgtaattataaagttatttgtgtgtttggtttatgtcttccacactggactgtaagatccatgagatctaggaccacgtctgtcttgatcatttctccttctctaagactaacacaaggcctggcataatcattgtcatcaccatcaccatagctagtatttattgccatatacagttatgtaaaacattgtaagaagtgctttacatcagttattcccaaccatggagtcatgagtcaaagatggtcaaattggccaagatgaaggtgtttgcattttggagaccaagcacttgaatccataaccccaagatgtgactttccaggcttgggatttcgcaacacgtcgcttaatctcttagcttacattttgtcatgagtaa

SEQ ID NO: 84225 - DNA, 1127 bp, Homo sapiens
gaggctgaggtgggaggattgtttgagccccggagttcaagactagcctgggcaacatagcgagaccctgtttcttaagaaaaaagaaacatttaattaaaaattcagaattggaagttgcattgagccaagatcatgccactgcatttcagcctgggtgacagagcaagattctgcctttaaaaagaaagaggtttggtgccaggacgccatgaaataattactctaggtaacctgaggctagacaaacctctccatgtctcagtttccttcctggcaaaatggggaggtaaggccagatttcttctcctttagttttgtttttctacttgaattctatttgtcatcctctgtacctaccacctgccagttgctgtattagatgctgttttactcattgtctaattgaattctccaacaaccttgcaatacgcttgttatctccattttagaaacgagaaaatggtgactcagattaagaaacttgctcaatgtaaccaagtcacaattttaatattaaaaataatgagcatttattaagtgcctgttgaatgtgtaggattttgctaaatctttcacataatctcatttcatctttatcatagcccttatggtgaaaatgccattattctttgacatagaggaattttgattcaggaaggttaagtaatgtgcccagtatcatctatgtataattgatgggtctataatttcagactcaggtttgtttaagtccaaaaatcatgccattatgactgtgtaccatgttgcatgccttcatatccccaatggaaaaatcccttctcccacttttcttaaccctacaagatatgccaagattctatagcatctgaatttgaaaacctctactaattcatgaggcaatctatttgataatggcatgatttagttagtgttccttttttagagataaagcctcaccctgttgcccaggctggagtgcagtggcgtgatcacagcccactgtagccttgacctcccaggctcaacctatcctcttacctcagcctcttgagtggctggaaccacaagcagatgccaccatgcctggctaactttttttttttttttttttttttgtagaaacagagtctctctatgttgcc

SEQ ID NO: 84226 - DNA, 1105 bp, Homo sapiens
tgttggatccataggacattttgaggaattgggtgtggggagtggagggagtgaagtgacccagatagggaggtgcttgatggcttgactgtggccttcaccttgctttttgtggagctggatatagacatttgttggccagctaatactgtcttgatctgttatatgatccttaggccaggactttttcctggtaattgtgcaaaatgtcccagtgaatgccaattccttgctgtcaggaaacattaagtttcctaagtgacatcctttttctgcatgtttacttatggttatgtaaatcaagcgggcctccccattggaaatgatggcagtggttacaagggacttcacctggtcttttgtagttgtggcaaatagataagatacaaatgtgacctgcaattcagttcagcattatgaagctgtatctgctccctgggtggtggtcacagccctgctttgtggccctaacccttgccttcctgctggcgggccttgcacaggtgcagagagggggttagtattggcaagctaattggataaatggtgaagtttcccctgggtggctccattgctccaggtgaagctcttgaaatactctgtagatgacaatagcctcaaacttgaacaggttcttgcagttggcaaacagaaggagaccagactcataggttttgggtgcggataatggataatctggctattgcatttaattcccagcctgatttattgaggctgcctttggtgaaatattgatttatatcttggggggccaggatggggctactctgtactcagatgaggcttgctctcaggaagttcttgttcagcagcaaaaatctgccctgtttgggctctgaaagttatttttgtagtggcctcacaagtttcttgtagcaggtcatgaagaggaatgaaatactataatcacagagcttgcagaagctgcctggaggaccagttagtctattttttgtacatgaggatactgaggctcagagaaagtgaggtcattgagtcacttgagttcttgttgagtgttctttcctgctgaggtgtcctaggtgcctcttaatgcctttaacatctgctaagagtatgtcac

SEQ ID NO: 84227 - DNA, 1023 bp, Homo sapiens
ccagctgctacaaaggacactgtgcatttctaaatctgagtttctgcacacgtatggaggagtaatatggcacctcctcatttggttgagatgctctggggtacacgtacaaggcgctcaactcacggtggctccaccagtatgaaaatgtgttatctgccctagtctgaagtacagaagtcaggtggtgagaggtgacatgccatgatgtggttctgcttctctgagattgtctgtcagcttttccctcagtttcacccccctttctccctttttcaagatggttttagcacttccagacattataaccagatagcctattgctagagaacaaagcaccttctcttcctatatgtacctcttgggaacaagggaacctttccccaaagcccctcaacacacttaggctgacatctccttgaccagaactgtatcaaatttacatagcctcaaatgaagcatctgggaccaccaggattgggtgtttaggccatggaagagtaacagcccagtacacaactgtctccagtggccagcacgtagaccttccctcacactttccactctctgcatcccctcttccctctcatgtatctctattacatggagcctcactttatagtcctcattaagagactgtggggtggtagacagataacaatgttaacatcaggcaaatgggttttggatttaggttaccatcatttatcttctctgtaaccttagacgagttgcttgagttctctgagtctcagctgaccaagctctaaaatgagcataaccatatcagtttgtgtttcctgttacagggagaaaagactgagataactaaagtacctgattgagtaactgctctctgaaggtggaggctggactgcttcactggacagggtggcctggggttattctagtgcagtggtagctggtgacaaaactcaaagaagatgtaactagagaaaaggtactcagtgcagcctctgtgagctaccaccactgcctctagttttccagaaaaccaccact

SEQ ID NO: 84228 - DNA, 1030 bp, Homo sapiens
acctatgtgtatgtgtttgtgtgtgcatcaattcatatggtcctctgcagccttgcaaagtcgattcctgacatttccgtagactgttttttttgttttcagcaatactctccagcagcaaaacccaatccgctcatattcttgcatttgctgcagcaaaacctgacctctctttgtgttacctgagtcttgacgaagaagactgaggaaaggccccccccccccccccgccaaattgtcccgttgtctcttggctggtcttgccagctggcacacagcttcctctgaccaccctgctaggtacaaatcccacatgaaaagtctcaatcacctggctcaaactcatagttttcaggtggcataagccatggcattttcacctcctttcctggttgtttccagaaagggatgatagccccagtgcagtggctctgtatttctcagggcagcgtgggacctcagggtttgtcatggaccacacctttctcctttgtccctttttataactcataggctacctccaacttgacacttatttaagtttttatttattttatttagcattcagaaaactctatagcctcagtctctcgggatgtaaattaaagcaatttcattttcatagtttctctgtttcaaatccctcattgtttatttaaatagcagcctatgcatattgcaagtaaagaattataattaagagaaccagaagggcctgtctctcaggaaagcagtgatttcctttcacaataaccctatccttactgttgaagacttgtggaaaagggacatggcccagggaaccagagtggtttgggaaagcactttgtcaagaggcttggggaccccagggtggaagctgccatgcgcatgaggctgtgttagcagaggcagtggcagaagaagacattgcaaacctgcaaaagcaacctctgaggatgggtagacatatacttcattgcaggcagctgctgctgaaatagatttggagtcagatgtcatattcctgccagcaggtttagcagtcgtg

SEQ ID NO: 84229 - DNA, 2448 bp, Homo sapiens
tttttttctcgttcatctctcttgcttttatgctttccaaacccctaaattgtggtgcctcagtgatcttctataacataagttgatagtcaataattgcttaatgggaatcataaatatgagtttatttatatgtgtatatatatatatatatataaaatatatttccatgaatatactgaatgctaagccctccccactttttttttcttttttaaattcagaaatttctagttgtgtttattcccctcgtcagcatactttatcatatcagagccttttcagacactgtaaaactactgagttatgtttgggtcatgttttgcggtatgccctttaatagtgtagctttagaaatgcaattttcagcctctgcttattagaatatgataaagtattcctggtctatgtccagctccactaatctccagactgcgcttcatgaattaagcatgaagattttagtcaatgtgctttcaaagaccaatgtttagggaatcatggattttctacaagctgagggagaaatctataataggaggaactgattttcaaacatcatattctcaagaagaaatgaccacttctggcccagaaacagaaaatatttcactatcagaattttctagaaccagttaaaaccacattgtgctgttaggtttaataaacggattgtgttttaagatgtgtaagactgtctgtcacgtgggaggatttcaaatgactgcttattttggaaagctcatgtagactgggttaaaatcgagaggggaatgcaaattgaatttataaggtattattaacttcttcctctttccccccgccctggcccctgtgcattttggttcattttgctctgatacaattcagcaaatagccagatatttcttgccatggcgagagcttagttgggggagagattttgaccaggcaggctctcaggtcggtgccatcggtgacgccaacacacctcctggcttggtgtgttttgtggcatttggcaggcaaacgttttgaaaagaaatctcctttcaaaaatcacagcactggttgaagcaggagcatctctccccttaaatgcaaaaggagttaatatgccagtgactacagtgtgcctggaaaggtcactggaggcatttttgtctggggcagcccctggagtcttggcttttgtgcttggtgagaccttatctggcctcttcattgtccccttcatacaaatagatagcttttagtgagcagctactctgcctggcactgttctaaacacatgacaccaatagctcactcagattcccgcctctcaacagggaaactgaagcacaggaagtttcagtgatgcacttaggcaaccagtaagtggcagggtcggcattgaggtcaagactggttggacccctaagtttgaacaatcaaactggactttggggctcacagtttgtttcatgtcaggaaggtgtccgatcagaacctgaatgccagctcaagctgctctcagctaaactccaggggttgctgatggagacttcatcccctcctccagtcccgggatcaagacagaaatgtaaatcacctccaagaatgggtctgcgtcttgcacattttccttttgagaaagaggaaaattctcagctggtctagctttgtctgtgaacctccgggatctctcaggggctttaaattaattaatcaatccacagacattgaactgaatctccaccttgggcttgagactctgcaaagtgcattaaatgggaaggaaaccaaagggcctgctgccctgcccccgccatagcctaaggctgtggccatggctggggaattggcctgtcagttcaatcaggcagcccctctgactggtgtttttcactaagctggccccatggatggccctggtcatgtgtagacatggcctcaggagggccacattcctctcatttccaggcctccccacttaattgttcctgacacagtttggggagaaatgcagcaaaacccaggcctgccaatcaacatttgctcccgagtctcagagcggcccctgaagagacaggttggaccaagggacatccacagatgccttgtgtttaggaagtggggtgtgggcaacagagggagaattgttacccccgggagactgggggtgctgaagaagagtctcagtctctgcactctgggtcttgccaaaacctctgggattgggtgtggtgtccatgttgaggaagggacagtgagctctctaaatgacagtgggtcaaccaccgcatttctaggactcaaagatgccgtgggggtgtattagtctgtttccttgctgttgataaacacatacctgaggctgcataatttatgcaggaaagaggcttagtggactcacagctccacatggctggggaggcctcacaaccatggtggaaggcaaggaggagcaaagtcatatcttacatg

SEQ ID NO: 84230 - DNA, 1045 bp, Homo sapiens
aactgaatagagttccccacttctcagaacaatgcaaatggtggccaaggggctgtggaagagttgccagaaatggaatgattcagattggatgaaaagttgattttattaattagttaaaatacaaaatgagaaaacagaaaacacaataaatacacagttaataaaatacttcatattttattataaaaacattaattactttaataaagcggtttatattttcaaatacaatatttaataaactatattaaaaatatatacaaaatagttgtaagaatcggggctcctgtgagtacgtaaatgaaatacgcttacatcatttacttctcttcccttttgtttgtgagtccagagacgatggaagagtttggaaagttgtcagcttatctttgcatatatttgtccaatgataattaagcacaaattgtttcaaaaatctttcaaaaattgttataaagatttttattggtgctaagggctgtaatttagcaaagtcttacacctgaaaccaaccaaagggtcttagagtgtgaactgttgtcttagacccggagaagtctccaaagaatgaccatccgaggcattcagctggcgtaagaggagtgactcatttgttcttcttttttttttttttggctgtctacagagaaggaggatataggggcccttaagagaaaaactggagtagggtgtgtgtgtgtttgttttggtcaagggcagagtgtgctgtgtcagggtgtttcattgcattttcatatttgtcatttctctttggagcgtgtcttttggtgccacggaaaagggctggattttctatcgggtacaataggtacctgcagggcttagggtacaagagcttgtcggggacctgcacacatgtttgagacctgtaaaaatattgctggctctgaattatggaaagaaaatcgcaaagttaaaatctatcaaagtataattaaatacctacaaaacataatattatgtcactagtcaaccgcaacacaaatcttatatcattagatttcagtgatattgaatgtgg

SEQ ID NO: 84231 - DNA, 1366 bp, Homo sapiens
ttctttcaaagcccttaccatttatgaaaccagattgcaagtctgtttgaatcccccaaatgcctgtgctacataactgtctccttactctgtgctcttgccccaggcagagtggaagttgccttataaagctgcgacttggccacagtgttttccctttcagcagggaaaccggagttctccctgctgttgggaggttcaagagccactctgtgcagaaatgcccagaaagagttaagtgaggtaagttcgtcagacttctgcagacccatactgtggaagggtcaagtgcagggtcaccaacccgttccatcttcctgtcagttggcgtccacccttggtttcaaagggaacaggcattactgacatgacgggacctttacagttcccagctgctcatttggagtactgcggacccaggacaactaaagccggggtcgcctgccctccaggggttcctgggttgaagtatctgttccctccctttattttttctagcctttatagaaatgacaaagggtcaggtggtcttaaattccaaatctgggcacatgaatggtctgacctcggaaacttcctatatgctcgaaacgatttaactagcagcaataaaatctctactctttttatgacaaataatctagcatgtctggggagcatatttgattcttcatatttgggacccttttttaaaggctgagttttattaaaatgatagaaaaattagttattaaacagtatgtcaaatacctttctgtcccaccagatttatttttaaagacaaacattacagaggggcaggggaaggttatatttgaaatctttctatcctttctctaaaatatatttggtgaaaactaggaagtgttgatagatatcattgtttcctgacaggtttttggtgtttgcatcttgaaagtaaaactgccaagttatttttttgttctggtttttgttttttaagcttttctttgataacctcattttcaaggggaggcttagcactgatgtattttattttcttgctcagagaggaaacactgaaatagctatatgcttccccaccaggagagtggaagaatcttgcttttaaagcgatagtcctattttctaagtaaaagtccaggcatgtgacttaaaaaagaaaaaaaaaaatgttttctggtcaagtcacatgcctctgaggtttttttttttctttctttcttttctttttttttctttttcccagactcctcatacccctcctaggagacagtgattccctggcttcaccaggcaggctcttgggggcttcctggtccctgtcactcttaaaatgcagcctgtctttggacatctactccaagtttgcattctgccttgc

SEQ ID NO: 84232 - DNA, 1059 bp, Homo sapiens
atctcgctggaaagactgctgcttcagcaaggtttctttgctggtctgtggcaaggtccctgcttcattttcaaggtgtcctcacttggtgcctttgaagggtttttaatggattcgcttgatataccttccaaatggagtactttgtgcgttaattcagtttgtgataaagatcccttttaccctccttttcataattcttcccagagatatgaagtacactagaaggttagatgtggcatttaatttttccacaaaacctatccatagagggggaaaaaaagattcaatttcattactattcatgtgtaagaatattgaaggtggtatactaaaggagataactatttcttcttctatcaaaggaagaacaaatctgtctttgaacgaggagctcaattcttatttaaaagataaaaggtcacctacaatactcattcctttaaagctatagtgttggggtgggaaggaagctgtcttacctggacatattaattttaaattttgcttgaaaaaattgctcagtgcatttattgactagtctctctgtgtgagttctgaaagtctgtttatatctgttgccccttctcctaaagtgaacccagatatgtgggtatggggtgctagtttttatattaggtctgagatgtggaaaacagaaatctaacttagggatgtatcataatcaaaccgtcggggctaatggcatggctctgatattataaaatctggaggtttggaatgcagcaaactctgggggcattatcattattattattaatagtttgtatttacaaatgtggcattaagtagaacaacgtattcttgcaattaatgacaggaagcctacaatttctcattaagcacaggacagtgagaacgaacggaatttcagagacatgtttcttaacattaaaaacaacaaaaacaacaacaacaacaaaaaaccaagtaggaagcaggcagagttgcaatatgaagaacaatttcaatcatatgttgtttaattgagtttaacaagtaaatgtatatcccagtgtgtgtggtcaccaaagcata

SEQ ID NO: 84233 - DNA, 1021 bp, Homo sapiens
aatcccaaactagaagtgagtccccctgctcctcaagcttgcatggcgctcaggtattccagtgggccccgctgcattcttcccagtcccaggaaatctttgtgcatggctgtcttttctgtgccatcttgggcatctcacgcattggccctatccacatgttgcctccagcatcccaggaactccgttaatgtttatttgaatgatggaatgaaggtgtcttgctatattttgacatttctgtcaaaatatgaatctatctttgcctagcatcttttcatgtgcacattgcccatctttataacaaagtgtgagtgggaaaggacttttaatcttcattatattatcattcatatgaataatgttaacaattagtgtttattgagcacctgctatgagccagatgtagtgttcagtgctattcatgtgttcttgaattaaattttcatggcaagcctaagaggccatgactgtccacattttgcctctgagagacgcaaggcttggaggcaggaaatcactcactgaaggccacagcacaaagtggggacttgagtcccgatctcactgattctaaagtccttgctctccaacctctgtccatctgaaatggaaaagcactgacgcagttctcactctggagcttgttttattttgcttgggctgctgtagaaataccacaggtcaggtggcttaaacaacaggaatgtagttcctcacagttctggaggttgggagtcctagatcaaggtgtcagcagggttggtttctctctgtaccattgtccctggcttggagatgaccatcttctctgtcttcacatggtcttccctctgtgtgcgtttgcatccttatggcctcttcttgtgagggcactggtcatattggattagggtccaccatataatgactttattttacctgaactgtctcttaaaaggctctgtctccaaacacagtcacattgtgaggtactgggggtttgggcttccacatacaaagtctgggacacagtacgctc

SEQ ID NO: 84234 - DNA, 1034 bp, Homo sapiens
gccaggcatggtggcgcatgcttgtagtcccagcgacttgagaggctgagggatgagaatcacttgaacccgagaggcaggggttgcagtgagtgcggtggcagctgggacattaaccaagttgtgaaaggagccatgatgttattagctgagtcatgtcactgcacctccagcctgggcaacagagtcagactctgtctcaaaaaaaaaaaaaaaaagtgtactttttgaggaaagttctatttttcattattttccactatgaatgaagaagaaaataatatacatacattactgggattcatacggacattatttagacacacttccacctacagagtcacatattgtatagaataaaatatcatcaggagcagctcatgtgaccagaatgtggcaaagtctttgctctacaggtcaagttgggacttactgaggagaaatgaggggacttcaaagtccaggttgcaccatccactttatagatgaggaaagtaagaacccacagcatcttgcacgtagaattcaatatatgtcctgcttcttgaatcacattgacctaacaggtcatatgatttccatttgtttgcacaacaactcaagggcaaaagtgaaattggaatttttgcttttgaatttctgaaaccttgttttatttatttattttctaatcttttttttttttttttcgtggaatcatgttcccttcggaaaactccctgggtgccccagcattatgtggtaaaggacatgtatttccaactggcaggggctctgcaaagtttctctgcctcctttgctaaccaaaccctaaataattgtctggatgttccttttattgtcacctctgaaacaagacgaagatttggacggtttgctttagagtgcattaacttctttatcacattaatactgactcatatcttatttcccacttgcaataagaaaaccattcaaatctttccctcacaggacaatatctttaatagcttctgtgtgtttcctatttttggctgtttctgtataaacagact

SEQ ID NO: 84235 - DNA, 1037 bp, Homo sapiens
ccgagaatcagtatttctatcaagctcccaaggggacctgatatatacatggagctgaaaagtacccacctaacagacttgccagctccttaaggataagaactatattttcttcctttttttgtatgcctccccatgcaaggataattacacagaataagcactgagatgcctgttgatggatttattccagcaattttttttttttagctctctttgtctggaactttgcaaaataaacaccatggtcactccgtgctttgtgagtgacgtgctagaatggaatttcactgttttaaattcagggttaatttcttgctttcaaatgaattatgaaaggaagaggagagacctttggaaaagtctgaatgttgatgccgacgactagccaggcgcttcccttccagctggtttcgtgagggattaagaggccactgttgtgaatctcccattagtgatggtcccaggccccctcctcattgtgcatttatcttacaagaggcatatttaggagatgtttccgttctattttatctgcagaattactttccattctcaggtcttttatataagtattcccttgaacccgttccaaaaactggatttttaacccaatagaccataactgcagtgttttattgtgcttacatatttcaaaatgtgaatgtaagtagatttagcaaagttaaaataaaatgaaaacttttcaaagggcaccactgctcgcattcccatgttggagttttccctttggggttcttatgccattttaaagactctgaaaacaggaagactttttctcttgggtattttatttttttttcctctgcaagggatggggtcataagacattggtgaggttaggccttcctttgtctcccaggagcacacttgatagcaatgtagggtgaattccaaatctgtgagttagtgccgtatatagcagtgttgtcagtaagatttctcactggcatctctgcttcccctcttgactctcttgaaatcccttcttcaggcagaagctggagtcatttctc

SEQ ID NO: 84236 - DNA, 1003 bp, Homo sapiens
tggtttatgtcctaaaaccttatcgtaatgtgattctccttaacagagggattcgtaagcttaggactgatagagatttggcttttctgctgttggattgatagctccttgactgctgaagccattgcccatctgttcaactgttgtattcacgaggaggttagacccctgacccaaggcccaggtacctggctttcctcagttgggatcagaaggccacaaagttttcttatattttaagcatcaaagtagcaccactgtacagcatctttacttaatctgccctctttcacgtgtgtgcatccctggcatgcttaaacaagaaaggcaaatgagagagagcgagtgagtgcgagcgagagagccctgaggtgccagaaggctgtggttcctttgtgtctacagaaaagatataacgattgaattagactcttaaatatctgtggatgtcaggttgaatacaagcagctattcagtgttttactctggcaggagaacaagtcccctggaggtcagaagccatgcaggtccctggaagtgtgagcagattgttaaaatggtatcaaagatgggctggcatgaggccagagtctatccttgatgctcacctgaggtctagggctaaactcttgcctttacctgttccatgcttagccgttcctgctttttgcctagaacctcagtgctattgctcacacagacccagctcatgtccccaggccatgaccactgcctccccttctcccacctgtgcaggtgttaagcatcagtacataactgaggagtaggagggcagcagcccaaatctttgatgaagaacctctttcgtatcaacttatgctttggaacgagacactgttggatgggaatctggcttctaacaaactgattggttggactcatgccttattctttcggagccttagttttgtcatgtgtagaatggggagtattgctagctattcccatagggagtgagagagagtgtaagtaaaatgcaatg

SEQ ID NO: 84237 - DNA, 1662 bp, Homo sapiens
caaaaaaaaaaaaaaaaaaaaaaagaaaaagaaaaaggtgtttggaagccatgtcccatgaattccaaatacaattgaggactctataaaggactataaaaaaagttgtaataaattatgcagacccctcagcagttgactcacctctctggtgctccaggtatttctcagcgtgttcggggtctccctgtgttacctggacagctcctgccatcattagcacacagccaagattcctcgaccacccatgactctggatttatcatcctcaagaattgggggctgtggaaaagatgccaaatttgttcttttcagatttaggttcttctgtgataaaaatagacttggtaaagaagcagatatttctttaatacgtgtatatattagactgtgaatttattcatcttccttattcatcatataagtaaattatatgattggacccaggcataaaacgtgatttgactcccccttgcccatcacagttctggagttcacatatcatttgttactttgaaaaatgaacttttgttatttgattatggtaataaataatatacatggtagaaggagaagaaaatgaagaaaaatttagaaacttggacagaggaaaatgaaaatgttctattaattccactagcatgagataatcactcttaatattttgttgcatgttcttttctttcttctgagtgatagcatttttttcaacaaattgggctcgtaatatataggcacatagatatataattaaaaaaacaagaatttctcatgtcattaaacattgcttgaaaaaacatactagtaatttcctaagattacaccatgtaaatgaattgtattttatgtaaccattccctagtgttggatagctaggccatttataatttggacactattttaaaaaataactcaggcttattttactatttatttttgccttacactttttgtaaaagtaatcagagcagtaataatagatgactccccaaaatccttttgcctctaatgattagtctaagcccataatgctgtgttccttgccagtgattggtttagaaataggtatgtgacccagttctgaccaatggatatggagggtgcttatgaggaaggtttcctactcctaaaagagatacacaggaagagagaccttctgcttcctctggacactggcgcagcctggactagcagttgccagcttgggtttggacaacctccgaccttagttgaaaatgaccctgtgtaggacagaggagcaagtggaaagaacctgggtgcattgtggcattttagagccactgattcagctgtcctatgggcctcctaacccgaacctccactggtcatgaaataagctgttagtttggtgcaaaaggaattgcagtttttgccattgaaagtgatggccaaaaccacagtaacttttagcaccaacttaatattttgagttgggtttgaatcacgttgtctattacatgcagcaggacacatctctaatcacgcgagaggtctgagcaaacgtcttcacatttcacactgcagatattcttacaaaaggcaaagcagagatccagagaaattaagatctgctcaaggtcgtatccagctttgggaaccccaactattgcagaaatttctgaagtcgtcatattgctactt

SEQ ID NO: 84238 - DNA, 1015 bp, Homo sapiens
atttggtctgcttgagcaaggatattgggagggaggatttccagcagcagaagtggtggaacaaaggcactgtgtacacctttgaaacaattaacttcaccaaaattactaaactgtcctctagaatggttaaaccaatttcctctctaccattcacacgtgagaatgcctgtggccccccagaaattatctccagcagcagcaacagagaggactggaatgccattgacaggtcccacaagtcagcaatcagcacgccattttttaaaatttatgttgctattgtatcgtaaggttcttctgaagcgaccacttcataacactgtgtagtccaatccctaagctgggcaatttttttttcccctttcaatacatcacattgattttctgtatgactttatctgcttaatacaaagtgggattgaacagttatttgtctggatttgatcattccttattaaacatttatgatttagctttcaccgcggcatcttcttgtaaggtgtttcttatttttatcattttccgtaaaggtaggattgtgttgacagccctgtaataaatgtctcttggaagagatgtgttgctgagaggtggggagggggtgggggctctgtgcatggaatggggggaaaagcttcagggaagggcagtgcaaattgtttctggactgatgccatcttttaataatagtagttaatagactgggtacaatggctgacgcccgtaatcccagtgctttgagaggccgaggccggtgtatcgcctgagtccaggagttagagaccagcctgggcaaacagcctgaggcaaaacctcatctctacaaaaaatacaaaaaatcagctgggcgtggtgatatgcatctgtggtctgagctactcaggaggataaggtgggaggatcatttgagcccggtagatggaggttgcaatgaaccgagattgtgccactgcactccagcctggatgatagagcgagaccatgtctcaaaataatgataataattgtagta

SEQ ID NO: 84239 - DNA, 1312 bp, Homo sapiens
cacgtaggaagtggcaggttggagaaaaagcagtcacagctcctggctgctgtggctgctttgagcttcttcctcgatcaggctggatcattaccagcctgtaccctcaaaggatgcccttagtcctgtcccctctcactagcagggattccaagcttgtaaataaagtctcccacttaaaatgtgagcagagtgaagagctggcagtgtcaaaactctgtgtccagatgttttatgattttcccttttccagatgagcccggtgtatccgtatcagtgtgtctaggaagaccaagcatgccgaacggccagcagagtagaaactctgtgtgcccatccattatgtactccctgaattaggctccttgaggctcaattattaaagtgggatttttcttaattattaacagttaaaaataggaaaatagatttcaaggggaaaaaatttgcaggcaacaagagtccaattctaaatgtgtgcatgtgcgtaaaacggaatttgccaaacatgaataggcacttacaatgtgactggaattggctctgtcatgtgtcagcctaatagcctaaaccctggttcaatacaatgaacttgggaaggtttgcttaatgaaagaactgacgttttctgtgcagcggctgcattcatcagcctgcatcctgttcattacactacaaagggctgccaatgggaattggtaggatcatctattaggtaaatgcgatggggacaaaagatagcagagcccggggctttgtggaattttctgtggtggtccgggttcctggagtagggagctgtgatgacgggcaacagatttccaagttggcacgcgggcttctggagtcacgggctgaattccggcactgccacatcttgccacgcacatcctaagggagtgtagagaagagagttttcagttatgcatgacactgccttacccattgtggattcagtagggatattcataactgtgaatttgaatataactattaaataattgaattattattattgagttactgaatataactattgagttttccctctccatctgggcacatgggaaggccgtactttcctgacatgtgatttgctgtggcgagtggaatctgggggcaagagacgtgtgtctccttgaggcagaaactttaacagattccagcctgctgcatcataatctcctttccctctaccacgctgactggcagtattccagattccgattgccctgtcagggtgggtcctagtggtaggacaaaagcaagaatcctgagctgacccaagacacacatggaaacattaattgtg

SEQ ID NO: 84240 - DNA, 2208 bp, Homo sapiens
tataaggcatcagtggttaccaggcagtgttgcattttttccatcccatacctctgtgtgtgttccttatctgtttctaggatgtgccctctgccccgtcacatcacactctgtgctgctctcagccaaagctcttcttaaatacactagccatcaaaaccatacaacttggctgggtgcggtggctcacacctgtaatcttagcattttgagaggccgaggcgggtggatcacttgaggtcaggaattcaagaccagcctggccaccatggtgaagccccgtctctactaaaaatacaaaaaattagccagctgtggtggcacatgcctgtaatcccagctactcgggaggctgggacagaagaaccactggaacctgggaagcggaggttgcagtcagccgagatctatgccattgcactccagcctgtgtgacagagcaagactttgtctcaaacaaacaaacaaaaaacatacaacttaactctcatacccccacgcctgtcttttctcctgttcgacttgactcctcttgggaattccgtaagtactttgagggcaaggaccacaagataaatgtcgtaaggtaaccaggaatgacattccaagattccattctttcctttgtatatccactcatcattcattatattcttactctgggctaggccctgggaacagttgagtaagaacaagcaggaacaaacaattagaacatttagtgtggcaaggggcgtgacaaagttaccaagagaggtaggtgagagacaggagttgttatctgcggggaacaggtgaaggagtgacagcagggggtgaggataagaaggaggaagctttacccctgagaagagcaggcatcagatgggctttggaatctacatgggtgtttgtaggtagaccaccctggaagttgagtgatggggaataaaaggaagaaagtgcattctgaacagagggaatagcaggtacagcagctcagacatgggcaccttcagagcgtgtctgagtcttcctgatgagacacgtggtgttcacttgataactccctggcaggttctcttcatcgggcctccacatagggtatgcgaacctcttcatgtttttaaaagggagagatttaataaaggcaatttggtacttaaaaattgttagaagagctaaaagagtagttttgaggttgaccttcagaacggcttcctgaataatacagaagtgaccctccaggaaggcccttccactgaagctacaactggagctaagcagatggataagccaaaaccacctccgttgctgtggccccatctccaccacaaggaagctggagaagggaccccagaaccggaagacaaaaaacttccttcacacactcccttgctaagaggagaagccccaaagaagctggatatggcccttccctcacatttgctgtcccaagtgtcccatggcagtgcctaagcaattggtgggatggatttgtgtctataaacaaagttgcaagggagtctggaaagggagttttaactccaacttcttcaactagaatggtaggatccaggggcagcattgctccccaggggatgtttttacaatgtctgggatattttttagttgtcagaactggaagcaggaagaagtgctactgtcatctaatgggtcaaggccagtgatggtgctgactatcctacaatccataggacagtacctaccacaaagagttacctacccccaaaatgtcaacgtgcccaggttgagaaacgtgacctagctggaaggtgaacaggaactaaatgagtcagtttcagatatccaacacaaatacgtcacttgtttctgttccaaaagtattataatttttgtttgagctaaaaactagttacagttcattggataattgcctttcatcccttcaatatgtgttcccttgaaatttgcatccatgcatcccacatggcacccctattgattatttcagtgactcagaagacttcattattcaaaataatctctaataagatgtttagggagaaggaaaaataaagtttctctccacgttacgtttttttcttgcacatgtactgctttttcataagcacaatcttattaatagaacaagtcctctcaaaatggttgccttttctcccttcatcctcccccaccagtaatgtagagctgttatttggctcgtttttctttttcctccagagg

SEQ ID NO: 84241 - DNA, 1048 bp, Homo sapiens
tttttgtatttttagtagagatggggtttcaccatgttagccaggctggtctcaaactcctgacgtcaggtgatccaccctcctcagcctcccaaagtgctgagattacaggcttgagccacagcacccagccagaacttcatagtttactcttattattttctcctaaccactaggttccacacttctggccacctgcctttatctcctgccccataacctaacctgttttaaaatacttattaaacaaagaaaaataaacaagaacaaatggagaatctttcactatgactgcaactgaaaagaggagtaatggaaggacatgtactcttcccatatatttttaaacaattactgtatctgatttttcatttttcattttttttttttctggaagaaagagcagatctggataaagtcagtatacaatgtggtctttggtgacagacccaagttcaagaccaaggtgtatgcatgggtttgttcaagttgtctacccttattatcccctcagtgaaacatgattaaccatgcttaccttgaagagttatcttaaatatttgtgttaatattatatatgtacattacatggtaagtgctaagtaaatggtacatgtgagtctttgctctaggcaaggcgctgtgctgaatgtttacatagatgatcggatcctcatattggatcctcaaaacgttcatcaaaatgggtaggattatttttatgtatatttaacaggtaaggaaaatggggtttctggaggtgagtgactcactcaagatcacgtggaatcaagcagagaagctggggttttaattcagaagttctttaagctacagctgtaattgagacaagaaccgtacactgtagtaagattaatgtaaagatttaaaaaactgttcatatcgttcatctacataaataaataatatttacagaaactcatctctgcagactaaagtactttaaatatttaatctaatttattggttatttatttaacaaatacttttatgggccttgccatgttccaggcacggttgtaagcac

SEQ ID NO: 84242 - DNA, 1252 bp, Homo sapiens
tttttattctggggtgtcctttggccacaatcctcaggattattttttctctgtgctgttcactgtaacatcgtccaccctctgagatcttgcttttcagtctactggtatctccacttctctctgcagcgtgatgtctagtcagagtttccattctgtttttatgaccctgggaggactgggagagatctgtgaggtcatcttgtccaccctcagccagggcaggagtattccctaatggtagagtcaagtgtttggtttggtcttgtttctaatgactcaagtgatgaggcctggggacgtcccttgggaagctattctgcagcctaataactttcattctgtgatttttttttgtatgtgtctaatattcagagtctgacacaataaggccataaagagctaagtctgtctatggtagatcttcacctgggaatgttctcctaatagtcacttttgttataaatcttcacctagcatgggagttaagtgcattttaaaactagacctggggactatgtatcctaaaatgcaaaaatagcccccaaaatgaaaattaatgttgagaatctagtcaatctgccagcagtacgtacataactgttctgtgtatatttcacatggccatatatgttttgcttgtgtggtgctaaatgcaaaggcagagaagcttctgctattgaatgcttagcacagaactcctgtcctccctctttgaaattattccgacagttgcccctcatttggcttgccaaggagtaagatcttggcttgtgtgtttctcccatgtgtggtgtatctgtaatctcggtcactgttgagagcctggtgggaggctgattattgttgagggaaagatctgagagcagggccaagaaagggaaagagagagagaggaaaaaaaacaaaaaagaaaaagaaaaaagagaggtgggtagggagggaggagagacatggacccacggggaatgggaagagaaatagaaatagggaatttgaaatggaaataaaacaaaagggcaggaaaggaagaaataaagagaatgagataaaaggaaaagaaagtgcaagtagatttgggatctatagattggggaaagacattcatacagtcaggaccagatgttcactggaagttttttccttctggatccttctttggctataggaatctggttctcaaagtgtggctcccaggccagcaacaccagcatcactcagaaatctgttagaaggccaggcgcggtggctc

SEQ ID NO: 84243 - DNA, 1026 bp, Homo sapiens
tttgctaattgtgctagaaatgaaaaagaaaatgcaagtgaggtcagatctagtgtggtacaaatgaacttgctacttggtttgctgccaattgctgccgaaacaggagttatttaaattagtaaataatttttgaaatcttcttagaatgtcacaggccacaattcaaattcacagaccaggaatggttattatttctatatatcttaaagttttctgcaatagaaatgcatttcaaatataagctagaaaaaaaaaatgtgaggccttattgtgtagataaaagtgacaagatgtccaaatgttttgaaacgcagtgatttatttaagttgtagaaagcttggttttatttcttgttgcatcgtctttatccttagatcttaatcagaaataggaaaattttctgagagaaaattcacgagatcattcatgatgagtcactatatcagttactttaaaaaaaaaaaaaaagatcctgacaaatcctactttttcaggtcctgatgcactaagtctcattcacttctttctatttttcctctctctattgcatattaacccaccatattgagagaatagaaacttttgccttcattatatcacctttacaccccaggacaggtgccctcctcagcggagacaactgtccccctccatcctgcaggagttttgcagccatccttccagccactgcttctctaccggggcaaattttcccccaagggataattgataatgtctgaggcatttttaattgtcacaacttggggaaggggcaagggattgagggagagtgctcctggcatctggtgggtaggggttagtgatagggttcggctgtgtccccacccaaatctcatcttgagttgtagttctcataatccccacgtgtcatgggagggacccagtgggaggtgattgaatcatgtgtgcagttacccccatgatgttttcatggtagggagtgagttctcacaagatttgatggttttatacgatgcttttcctcctttgcttggcacctc

SEQ ID NO: 84244 - DNA, 1057 bp, Homo sapiens
tgaagaaagacatgtttgctttcccttccaccatgattgtaagtttcctgagacctccacagccatgccaaattgtgagtcagttaaatctctttgctgtataaattacccaggcttgcatatgtctttattagtggcatgagaacagactaatacagtcagggatgctgcagaacatctccaaacacacaggactcccaccctctacttccaccccaccaacaaagaatgattcagcccaaaatggcagtagtgaccttgttgagaaatgctgttcaagccatacgtcaccattggaaggttgccaaactgtgctttgcacacacatgctgtctgcacgccttgtatttttctctttgcttagtcctgctcatgctctctaaacaccccagacatcatatctctttaagaaactctggctgagtcccataatgttctggggcaacttctgtcttcccttttccctctggcaaagaatccttgaccaaactttagctcagctcctcagagcccacttctcaactagaccttgaccttgctcctctctccttgctggatcttcatagtccagtctttgtaagagtcattctaagtcagtctagagagaatcccttcacccttcatgtctgatcacccttgcctgccttcagcaaaaatcctgctaacttggttaagttggaatactcctacccttgtggttccttgtagtaatttgcatccactgaccctcccactcccctgctactctgttccttgactataaatctccagctgtctttattatatttggagttgagccctatctctctcccctattgcaacagccttgacccctgttgaaataatcctgcataaagtcttccttaccattttaacaaatgtcaaggtaactttgttttttgttttttttgtgtgtttttttggagacagggtctcactctgttgcccaggctgcagtgcagtgatgcaatcttggctcactgcaacctctgcctcgcaggctcaaatgattctcctacctcagcctcctgagtagctgggattacaggtgcccgcc

SEQ ID NO: 84245 - DNA, 1034 bp, Homo sapiens
aaggatactcccaacctggttctttgtcttgtccctccatctgggtgctttccagtcacagcctggatgcatgtatgaataaacttctaccattaagtccctgaattatttaagcactgccagtgattctatataaaccgttcagtaaaatgaatggcatatgcgtatgtttcaagagctccagcagcctacccaggatggcttgatgttgtctcttagcaccgtatcaatacctgggggttttcaaatattgcaggtggccgaagcctttgtgttgaggtttctgtagtgtttatccatttgtgaaaccaggcctcaatctatatgtccaacgccattcgtagaccccctttgataatctccactaagcagacatactcgatacatcttcactaatgagttctgacttcataaaatgtattaatgacttctttttgaaagtaagagtgctttgaataccagtcgttattgctttagaagttcataaaagcaaaagcacagtatttcccccagtgtttgtgcgataagagaatagatgtaggtccagcgcctagaattttagctatgcttctcttgtttgtgattccaggtttcagactgcctggtagaaggaggtcacttctgattgtcagtgactttggtgagttcttaccttgtaaaagatttacaattatttcattttcaacatagctttatcttatgacaaaggtgacagaaaggaaatctcctaagttggcctacagggtgctttagaaaacatctggctgggcatggtggttcacacctgtaatctccacactttgggaggctgaagtaggctgaagtgggaggatggttagagcctaggagttcgagaccagtctgggcaacaacgtgagatcctgtctctacaaaaaataaaaaaaattatctgggtatagtggtgtgcacctgaagtcccagctaactgggagtctgaggcaaggaaattgtttgagcctaggaggttgagagtgcagtgagccgtgttgctgccactgtactccagcctgggc

SEQ ID NO: 84246 - DNA, 1018 bp, Homo sapiens
acagaggtgtgccccaatttactgtcagtgcagccttcacaggcaggaaacccaccaggtccaaggaaggggcactcagctgttacctcctgtcataggaccattcctcactgtgccatcatattatacttccatatcgtgtgtcttgtggcattcctgggcctgcagtgagcctgtggccacctcatagtcttgttggccacagcctctagaaccagggattggaggaacagccatcgctagcatggtgcttggcactgagcgggtgcttagtgaatatttattgaatgatttccaactaatggaagaaagctgaatagcacaacacccagaggattgaggtttattgaaaaccaacccaaagggctatggtgaaaatcatctcaaaaggcagagggcaagaaattgatatttattgagggctctcagtgggtgttgtagggggaaggaagtacaatgtcctggagctaggctgcctaggtttgaatccagggtctgccagatgtagatgtgtgatcttgggcacgtttttcaacctctctgtgcttaatcttctcctctttaaaggtgggctagtgatagttacctcacaaggtagctgtgagaatgaaataatgatacataaagcacttataacaggacctggcatgcagtgagtatcagtgggtatttgctgtggttatttagttatctactttacatgtacatgtaaagaactagggatatctgtattaagacagggtcttgttatgtttcctgggctgatctcaaactcctaagcttaagtgatcctcttgccttggcctcccatagtgctggcgtttcaggcttgagtcactgttcctggcctacttaccttctttttgatcttctgaagtcaccccctccatctgacaggaggttgaaggtccgatggccacataggtggcagtgctggaatttgaacccaggccttcctcccttacctctctctacctctatctcttctatctacctgtctctactccctctccctact

SEQ ID NO: 84247 - DNA, 1018 bp, Homo sapiens
ttctggaaatgctctattattttctccctgttgactcctttctttcaggcaagacagccagcatgttgacttggaaaacaactgaggctgagcagtttcagagcattgacattacgtggcttcttttgtgggccaccccaactcttttattttttttaattgctgcttcttcctctaaaatacaacttgttttttttttttttaaagaggaggaagccttaaaaaccagcgacagtcttggttttcttaacctgtccgccatttaacatttctagaagtgcaacattgcttctaaggtaagggcaaggaccatgacttttgcatgctgaaaatgagctgcctggtttattgagttagttattcctttttagtgccgcagtgttttcagtgttagagaaaaggctgtgattttctttgatattaaaaagccaaccacttatattttccaaagccatttgcattcagtctgacggccgctaaaaatgtatgtggatttttcatctgagaggttttctctatgcatattgtttacatttatcaaatgttgtcctgcccagtactttatattcattgttgcttccggacctagctgacaacatggtctatatgaaaaacaacacaaaacaacacataagagagtcaaagggacttctttggggagaatataaaaacaagccaaggcgaaagtggctgtaaaaatgcgttgtgttcccaagtggaggctccttctttgttctgtcatcagtttgtcagttgtcaatcaaacctcccttcgcctcacacgtttgctaatgtaagaagtgctggctctgctcttagcctgcagtggtgcagcttaaaaattctgggagggtttcatgcagtaaatacttaaagtaacagaaaaggactggggaaaagctgatgttgtagctgtatgatcacccatgtaaaactgtttatttagttatttatttatttatttgcttttttacttccttttctatgcctttggtgactttgtgtaatgctgtatgta

SEQ ID NO: 84248 - DNA, 1042 bp, Homo sapiens
ctttaaagcctgctggctaaattaggtgggaccttctttgtgtcctctctgttcttgctagtctggcctttgtataatagggaagcagatatatctggaagcctctaagtgtgcatcatggaaattgtttgaaatgttcaaagtgatgtggatgtatatatacgttaaaaaatatcactttcccttttgaagacatttactatttctatggtttgtttagcaacagcctggctgaatagttcttcaaaaaataggaacatgatgctcatatctggccactgtatatgctttggagggaacttgaagactaggtggctgcagccactcagaatcttgttgaatatttaacatttttttgtgaatgtatcaactaagaagactatcaattttagagcatacagctgttctagaataatagtttgaaaggccagccgcaaagattgtggtgattaaagtgtgagcagatgacggaatgataaaccttaacgcttaaaaatgtgtttttatagtgccattcctatataacatcgtctgataaatgtatttgagacgaacaggccaaatgaaagaaccttccataaggggacgcagcacagtttgaatataagtgttccctccaattcccatgttagtgctttactatgagtattgaccagtgttaaagagtgagcgcacaggagccttctcaaagcctcctgcacacactctcccactgtaaatgcacgagtattgatcacaattattccgtaaacacatcttacaaattccctcagtgcacgcgccatctaaattaatccaaattcagaacaaagctctcttggaaaaggaaagagcatctctttcaggagcttccctcttggacattaaatcttccataatctgtgctagttcggcaaagaagccccaacgtcctcccaatcatagggcgcctgagctcttggtctcctatatcttatattcattatagatgtcttatatccattcctgtatcctttgtgatgtcttgagtgagaaaatgctctgaccaataagccaatgttca

SEQ ID NO: 84249 - DNA, 1032 bp, Homo sapiens
atagtatttggagttaaataaatttaatgtttttttgctcacttgagttggagccaaactttataactgaataggagggttctctttcccatatttgagtagaacacatgatgttcaataaaaatgaatttgccagtcagaaaaatttatcttttagaaaattaatacactgagccaagcatgggtggtccatgcctctaatcctaggtactctggagggtgacggtgggaggatcccttgagcccaggattttgaggctaccctgagctatgatcacaccacagcactccagcctggccaacatagtgagacactacctagatagcttaggagagttccaatgtttctgaaggatgtttttttaaaagaagtattcatttaggtgacacatatttattgagacactaatatatgccaggaattattctattggttcctttggaggagacatgaataaaggcatggatgtgactgaggaggtaaaggtgaagaattggggaggggtggatggggctgactcatgacctaaagaacatggcatctggggctctcttgaaataatctgcactaaccactcattcacatttttttgagtctgtaagatcccaggcactcttggtagcaggggggttaggtgggtgaagggacaagtagaacttagttccaacagagctaaagggtattggtgaagactatgagcccctcatgacgcacaactggtttcaaatccaagcccatcatgtatcatctgtgtgattgtgggtgatctctttcttcccaaagcctgttttcttgcctgaacctgatcaacagaaacagtcagtgcaggtaatgtgtttagcacacagcctggcatacgaacttccacacaaaacgggtgaccatggctgaagggttattctggggagccttccctgtggaagccccattaaccatccctgctcattcctcccgtgagaccaccatttgctaaatcttctgtcaggtgatgtgggatccaagaagaaacaataatcagaagcttgccttac

SEQ ID NO: 84250 - DNA, 2051 bp, Homo sapiens
ggctgattgagtaaaagtgaaagatcatcccgtcaactgctggcctgccgcttgtgttcgttaatagaacatttccctctgattgtcaggctttcttagcagctacagaatacttattttcttctttatattataagtttatgccactgcaacattttagaatcacctgggaagcttttgaaaactcccagcatcatgaagcatggtctcttgccttggggtcagtgtctgtcaacgtggcttttgctaaagagccttcccctatgagaagtgaggcaggagaaggcggagtgaccacaagatgccctgatggtgccaagctattattataaatgaactgaagccacaacagaagtctgctaccttgttcttatctgcatgtttctctctttccagcctcatcttctactaccttcttctactcccacacttcttctaccttgattcccagccttcttttcttttcttttcttttcttttcttttcttttcttttcttttcttttcttttcttttcttttcttttcttttttcttttcttttcttttctacctctcgggattctgagagcatcctgtaatgttggaaagctttctgctaatccgggcattggagtgctctctgggttcactcctgacagttctttattgctttcccacctctgccaaggtcaaaaatggaacttgcttcttgttctcgtatcactcagactaagcagttgatgtaacagataacccccaaatttcagtgatttcacatttaatctgtaaaaaatgaggatttgtttatagccccaaagacagtctagtttggattatttgaggacctagacttcacctgcacagtggtttcaccatccatccccccatggcctccatggtaccctctgattcaggctcagcaggagcgggagaggatgcataggactacatgttttctgggccaggactggaagcagcatatctcagatccaacctctttaccttggcaaaaattcaggatgtgcaggacgaggaggaaaatgggagtagtgactatttagccagtctttgccacatcccggttcatatctcactccgtcatttataacctgtaattaaatctttagtgagtacctgtcacaggttgagcagtcttctagggcctctggttaccagcaatgaaaaaagccccatttggtaaaatacagtagttggattcattatctctgtgattaacttgcataaaaaagagacagttttcattgatgtgacctttagcaacaactcctaaaatattttttttccttcattcctgcttttccttgttccagaagaagttaaggtaaatggcttttagcacattgcacccccagcttttagcacattgcattatcattataataaatgtttacggttactgatattattatagttctttatcgacattattacagtccattatttacagtccttatgttatttaggaggggaatttggggacattgacccacttatgtgtagtcccctagtgaaatgacaagaatccccagagctgggaaaacatttccatgcaattccctctcagtttacatcaaaatcagctcgtcacccttgagattgaagctcgcactctgtaagctctgaataaatattaaccatctcctgaaccctgaaggagacattttctggggagcagtgatttgatgatttgatgaagttgtgtgtgtgtgtgtagtttttcagacatatctccatctgattcttacctctaagagttcctcaagggcaattgtgttgctttgtttttccttgcatctctggaggctgagcacctagtagtgattccaggtacgtagcaggtattttacaggtgcttgttgcattaatgcactttattggtgatatggtttggctgtgtccccacccaaatctcatcttgaattgtagctcccataattcccatatgttgtgggagggaccgggtgggagaatattgaatcatgggggtggttcccccatactgttcttggggtagtgaatgaatctcatgagatctgatggttttataagg

SEQ ID NO: 84251 - DNA, 1024 bp, Homo sapiens
gctgcggaagggagggaaggcagccttggaaaactgatttccgttgccctctgaccatgagaagatccctgtttaggagctagaattcagagttccacgtgtagagggggattccacagtgtgtggtgtgcagagagcactcgtctttcaggcatggggcgccgtttcatttctcctagtgctggaaggggacttggtgaaattgatttggcaaaaaggttaatgtgttgttatggctgccagttggccgattgaagcgctagtaattggggcaagggaagcattcaatttgacacaccaaatgcaggtccaccctggtggatatcttggttgcagcactctgtgtgtgtacgtgtgtgcatgagcgtgtcttagagatgcttttgctcctcttataactcctatgataaaaagagttgccattatcatcctttgtctactcaccagcccccaccagaaaccctcacagaaaaaataagagtttattttttcactatgtcacattgttggagaactgtgcaaatacaagcccttctcttacaggccatgggtctcctaagtgggatacaccacgatgatccactggggcagtggccagcaaagtccctgtccagccagccactcgtttttatcaataaatttttactgaaacacagtcatgcctgttaggttaggaactgcctagcgccacttcacactgcagtaggagagtgagtagttgtgacagagaccatttatcccacaaagcctagaatctttattataatcctgtaacagaaagcatttactgactccttagcattgccatgtttagcaaataaaattgcaggatgctggtcaggcgcggtggctcacgcctgtaatcccagcattttgggaggccaaggtgggcagattacttgaggtcaggagatcgagatcagccgggccaacctggtgagatcccatctctactaataatacaaaaaatagctggcgtggtggcgcatgtctgtaattacagttactcgggaggctgaggcag

SEQ ID NO: 84252 - DNA, 1064 bp, Homo sapiens
catgcttcttagtggtcctcttgcgtagcagcctaagaaactccaagtccatctgcgccgaagagtattgaacttggccagagcacttgggatctgcagaagtgtcccctgtctgttagttttttcacagactctgctctttctctcccagaccggaccctccactcctctatctcgcatttatccattgcaccccgtgtcattgccgaattcctgagctacaaaggtgaacaggcaccaaagctagggcagtgtccactcaatacatatctgatgaatgaatgaatgaaccttgtctaccacagatagctcaccacaaataaacattttaatctactataaaatagctcaaaagactctatgcaaataattactgttacccagtggtggaagtgcttcactttttatggaaagtctttcactcatttctatctgcagtatttactgggcatttttccacgccaagccctggggatacagagttaaataaaatagaagcttaatccaggcatgctggctgtaaagttcacctttcggctcctttctgccattcttattagggtcttgccccatcttggcagcaagcctgctttaccattggagacctcagctctgattacaatacgtccgtgatcaacatgccctaactggttagcagatggcagctgcatgaagtcactgggcccagataggaatcaacaagggagattaggtaaagtgcttatttgaggtgctgtcagggcccgtggcaaagggttccctcattccctctgcagttatttttcatgcacactcggattacactgctcggtgatattacatctgcatgcgtcttgccctctgacacggcaaacacagatgctgcccaaatccttgtaaagccatatatcttaagtaggaaggagcatctttgcaggggaggtgaattgatttgcaaagcagcctgacacatggtctcttatttctccttgcaatcaaataattcatctttatgcccgtagggccgtggtgaaatttgaacctgaccaaatcaacgactgcaaggtttatttgtagcagtggga

SEQ ID NO: 84253 - DNA, 1051 bp, Homo sapiens
tgtcctggtcaccactgtatgcccagcacctagtacagtgccctgaacatattaggtactcattaaatacttgttccacgaagttgttatttggtattcacgagttttgtctcaattccttttgattcttcttttcacccatctcatgttgacttaatttctccagcattcagttaagacctagccgaagcataattgtcagcatagtagagctggctctcctctttctaattgccctgcagagtttttggggagtctgtatgcaattgtgtacaccccaatgccccaaaaccctcttctatttcctttagcactcttgagctgaagaagccccactctccctctgccccacatctattgtgggctgggatacatgttgggcctctgcccagatcatgcttggagtggcaccagctgcgtaggatatgtgaaatatttgctcagagagatccagaagggttgatgtgagtaggatcagctggtgctccaggataaaaatcgtgtcaccacttttgccgaaaagtcactgtgtttctcctgtactcagcaggttacagggtgccatattgttctcagtcttccggctctaccctgttttgaagtgcggccgggtgttgttaaacggctccgccttcctgccagaatttctccgtggggaggagctgccacccagtccagtgagtatggccttttggtcagcattgcagaacctggcaagtcctaattccctgtgagcttgacacaggaggccgcctcctcctccaggcccacttggaggcattctgtcctcttgttggaagggaaattggtatggtagggaggtgcttcttctgggagtgggtttgtaaaattaagactgttttcatccaaaccagttacctgtttgtctagaacctgtgttctctgctttctgcctcttgtgttgacatttctcctttggccttcatctgttactcgctcacatgtgccgtgccccgggtgggtttggaagccatgctgctatggtttgattcctggctttccaacattacctttgataaccaagacaagt

SEQ ID NO: 84254 - DNA, 1051 bp, Homo sapiens
tctggactgtcagtcattagcactccctatccctaaggtttcaggaatgttcagctgtttcctagcttggaatggaccatcctctggtcccacccatgggtaagtcattggctgcagagcgcagacatttggctcccctcgggacattcctccctcatttaaaacaatgaggcgggcagcagggtactttgtcccttgtgttagctgaagttggaggatgctgtgttgatgggaaaacgctgttactattcttagactagtggggctctcacttattcatagctccgcactcgtgggtggaatgagaagttataatagagtgcaggtgcctctcattgttttccgctactcactggatagtgtttattaaaaacgaaatcacagtggtgtgtctggagttgaagtctgaacaaataacccaaaatgaggagtccctggaaggtgggcaggaggcgacaaacaaagagaagcaaaaacaagtttgagctaattgggatcaggcagtactttgcatgtgagttctgaacagggagcttggctgcaaaacgattattgtatttaacttctgttggcatcattcgcatacttgtatgggagatccagaattggaatttaacacagttttcccaggcccttcatggaatttgaaaacatgactctgaaagcatgtggctgaaatgagactctttcacactgtttaaagatgcatgtgcatatgttggtgtccacacatcaacttaattttttcatgttccttgaaggaagcccgtctaggtccttctgaaagaagggctggagatttttattaaacattacttctaggctgggtgcagtgactcatccctgcaatcccagtactttgggaggccaaggcaggcagatcatgaggtcaggagatggagaccatcctggccaacatggtgaaaccctgtctctactcaaaatacaaaaattagctgggcgtggtagcaggcgcctgtaatcccagctactcaggaggctgaaaaaggagaatcgcttgaatcagggagtcggagttttcagtgagccg

SEQ ID NO: 84255 - DNA, 1009 bp, Homo sapiens
cccacccccacgaacatgtagtttttgggcaacttttcgatgagtaaaacagggcctgacttttaccccaaagtgatgttcttttgtggcttgtctactccaagaactgagatacccagactcatttctcatctcttgttgaaacagagaagtcactgtagcgccctccggggggtggggtatcaagggagagtatgggctttgaaactgctcatcccgtctacaaccttggagggcatggtgtttcactcccccacctctccccacaacttcaccctgctccaatgaggatgaaaatgtctttcttatagatgggacaggagccttagtaatatggtgcgagcaatggttcacataggggacaggtgttcattcaatggtgggtattattataataatcattagcatcattgctagtgactttatttttcctttagccaatggagcagtggcttttggcccactactttcgactgaatctatgagtgaatgtgatcctccgttttaaccctgtcttattggatgttggtaaacagtatatcatgagcccctgtaagagcttgaatccttcaaagacaaggtcagtcagtggccatcactactctaaacgtaagaccctgtgatgactgacacttactaggtttctcatttatttatttttctctgcaggacacagctatgtgttccaaagatggtcttaaacctataggagtataacaccatggctagttcagaaaaccttattccaacttccaaacttagaagatactgggaagtaaaagggagagaagggaatgcatggcttgggctaaaaaaatgattctgcattcatctcagaaggatgttttccagtctttctctagaaacaacttttgtgtctaaggattgtgggtgaacaacagcagcacaggctacattggcttggctcggtggttgggatggtttggctcttactgggcagtaagcacagtggctgggataggaccttggcatctcgtgcgaagcccct

SEQ ID NO: 84256 - DNA, 1059 bp, Homo sapiens
gagctgttttaaagattaaatgagataatagatataaagcacttagaagagagtttggcatttgctaggctcacagtcagtgtcagtggttcccaatgttactgttttagctgcccccagtcaggtggttgatgagttggggagcctggtgggcagtctggaagagagcacagtgactgcaaggtcagctcctgaccttcataataaggactcacatgtgtcggtcccaaggatccccaagggatactcatggttgaaggtgtctatgtgttctccttggtgtccagcgaatgcctcttgacaatctgtggtcatactcacaacctatgaccacatacgaggaagcgaggtgtcccttttgcagttgttcagaaggtcccgtgggcaggagcagccagaggaacatgaaaccagctcgtaggtggtacttgtggcaacagcagttatagccaaggagaagttaaattctaaagacttgggcagtctccagggaatatactaactgagaaataacatccataaaaataattcaatactagtatgtaaaactaaaaacaataaccaagtgtgactggctgtctaagaattaagcaaagtaagatgaagtgtcttttgctagcaggcgctctcagcaaaggagataaggctgcagtaattctcttcccaccttcgatgggcaggtgcaacctttggctgcagaaattctcacttcccagcagcagctttgagcaccctgctctgaatgtttcttgggcagcagcagctagggaagaaactcagttaaggctgtttgaggacccaaggtggtctcactctgcaacacacatcggcagccagtggtgtgctggtaaatgattaacaactggctctctgaaaaacaaacaaacacattgtgcacctatacatgtacacacacagcttattatttattatttctctgaaatatgggtagcatataatttacaaataagaagaagaatagtatacacagtactgtttcttataaattcgagatagtcagtttttaccaaatgcttctgatttttgctgcgctattat

SEQ ID NO: 84257 - DNA, 1107 bp, Homo sapiens
aaggtagaaacagaaaaaaacaggcagaaacataaaaagctcggagatggcttcctattgcttcttcattctgggccagagcaaatcatatggtcgtactccagggtgaggaagtatgtcccacttacagactgaaaaggtgctgcaagtctgcacggcagagggcatggataaggggttcgtaaaaacttagggccatttaatacaaatttgtcacatcacactggcttggattgattttgattcattgctctgtcgcccaaacagaattataattattttagtaaggaaagaggaaggatacctttggggcagacaatggatagagcttactatacaagtctatagaggcatctcacctgtagaaatcttaagatgagggttagccaaagcaaagagtggttcagggtgggaaagccaaggaaggccaggatcctcaccaagattgccagcagggagctctgattgtccacagctctgctctctgctcaccccggggatttagcagtaacagaatccacactagaaggacagagtgctgtacagacagaaggaaagacgcagacccaaaccttgataaccatggcaatgcaataggaaatctctttatttcgttggtgctcaagtgataccattaagtcccttaagatgcggaatttccttgcccccgctgccccctttctttctttcatcttatctatatatctgtatctatatctaatctattttttgagaaaggctctcactctgttgctcaggctggagtgaagtgatgcaatctcaggtcactgcaactgctgtctcatgggatcaagtgatcttcacacctcagcctcccaagtaactgggaccacaatgcccagctaatttttatatttttttgtagagacggtgttttgccatgttgcactggctggtctggaactcctgggctcaggagatctgcctgcctcagcctcccagagtgctgggattccaggcgtgagtcaccatgccaggcccctgcctctgtttaaatgctcaaacttggtatggaactgcacagactatacggctgctctccactcaagaatacaaattgaacattgactttcctcattttttatc

SEQ ID NO: 84258 - DNA, 1014 bp, Homo sapiens
aaaagtgtatttgagagagacctgatgagttcaccactgcctctggagaatcaaatccaaaacagcatatatatgtatattttttagagacggagtctcaccctgtcgcccaggctcgagtgcagtggcgccatctcaggatctcggctcactgcaagctccgcctcccgggttcatgccattctcctgtctcagcctccggagtagctgggactacaggcacccgccacctcgcctggctaatttttttttttgtattgtttgtatttttcatatttttcgtagagtcagggtttcacagtgttatgcaggatggtctcgatttcctgacatcgtgatccgcccgcctcagcctcccaaagtgctgggattacaggcgtgagctgacgctcccggcctacagcatagatttgaggcatcttgaaggtagatgcagaagagtgggatctactttggatttttagattaatcactgttaagacttaaacagcttcttatttgggtgaaacatgggagtgtcaaaaataagtcactgtcactctttgccaacttcctttaactctttatacggctatatctccatagatatccagtttttgttttgtttttgtttctgttttcagttcctctccaaactgtcaaggacagtgccaagatctgcgaatatagaaagattaagagtttttttctgccttgttgggtcttctttctagcatgccaggaacatttttctcatcttttgaacattagggaataacacccaatgccaccctataatctcgagacagaagtggaggatcctcttaagacaagaaatctttcaaagccaaataatgaattaatccaaagccacttgaggctctagatagatcttagcagtcaaagcaataaatatataatcccataaatctaaactttgtggtatattcattaggctgtctgttttcttttctttcaaatgtttcacttaattccctgatataataaggcttccaaattcttggtgtttttcta

SEQ ID NO: 84259 - DNA, 1035 bp, Homo sapiens
gcaatttaattttcaggcttgctccctgcagggtgtcacttcaccaccttcctctgtagaaggtttcgtccaggccgggcacagtggctcacgcctgtaatcccaacacttcgggaggccgaggtgggcagattgtctgaggtcaggagtttgaaaccagcctggccaacatagtgaaaacccatctctactaaaaatacaaaaattaaccaggcatggtggcacacacctgtaatcccagctacttgggaggttgagacaggagatttccttaagcctcggagatggaggttgcagtgagccaagattgtgccactgcactccagcctggctgagagaatgaaactctgtctcgagaaaaaaaaaaaaaaagaaggtttcatacattttagctgacaagggcaggagctgttcctgctgttactaactggagtacattgcatgaaaccttgctgtttccttaaaccctgcaccgacctttacaaacagtgcctttactaaacacttcttacgttacccgttttgagtgtaccatctgcctcttgccaggaccctgaccaagaatttgaaatctcagaccatgatgacctccttgcccaatgcgtaagctgtcctccaaaacacacatttatgggggcagagggagtctctctggaaggaaacttcgtctgagccatggctccttttgcttcccctgggttttaatccttccttcccttcctgttcttttaaggaaatctgaaaaggagcaaaagagctttagaactgcaatgcatctgtctgaggccaaggacagttgtacgcagacctctctgccagtgtttcagtgaccctcctcttgctgcttggctgcctatgagtccatgctgacatctggctctgtctgcccaaatataaacttgagagtgacttccaagatatatacagggctcagaggttctctccccaacccattcactggccctgctctctctcgatgttcccaagtctcctgggtgaccttgtgtgtccttcctgggatattgctcaatcacc

SEQ ID NO: 84260 - DNA, 1075 bp, Homo sapiens
ccatgttcttttaaagggcactaatgatgcagcagtaatcacagtgctagtggaaggggagggcagaatgtgatgttttgggagtgaattctgtaagagaagaagggactgcgttcctagccctccagagcttgcagctatcacagcctggctggtggaggggcttgcagagctgagaaccactcagaatttgggggctgaagaccctggctgtctgagcaccatctctgtgactttcgaggtcatgttttccctccagccctcatttccccctttataagctgtgtcttagctagtgctttcagcaaagaatatctttaggctcctggaggattgatatcccctgaagtagcccctgaccagcctccaagatgtatcctaaaagctcctatggaagtttacatttcactcaaaatatctgtgttcatgtaaatgtaaaaatgatgtcttaagatgcttagcagtgaataaaatgggtgctctagggagatgcagtgagtttatcctgtggctttgagtatacactggtaccctacgtgggagaccccggtgcccatgcccgggtgcacaaagccagcatcagtgacctgcacaccaggaggcaggctgcatgatgattgggtgcaagtccttaggtgggtcactcagtctttcttttcttgagttttttcatctgtgaaagagtgatcataatactatttccattgagaagaagaaataatttatgtaaagcacaaagcataatccctggtattcaataagtactcagtaaatactagtgaaaataatgattataactatgacctccagaagcttttactgagcatctatctgtagcactgcatgtcaagccaagctagagtacagtctcttaggagacacaggggaggaaaacatccttggcaggttcgcatattggtgatctcgtcgtaattttctcaaatacccttcctctttcctcacttttggtgataactacctgtgttgctcttgtcacttttgcctggatccactaactcactacctaggtatctgcaacagttatccattgctgcctaacaaattaccccaaaat

SEQ ID NO: 84261 - DNA, 1051 bp, Homo sapiens
caaggatcttaaggtaatatatgggcttgaatccagtgtatcttgctccgacagccttgcttttgtcattatccaacattagctgtctttattatagtggccttcttaccacctagaaaacaagtgccagcattctagtaaaatttattcaccttccgagattatttactattttagtctgtagcttttatccctttaactacaccattcaaagcgttgtgcaaaatattctagtagtaaatagaggctttaaatccacacgttgataatggtcaaatcctcttaaaggggccagcaacaaaaatgactttaaaggggaaatattccttcaatgttacaagcgcccatgagcatgttagtagagcagttgtgtgttgaagaaagagaaggtggagtgatactgaataccccgtaaaatcacacaatcagcacttaagaatgttcacacagttgttcacacacatattgatatcagaccttatagcagtcctattggctagatcagttattatgaatgtgttttatagagtaggaaacagagatgcgacgtgacttgcctaagaacacacagcagttctgaaactcaccctgtgctaatctgacctcgtgaagaaattgagcaaactaggctccagggagaaacgaaaacaataacaacaaaaaatgtattgccaaaaaattgctagcagacatctagaaaaatgtcttcaacttcttttggtaggaaaagaggaaaaattcaaatctgaattcaacatatttatttttttgtttctgactttttacgtaaacagagctctgagttgtatcctcagatatatttgagactaacaacaaggaaatataaaattatgttactacctaagctgccacttcttcaaagcctcgttattcttgttcccttcaatgtatttcaactccaaaatacatagtgacatgaaaattgtgtattcacattgttctattgatttcgttgagaaagtgaccttgtatgcacacatgagaatttagagatctatatataccgcctggcctcttctttgtaagggta

SEQ ID NO: 84262 - DNA, 1050 bp, Homo sapiens
ggaggttgttctctagaacatagaagccgcttcttcatcccacacaatggaaaccagagcccagattatattaacaagaagttccagaattgcagatggccctttgctgcttagggaggggggagaagaagaaggagaaaaagaagaaaaagaaaaagagcaggtggaaacttaaaaaaatgtttagctgcatgtagatggcttttattataactgctaggctgaaccagaagacttgagctatgtaaaaatgtcacttgctcttatcacggttcatagagattacctttcaacgcgagtttcattttcatttcttccaacacttagagaagtgaacgaggcagtgactcctttattccctaaccctcacccagcaacttgctttttcctctgtgttttgtgtcattctgtgtgatattgcatcaaggcaattcacggcagtggttgaaccaaaagcaatttaagtcaaaaatggacaaatatggatgtcacttataaggcttgttcaaaggcctttgacatcactcaaagcctgaacacttctcaggagtgggatacttttttttattattattttttattttctagcagtgcaagattgaagatttaatacagacctcttaggcgtctgcgtggttcttacctagaaactgtttattggtgaaccaaatattttgtatcttataccaagaaagaggggctgacaaagattgagtgattagaaatccaagtgaatttctatttattattttgacttggtaatttgtaataacaatagccaccatctatctatacttcctagatttgggcatggtgttaggagtcttatatttattattttacttaattttcatagtcatcctgtgtagaaatatcaataaatataaaggtaagtattattgtccccattttacagatgagaaaatggagtcccagggacctacctgctcaagggcacagaaagcttgaatgagtaaatttactttgtgttgttccaaaggtttctccaaaggtctttgcacctcccaaggctattctcattttgagaaa

SEQ ID NO: 84263 - DNA, 1027 bp, Homo sapiens
atatatatgtggttttttcaaaaaaattgtgggcacttagtaggtatatatatttgtggtctgtgtttcttataaattggtaatcccccaggggatgcctgccttgttggtccaggtaacacacttggagtagcaaacatctagacgtagttctcaatagtaggactattgccagtggagggggcattttggaaatttggaaaggcattttggtggcctttggcacttagcaggtggggtccacgggtccatcctgtgatgccataggcagtccaatataacaaagaactgccctcgtcccggtaacatacacctgtgcccccagacattcatttcggtaaaaaacttgtttccattgatctgaccccagaattccctgtgcttatacagatacacaacgtgcactgggtcttccagaaatgcaggggccttctaaatcaagggaagattgtgtggtgttttgttccagtcttttaccaaggtctcaataccatcttgaaacatcatgcagcactgctcataatatttgagtcaccataatgtgatctgtctacatatgtagctgtttgtattcatggtgattaaatagttgggtgctagacatgcccttagcgagcagctcatgagagcagattttgcctgtttcttccaaaatctggattcagtgacatcgtgttggtagcttgaaactgaccgtggtgagaatatttacaccatggaaagtggcaaatgctactaataaggatgattgttttagttttcattttgtaattttcagagttggtttaccaatatgatgtctgtattaaaatatatgtaatgctgctttcaaaatgttaagtattatgagaatacattaacaaaactctggcgaattttttgtcttatgtttcttgaatccaaacctataagtaggtgcaaacattagacgatttcattttgggcttctgatacactcctgtccgagaagttacctttgaaaatgtgtactattttattgtcaattatgttttctttaaaaaaaatt

SEQ ID NO: 84264 - DNA, 1135 bp, Homo sapiens
atactgggactttctgtttcgttgcttacaaccctgtgaccactgcacgaacaaccctgagctgacctgctggagcatggtggccacataaagggagagtggttgccccagctgatagcctgtcggtgcctggcatatgagtgaggtccctctagagtcatctagctactagccaagctaccacctgaccccagacacaccagagaaagagcacagcccattcgcggactcagaaactaaatataagaaaaatggtcactgttgttactcactgggttttgcaggggtttaatatccagcaaatgccaatgaattagagttgacatacggaaaacaagtaagagtaactttgtacaccgtgggctcccaatcagtgctgcttttcgttgttgatgttgttgttaatgttgaaaaaatcttcaagtcatatttgcccccacagaccttcccagacagtctaactaaatgcactgtatttgctaactgttggaacttggcttttggactagaccagcacctcgagaaagaaccactgttaaaatgtaaggctctgagtgtttatcagctcacaccaaggaagagagagctcaggagcgactgggcatgaggtggagtgagcactgtgaatgctggggaatggaaagtcctttatgtggtgttgcctaagggtacggggaacctggcctggtgttgggaggaaacagggtgcagagtgggaagggcaggagtatctaagtggccaaatttagcctaattaacagatttgcctagggctgaccctgaagcagaaagcaaagcctagatcagtctgctctcctcctaccaacagggtaatgatgaggttgaaccaccagttctcaatgccatacatgagattcccaaaatagacgggagttacacagagaccttttttttttttaacctcctctgagattttttttaacctcctctgagattctgtatttccttaatgacccgaaaaatctatttagcccagtttttatccttgcagataagttagtacgcttctttttctgctggttgtgatcatatttctatttaggggtaaaggtgctgaaaatcatttgctgcgatgactcgcaaagacatagttaccatgagcagcagtaggatg

SEQ ID NO: 84265 - DNA, 1262 bp, Homo sapiens
aaatttacactccattattttatttaaaaaaatcagtatgattcatcataaataagtcaggactatgattgacagtctacctagaaagattaggaaagtggggaccaccccccaattattacctttgtttttacaagtgtgtttaaatctctttctgttaatttacaatttgaaaggtgggtgaggagaagagtttgaaaaatagattactgtcttcattaatacaggtttgacctacaaagtcttcacgtacttaatgattaaaaaccaaagtactaaataataaattataagaatttataggagtcatcttcttgaaattagcttactgaatgttcttatcataataaatctgagtgggtgtctaatttagtgttagctgactaaaattgtatgttgcggggaggaaaaaaaaacacttttgtttgaagacaaatgcagtgagtttaatcacaggtgatctgaaaggcaccacctatcttttgctatgttcactttgcagaaactttggcgaaactggctgaatgaagatcgattccaatttgtaaatgtggcagacaataaaatttccccaagcactttgatgatgtttgtgttaatacttcctgctcagagctgtagcccatcagattctagagctaaccgaagagggaagacaacctgtcttctcccagtttccagcctgtatagacttaatcattttcaaggtttaaggttgtttttgtttattggttggggtggagagagacgcaccacctctcctaacttctgtgtttgcttccctcatgctgtgtggatcagaaaagatagcctgttcattcatcacttatttcctgacttccaccttgggtctgtcagattctgtgtgaagcccaggggatccagggaaaattgaggcccagtccttactctcatgtaactcgaagtcttttacagaagacagacttgggaacaaatcaatcaaaatgagttttgtacggaaaaagtcggtgcacgcacaaggtacccaagaaggaggtgactaactttatctaactttacttgcagggcaaggcaaataattagggaaagtttccttcagacaggggaagacaaatatgagtatccagggaggatgtttctggcagagggatcagcataggaaaggagttcagggttgaaaagagtcagtctggtccctagaaataatttttttggtgcataaagggccagaacagaatgacagaggaaaatgataaggatttaggcagggactgcgttgg

SEQ ID NO: 84266 - DNA, 1041 bp, Homo sapiens
agatctctttcagtacaatgggaaggggcatataattcagtactttaaaaaaatgtactatcttatgaaatagaaatatacatgtacatagatttaacacacatattcacgaacatacacatttacatatacagtcatcattgcttagagaggaggttgtgttctgagaaatgcttcgttaggccattttgtcattgtgccaccatcatagagtatacctatacaatcctagatggtataacctgccatactcctaggctaggtagagcatattgctccctggcagcaaacatgtacagcatgtttctgtcctgaatactgtaggcaattttaatacaatgctaagtatttgcatatacaaacatagaaaaggtacagttaaaatatggtattacaatcttctgggatcaccattgcatatgtggttcattgttgatcaaaatgtcattatgcagtgtgtgatagtgcttaaataatttatctcacatatgcaaagagttttggctaagggaaaagaaaaatgtgaacctcctaatagaaaaatgggcaaagataatgaacaagaaattcattgaaaagaattggcaaacatgaaaaaattctcaactttatttttaatcataaaaatggaaattgaacaatgagatactgtttttcaccatgacattggcaaaagttaagaaggcagataacttccatgttggtgagcatgtaagtataaaaaggtataaaaaagaagagttgtcctgaatctggtctggaatagaacctttttttccatgatgcatgatgtaattcacagcctcattcctgataaattgcttaagcaattttctgataaactttaatgcgattaagacttgttctgagaaatcagtcacccatctacccaagctgactgtcggtcaagagtctagtgaccttaaaccaaatgttattttccttttgtatctagcctaacattgactatcttgtcatttcattttcctataaaatgcctccaccaaggctgaatctttgaattgatcactagaggccttt

SEQ ID NO: 84267 - DNA, 1829 bp, Homo sapiens
cttaacagcttggcaaacccagtggaacgctctttctagtttggggcataaaataagataacactctgaattcctacaggaaatcttgtaactctacttaaaattaaggcataaagtaggaaaatgtgtttcctctgtatagtcttattactttgcctgttaagttaactggttcctatttctgctggttcgaagaggtccaggacatttaaatagctcttctagaaacaaattcttttccttacaagccctgccaggtcagtgggttcagtaaggaagaaggttttgtattttgacaattccttcatctgttaatttagtcagacgaggaaggaaacgagaaaagttattcctatttcatccatctaagactttatatcccatttcaggctgattaaaaggcaaaatcgtcacagtaggacaccaaaccctctgtatgccctgcctgcctccccccctctgacccgcctgcctcccccctgtgagctttttccacctactggcctcttgttcttcttcagctgttcctcagacatgccaggtgtgttcctgtctcagacgctttgcctttgctgctccttctgcctggagtattcttccacgtagcaccatgagctgttcttctccaaaaggctttgctcaactgacactttctcagtgaagctgtttctcaccactcactataaaatggcagcctgcctctctgagccttgcaccctctcttccttttcctgctttgtattccttgtggcacttattatatcacatagatacagacatagatgtggacatagatagagacatagacatacatgagttttgtgtttattctcctattctctagaagaatgtaagtttgtaagtactgagatttttgtctcttttgctcactattgtacttcagggcctagaggaaggcttagcacgtggaagacaatatttattggaggaatgaatctagaaatatccttggatgtataatgtccaactcactctaccacacagcaacataggtagttttatatacattttatagctaagcccagcagcccaaaaagctaaatgacttcagcgcccacagatactcctggatgagaggggattggaaaccaggtctgttcaattgcaaatcccctcttgtgccttttacaggtcagatgattttgtttttataggctctagcaggtcccttctctttgcgtcaccagagaggaagatcccctaagacaaagcattccctgtagtttttagcataactagtactggctcagtaagtatccactggggttcggaatacaactgccctgcctcttgagcagccatgcctgcttccgaggtggtgctgcatgctattcaggaggacagaccatggatggaaatcctgagccacaactccttagcctcatgacattgggcagatgactgagcttgtctgagttacaataaataaaaataccatgctgaatgatggcctagcatgacattgggaagtacagactttgcaggcaggcccctgggttcaattcctgcccctgtcattgagtaaagtaattatcataactttggaacaaattgacctctctaagcctcagtttattcttcagctaaatgaggatgattgataatcaaaactattttatagggcttgggggagcatcaaatgaaataacacatataaaaggcttggtttaatctctgaagcacattggcacttaataaatgttaactataattatattaacacctattttacagggttgctatgaggatatcatgagataatatgtatgaagaacctagcacactgtttggtgcatgtgagggttctg

SEQ ID NO: 84268 - DNA, 2016 bp, Homo sapiens
aacttctgaaataacatctctgttagtttgtggagtgggctaaatggccagcccttctacgagctccctcatggttgcgggggactaccaatcactctctactttttttttttttttttaataggtcttgtcatttgtaaatgcagaaggaacactgaaaaaaaaaatactcttgccttcttccatctgtattttctttactaaattatccagtcttataaatatttgaataacatttggtcagtataaaatctttcctgtcagctcagtacaagaacactttttggctcctgagaccacaacagtcagataaattaatattgatttgttagaaaatagttttcactctgtctaaacatcttattctgggctcttgaaccaaaattatgaatttaaaagcagcaaaatagttcttcacagttttcccagtgaaactaattatgggcagattgtgagaaatgtgttggatgtgatttccaacatagagttctgctaaccaaaattcagagaaactagagcctcagtctctgatttatttgagcaagttgcaatttggtagactggagaatttatgtaaatagtttttgcagtttccatagggataactcaatacattaatatctcacgaatggcagaagatgaagggggaaagttttttttttaactgatagtttgatttacctaatagaaggatcggattcttcccccttcttacttaagtctatatattaaagaacagctggcttacctgctgtataaatatgcagtgtgtagaatttgactcagtttagagttgagttttaatcacatccacgtacagggatggggatggaattttttttttttttttttgagacagagttttgctctgttgcccaggctggagtgcagtagcaccatcttggcttgctgcaacctctgcctcccaagttcaagcaattctcccacctcagcatcctgagtagctgggattacaggtgctcgccaccacaccaggctaatttttgtatatttagtagagacggggtgtcaccatgttggccaggcaggtcttgaagtcctgaccttaagtgatccaccctcctcggcctcccaaagtgctcggattacaggcatgaaccactgcgcctgactgtacttttttttttttaaagtatacccatacccattgtacacatttggtattttttctttaaaaaaaaaaagcatttactttttgcctcatgaatctctgagtacattttgtgcattctgtattctactttatttactcaatattaattatatgagaaataaatcctaaatgtaattttgaatggtggcttcacaaaagaacatttcctcttcttttggacatttgctcccaattttaaataacacatcattgaacatctctgtacaaaattccgtatctgatcttcagagaagttttaagatagatgtctagaatttcatctcacatctaaactgttttaagacacttggtacacattgatatgtattgtccaattgctttccagaaactatataaaatattacaaagaaaaacatatatatatatatatatgtaaaatatatatatgaagggagaaataaatgtaaatgaaaagaaaaacatatagagaaagaatatgtctaaaagaaactgcagaggcagctataattaaagcacaaggaaaggctatgaaattctggttccacctgcaacagctgtatggtaaaaagcttattcagagtccttccttcttggaaagctttgttagagtcttatgggattgtgatgcacagatacaggggcaaggctactttttcctcgaactagttcaccaaagcttctatcctatgaaagtgaatataaaattcttaaagtttatagggtctgctgggtttaaggaggagaaatttgagttttcatattgtcagtctcaaaccttttctgaaattggaagtgatgaagtgacagtctggctatatgtgtgtgtgtgtggtgtgtgtgtgtgtgtgtgtgtgtgtgtg

SEQ ID NO: 84269 - DNA, 1030 bp, Homo sapiens
aacctgtctttggctcacactgtttgaggatataaaaggaagcatacagtgggcctcattctgacaaatttttagtaaatcacaggttgcctttcctaaatccctcaatatgatggctagtctgtttcatagtgaataaaaagtgatcctggatgaatgaataaagtgaaattcagataatttttctcaaaactgaaattgtttaaatcttcctttagttctcttttttctgcctgccccttctttcatataccctgtttttcacctcttttgtctcagtcccatctgatatttgaataacaatatgtaatttcaggtttaggattgttgatctgtaaatctcagcctagtgctttcaactcctggctttctcctaagttcaccctcctcccttccctcctttctgtaaggactctaaacgattgcgcttcattaagttatttttataatgagttcctgttaccagggaatacagagttaaaaaggtgatctcactaaaagtaattagcataagacctgctggacctgtagaagtgactggatggtaatcaatagcaatatgattacacccatgcagcaattataaattatttaaaacactacccctaggttactgactagttgcctttaaattaaattctctgtcgataattgatgcaaagaattaatgtgagaacaccttcagttactgcaactttttcaaggtggcataaaatattgaactattgcccgtcattagcagctaagctgtctgtttgctctaacatccttcttttctaaattggtcaagaaagagtctcagatcttgaaagatgacaaatgatttcgaatccactgctgggtattcttctaagagcactgaaatgtcccagtgagaaatttcatatatgaaggcaaaggaaaaaaaaattaaactttaaataatgaccagttatacttcatcaactctaacaaatgaaggagcagagttggttttccggagtttgcttcagttctttgatatggtcagtgtaggtcggggaggtcttcc

SEQ ID NO: 84270 - DNA, 1028 bp, Homo sapiens
cataatttatgttctataaaattagcatattttaaatatacagttctctggattttgaaaaatgtatacgtgtacataatcatggatccaccaccccagttaagatatagaacattccagggccaggttcagtggatcatgcttgtaatcgcagcatgttgggaggctgaggagggtggaccacttgaggccaggagtttgagatcagtctgggcaacagggtgaaaccccgcctccactaaaaatacaaaaaaaagaaaaaaaaaaagaaaaaaatagctggccattgtgacatatgcctgtaaccgtagctactctggtggctgaggcttgagtatcgcctgggaggcagaggttgcagtgagccaagatggcactgctgcactctagcctgggtgacagtgagactgtctttaaaaaaaaaaaaaaaaaaaaaaaaaaccaaaaaaacaaaaacaagaacattcccatcacgtcggtaagtatctcattctcctttccaataaatccttttattcccagaaacaagcattcttgtttcaatcattgtaactttgttttacctgttctagaacttcatttaatagaaatcatacctactgctttgtatgtgtcgtcttctgcttaatgattcacataatgtttttgtgattcatccatgttgatgggtgtattaggggttctctttttcaatgctggatagtatcctgtggtgaaaatacaccacaattcgcttatctgtgcacctgttgatgagcattgggttgtttatatttgttggctattatgaataaagctaccacgaatattcataaatcctgtatacatgtttttatgcccttatgtttttatgtatttttgataaatacctaggtgtgaaattattgactcttagtgtttaacttgtaagaatgctgccaaacagttgtctaaagtaattgtatcattttaaccccccgctagaagtgtgtaagagtttatgttgcttcacatcctcatcagcactttgtaatttcagtctttttaat

SEQ ID NO: 84271 - DNA, 1752 bp, Homo sapiens
attgctttattcaggacttctctattatatgtgatgctagttgtatgttttctgtacctatacttcattagattaaggagtttgaatttatttctagtttgctgagagttcttttataaatgtgttcatatatatatgttttatatttttcttattcttactatctgcatattagagggagtttagctcattggttaaaaggatttgttccggaaacctaactccaaatctttgaacttcctagaaacctggcctgtttatttaccccgtatgtcactttcctttatctgtaactggaaaatgtgtacgaagagcttaatacaatgactgatacacagtgagttctccataaatgttagttattattttaatattacagcatctgtggaaacagtgggtttatatttcagcgtcctgagaaacactcatcctgaacaacgggaacattggccacatccgccattgtcaattttaaataaaagatatgatgactagttggtgagttgatcttgtaagacttttacagatacccagaacggctctacttcttcatattccactttttagttttaaaagtttaaggagatctctgtgatccctgaagaattgtgtgcaaagcagcattaagacgaaaatcttttatatttgtgttgtagcttggaaaactagcgcgtggtctgttttgttccactggctcctaaggttcaggtattaacataaatacagcccattaacacttgttcctctctgtcaggacataaattaagtctgcaggtgttccatgaagctgtacccttggtactaattaagccttgataattaggtttgttaaattcaggactttaagcttatattccctccttgggctaccaaaacggagatgtgcaatatacaagccctcctgacttttttttttttttttttttttcctgcagagagcgttgctgctccttctctattttatttctttattactgtttttttaaatgaaggagtcagtaacaaaccgttcatcattttgccagagtagggtgtaaaccttcatgcagacctgtacatttgtttatgacgagattaaagtcttttctcctcctgttttgtgtcagctcagacactgaaggggaaagtttccagcctggtttctccatacactgaacatgttgaaatctatgccttaagcccaaatgagctgtcactcaagtatgcacgctcatattattaaaaactgtgcatgtaatttgctgggcacccaaataatttgttttttatttttccttaaaaatgagactttctgttaggaaagtgattcatgaaacagtgaagatcctgcctcacaactttcaagaaacccacagaggtccctattcacataagaattttctaagcagaggttccaatttggatatttcgtggccttcaggttatttgtaaccagtacacaaaccacaaagtcataatcagatagattttctttccagcctgtctttcctctttggttgctttgtaaatctattactcatcagatcatatgtttggcaaatgccacttttcattttgaatcaatggaatcataaaaaacaattctactagtaccactttcaagaatattcatagtggtcatgctaacgtaataacctctcttttttatttgaaggatattaaataaaattgtacttttaatcagagcctttttttgaaaaaaaaaaaaaagaaaaagatagttgatattgtgggagatggctacaatacaga

SEQ ID NO: 84272 - DNA, 1049 bp, Homo sapiens
cagggtaaagagtcaccgctgattaattacctcaaggacaaggggacggtgactttttctcttgtatccagcagcgccacgcggggcgggcgggagaggcaaggctaagaggtggatgaaaggctagggttaaggcatttcacaatgtcaggcatcttgttagactgcggctttccaggccttcccccgtgactgctgcgggggcctaggccaaagatatgcccgagtagaaaatctgacaccagcttcccagttttctcttctgctctctttggctgcaacgcttttaccatgggtaaaccattaggccggctctgcagggagggcaagaccacagcagctcagtatttcctgctcagggaaaaaggccaggtcttttgttggtggaaatccacttttccatccactgtcttctaagaatgaaagtaaatctgttgtgctttcctctgccctgtcctcaggcttagccttagtgggcctggtttttgcccccctccagttttagcttcccatctaaaatacaagggaaaagacagcaaggacaggacacttcctcctagtgtcttgtaaagctgcaagggagtcgcggctgagtcgaggatccacattcctggatgagtccttttgttaccagcggagggtgtccgggttcttggcattttgaagaaatagttggacaaaatgcacaaacaaagcaagagaagaatgaagcaacaaaagctgaggtttattgaaagcaaaactacactccatagagtgggaacggcccaagcagccactcaggggccctggatagagaatcttctggagtctaaatactccctagatgtttcccattggccacttggggtacaccccttataaatgaagtggtggcctgcaatcagtcttattggttgcagaaagcaaccaatcagaggctgaagtgaagttacaaatatcacactcctatgcaaacatctgattggttttggaaagcaaccaatcagaggctaaagtgaaattacagagttgctcttttatgcaaacgaagactccgcctccagtca

SEQ ID NO: 84273 - DNA, 1023 bp, Homo sapiens
aataccagcagcaaggtaggacaaaaccagctcccacactggctgtttgcttgatattaagctttgccagtccaatataggtcacatttccaaccagattttgtgcttatctctacattacaccttgtagcaagggggaaaaaaagagcttcttgacatctttttgaagaatggcgctctttaaaaaaacataagggaactttttttttcaaacactgtaatgagggtattcaagtctgcaggcaaaacagagctgtttgaaaagacattagcctcgaaaccgcactgtgccagaatagatacagctacgtcaaaatgccgcatttattttgccattacttttcactgactaaaaccatttgctaatgaaagttctagctgacataatttcagcacctgctgatggaaaggtggactcactggtcatggggagtacagtaaaattaggagagtagatagaatcctgaagcatttgagctgcaaaatcatagtaacaacagctcttaatatcctataattgaaaaagagattgccattttcaaagacctttcacagtcattctcttaatcaagtctcataataaagatgtcattgggactgagcagcttactcacattctcatttcactgatgaggaaactggagctcagggaggttacatggattctggatgacctacaggtcatggaggtaagagaggaatgggttcctggcaactccttctgagtactaactgttaaagtaagcagagtgtgtgtctaaacttctcatgggctactgtgaggagtaaggggtaactgcaagttagaaggcatgatgcccaagattgtccttactctgacacccactgcaagtttgaggtggtcctcaaacccatcctcatggctgatatttgctagaaggacttgtggcacttagcagaagctattgtatttacagttacagtttattacagggaaaggatacaggttaaaattagatcggggaagagacaaatggggcaaagtccaagacaagtaccaga

SEQ ID NO: 84274 - DNA, 1020 bp, Homo sapiens
cataccttgggaattagactcacccagactctgagttaagagtttctatgagacagagggctggactgggggagcaaggcttgcaaatcgaaagcatcagttgctacccctgagcaccatctcccataggagactctttgaacacttttttaaaaggcaagatgttggcctggcgtggtggctcacgcctgtaatcccagcactttggcaggccaaggcgggtggatcacctaaggtcaggagttcgagaccagcctgaccaacttggcaaaacccagtgtctactaaaaatacaaaaattagctgagcatggtgtcacatgcatgtagtcccagctactcaggaggctgaggcaggagaactgctcgaacccaggaggctgaggttatgttgagccaagattgtgccactgtactctggcctgggcaacagagggagactccgtctcaagaaacaaacaaacaaaaaaagtcaagatgttgacataacagttctgaagaccaaggtggtggaataggttaggttaggatacgtcggaggagccagtgtgaactgctcctttaagacatgaattagcccattttcatgctgctgataaagacatacccgagactgggcaatttacaaaagaaagaagtttattggacttacagttccatgtggctggggaggcctcacaattacgggggcagacaagagaggagagcttgtgtagggaaactcctgttttttaaaactatctgatctcgtgagacttattcactatcacgagaacagcatgggaaaatcctgcacccgtaattcaattacctcccaccagcttcctcccacgacatttgggaattgtgggagttacaagttgcaattcaacatgagatttgggtggggacacagctaaaccatatcaaaacataactatagctgggtgaagtggctcgcacctgtaatcccagtgctttgggaggccaaggtgggagaattacttgaggccaggagtttggggctagccgaggcaacaca

SEQ ID NO: 84275 - DNA, 1032 bp, Homo sapiens
acccagcggggttactttttttttccctttcagtattcatgacgtcaagtccctgtttgttatcttattgtcctcttatcctggtccttagagtctttcaagagaagaggttgatcccggtgtaatgtacagcttcattctaataagttgtatcgatcatgtattttcagtcactcttcatgtctatgctgtccatttgcttggatcccaaggaattttcttctgcccccccaccccatcccactcatatttcataagggtcttctggaacctgcatggtgttgggatgtatatatcacttttcccttgttatgaccagaaagactcacagccatgaatttcactgaagtttatgattggtccctgattgcctcacatcttgcaaagaatcctcttctagaaagcgttcttgcagttagattaacaagcagatatactgaactggtgcatgaatgaataggaaatatcccagttgcaaaggataaatctatcatgtagtggagagcgtgttcaggcaaaacatttggttctgcggtcgcttggaggattgggcccgtgctataattaatgccactagcagtaaaaggacattagggatgtcgcgcatgttgattatttcttcattttgtttatccaagtttccccgccttggaagctccgtggccattgccaaagaaagccctggagacagagcgttagccgttgctcctcgtaagcgcatcattaccttcctccgaacaaagtcctttttttttttttgtcagtagagggtgaaaacattattggattcaggagttcatagtagtcctgtatgaagctggggacggggggatagagttatgaaatggaccatttcaaatggcattatcttcccacagtgaggtacacctttcataaatcataggagagtgctcagaaaatagagcatttgttattcctgcagtacattgtatttgcatcccccctactcacaggaaagaagaaattctcaggtttcctttcccaggtttgaaaaggcagttaatcgcctta

SEQ ID NO: 84276 - DNA, 1435 bp, Homo sapiens
tatcataatcaaataaaagaagtacttcatgtaagtcaaggattgtgcttttactactattttttctttttttgtaatcatggtggttctttttgcccacttatttaggccttaatttaattacggcgctgattaagttctttggttttattttttactgtaaacattgtgctgtattccgtaggaaaatgtagatgaatgtgggtcattgggaaataaagtgggtggaagtattggcgagcatttctttcccactctctacctcgcctggtctagccgctgataggtagttactctttagtatgcccaagttcaaattacgtatgactgtgattctaacacggaagcgccctccttttctagtagcttggatgtgattggtatggagaagcagagtgggtgcgtctttgtgtgttcttgacatagttaaagagtttggtatagtcaattccctttaaagtagtaggcttcttaaataattctagttgttcctcgtgctgccaagccatcttgaagaatttttcttcatttgtaaggggttaaaagtcatcaagctgattgaaaagtcaagaacctctagcgcagcctaccccttgcatatttgatactctcttttgcactctcgggagcagttttgaggacacactgtaaaaatgtatgacagcagtttgaagataagtctgttgccccaaataatcataagaagaagacagaagaaaaattgattcccgtagctctctgggcagtgggatgggggtaaagcaaggaattaataaaaacccaccagaatacattatttcagacaatcaaggagagcgttacattttaaaggtacttcatctcagaaagtttgagacatacttttcacacgtggcatgaagagaaaatggaatggaatgagcactaatgaggaccttgaacttaactaactgaacttgatggtcatcgcaagacataggggagaaatattttgagacatcattgtgcaggcaaacatgagcaagaaattgagaaatccgttcatgcacttctctctggtttcccggaagggatgaattccaaatcccgtggctcaggtcctaggtcaaagacagctctttagaaagagatgttctttgcttctttgctgactgcccatcccctcctctctctcaaggaaataagatattcatttgcaagtaaataatgcagcagtcttggatttgtatcagatcaactttgaatgaaagcctgcctttctgcgtttatttttgcttatctctcctgcttctgcttcctgttttgttaaataagggcaatgacggcaactattttaaattgctataaagttttagctagacagcgaatcaaggtggcaacacatggtgggttcttaaataatagttgtcatttgagtgctttctatatgatgtacatttcattttgcactttacaa

SEQ ID NO: 84277 - DNA, 1114 bp, Homo sapiens
atatatattctgtgggttttcacagacatggaatgacatgtatctatcatacatcatatattgtatcatatcatatcatgtcatatcatatcatatcataccgaataatttcattgccctaaaatacctctgttttcactttttaatctctttgtgcacacatcaaaaattccttttgtgtttttgagtttcaaaagtgtgccacaaacaagaaatttgggatctgctgagcccagcctcagacctgtaggggaaacaaagagggcaacaggaggtcacgaaggcatgctgtgcccacttttggaaattgtgaaggagagtgtctcaaacatgtaggcttgagccactcaaaattctgggaaataggatgttttgtaaagaaagtttgctactgtcacttctgagtagttgcagtccctcccagtacgtgggtatcttcggtgagaacaaatttcctggcagcttgaggactccgtgtgttattcacatgctttatttaatagacttgcctcatgtgactttctatatcatcctttgtgtctaagtgatttgcactgggaagatagtaaacgctcccactttatatgcagaaggttgaaaacaccatgagtgttgcaatctgaggtatctgcccttaaagaagcaatatttactgaaatgcagggcacacgacttttccagcaaaccacaccgccgtccttttgtgtgacgaaataattattttgagataccgacatgcgtgacgaccagataattatctgagaaaacttagcatctaatgatgctgttttgagatcacaagaaagaattatattagcttgagctgaattgttcttttccccctgtctctctttagttgtaaaaacacccacaaatgtgaatgcttcaggcctgaacttgtcaacagccagtggctcattgtagacatagggatgtcgcctgtgtttggggctgagacaccagaacaggtgttctgtgggaactgagaatgtctactgctgcacacctttaatctcgggtcttctttctggtgaaatacccgtgattcataactcagtcacgttactgaggtatgtctcttcggatagattctatctctaaaaactacagattc

SEQ ID NO: 84278 - DNA, 1049 bp, Homo sapiens
acaatagtaacaattccacagagatagtattgatggttgaacaagatgtttaaatcactagtaaaatttggccagacacggtggctcatgcctataatcctagcacgttgggaggctgaggtgggtggagcacctgaggttaggagttcgagactagcctggtcaacatggtgaaaccccatctgtactgtaaatacaaaaaattagctgggcatggtggcaggcacttgtaatcccagctacttgggaggctgaggcaggagaatcacttgaacccggaaagtagcggttgcagtgagccgagatggcaccattgcactccagcctgggtaacgagcaaaactccatcttaaaaaaaaaaaaaaatgcccgccttattcagatacacagtctaatgctttccactagaagattctggcactgttagcatctctggcataaactatgttactcaacccagttctgtcgtcgtcatttttttgtgttggctttgcccttcccgcattgtgacttgatcccatttaagcagcaacctctgcacacacaatcttttctctgtccttcactcagtgatgttataatatctagaggcttattgattatttgtttgattctattgtgggcacaggagcagttcttagattaacactattagattttcccaagcagtattgccgtggtttatacaattggacgaaatgggtgatctaatttggactcaatttgctccaaagtagagttggaggaaggagatgctgtgatttggttctgcacctgagaacaagaatggaaaaagttatctccaggtgctatctgtgtgcctcatcaattttggatacactgtgtgaccagctctgaggattccaagcttttttgcgtggcttcttacctatcagctaaagaacctagctttacttatccaacttagatattaaatcccatgatataatttatttttccgtgtgaaatatctcaggaacaaaaaagtcaggttgagttttctaaaggcactggtttaagaggctataggttaagaggagataacagac

SEQ ID NO: 84279 - DNA, 1022 bp, Homo sapiens
gtctgagcaggcttcccaccatttgactgctgctcctttgtccagacacatttaacaccatctccctgcaccccttcactgggctccgaagctgcgttcacacggcacgtcattggcagctcatctcagaaggttccagctttgcctggcaaattctcctccttcctttagatcccatctctggtagacagagtaatgagccccgaagatgtccaggccctactcctaattccatggaacctataaatatgggaggttacatggcagatggggaattaaggttgcagatggagttaaggttgctattcactcatcttcagattgaaagatcatcctggattatctgggtaggcccagtcgaatcagagatggggaaaagagaggcagatgggtcataatcagagaggtggctgagtaaagaggacttggcctgatgttaccagctttaaagagggaggaagcgtccaggagccaaggaattcaggcagcgtctagaagccagaagaggcaaggaaagagattctctcccagaacttccagaaaggcacgaagccctgctgacctttgattttagcacagtgatacccattgtggccttctgaccttcagaaaataaatttgttttaagccactaatttgggggtaatttgttacagcagccagaggaagctaaggcaccctataatataccctctaaaagcccctttcttgggaagttctccagccttccccattgactctcagaggaccctggacctctcttccatggcattgccatggtttgtcatgttgcacttatttgtgtgatgatttaattaatactcatctgccccactggacgtgggcaggaatagtgtgtggttcaactatgagattcctagggcctaccaccgcctggggtccaagaagagctcagcgagtatttgcagagtgagtgaatgcaggaaggagtcaataaatacattaattaattaatctgcaggagaaagaagggcaaggtactatgaactttaattaaacac

SEQ ID NO: 84280 - DNA, 1048 bp, Homo sapiens
gagagtcaggatgcatatttctttaagggatgctgttgagtttcttctggtggagcgaaggatttgtagcaaaacccagcatgtaactcgagtgttctgtgaagccagatattggtgccaagctaaatttgtgcgtgcagcttctgtttaaggcaattatatagtgtgtaatacccagtagagaaattaagtcgaagtacattttgcccatagagattatcctctcagttggatttattttaaacaagttttgccccttatacattaaggtgcatgcaataaatcacttatgtaataaactactctatattatgtgggaaaaaaaaaaggagctggtggcagggggagagatttcaaattgagctagacctcaggcatgaagggaggggagagagggggaaatgtggaggaagggggcgtttgtgcagtgggaagttggagaaagtacaaatgaaagcctctctgcagtgaacctcatgactgctttagagaggtgcttatgtaataactgcagtggtgtcgctttagaaaaagttacagagcttgtctttctagagcaacctcttggcttatcttaattaccagcagtccatagtgagactggagggaagaaaaaaagatgtaagcttttattaaatagaagaaaatcaggggcagaggacagagggtgtgattaggggtctggggtaaccacaaatctgggcaactggaatttattgtaatggtaaattacactaataataatctggggatgaaaacagggcaggcagtgaaacctgaatctcagctggacgatgaatgagttttaatgcaagtgtatcgacgtgctgtactcctaacacattatttgttatctgaaatttagatttccttgggtgtcctgcctttttttttttttttttttttttttttgagatggagtttcactcttcttgcccaggctggagtgcaatggcgtgatctcagctcactgcagcctccaccttccaagttcaagtgattctcctgcctcagcctcctgagtagctgggataacaggtgcacacca

SEQ ID NO: 84281 - DNA, 1881 bp, Homo sapiens
gctctcgaactcctgacctcaggtgatccacctgccttggcctcccaaagtgctgggattacaggtgtgagccaccgcacccggcccctgcctttttattttgctaaacctgatgacccttgccatagcagaactaaagtgatgatgatgattacagcagatcagttattttgagctctgactttgcatgaggccctttattaagtgcttcacttgtgtgatctgatttaatcttcacaagcaaactgggacagagggactgtgcctattcccatttcacagaggtgaaaactgacacttagttttcacccgggttctccctgtctataaggggaaaagacagggttcacaccaaggcctgtctggatccaaaacccatgctcataatcactaagttatactacctcttcgagatgctgatttggaaaataactccatgatgaaacatgtcaagggagactgcctgtactccgtaatgcagaaatgcattagagctcaaaaatctatgctgtttaggaaagaaaaatgatatcgctcagaaaatcatttaaaaacttcctggtgaatgcacccagctcgccaatgcatgccagccacagggcctcacagcacatttcaggagcaagacaattcagaccccactcttccccctgaaaaacctccttccagaaccctcttttgcagtgagcagagataagcctctccaatttacatgtttgtcattctctaactttgagagcccaataaaactaagtgcttagtgagaatcagacatggataagctgcttgtaatttatgatttaatgcagcatagtataaaaataggcaatgaaactgaaaggcaatcaaagtctattgtcacaaggaatgggaggaacggggacgtgatctaacatttgctgagatcctgctgtataccgggaacagaacatatatggtttcatttcatcctcccattatcaccgtgaggcctcttccgcttatctattgctgagtaacaaggtgtacccctcaatttactggcgtaaaacgacaacagttttattacatctcatgattttctgggtcaggactctggatagggtttggctggttgagtctcctcttgcagtggctgttgatggaggtcatttagtggaatccagttggcaggagagctggccttggagagtctaggatggcttttgtcacatgtccagggctttgtcaggttagcagggcagggagggctcagctggtctcagctcgtggctgctccagcaccgtggtctcagggtgattggattcttgtagggcagctgtttcagctacacagcagaagtggcacggccttttctgacttagtctcagaaggcagagggtgtcacttccactgcatctttggggaaggcagtcaccactgtatagtcctgagctcactgggattaaggggaagggacacagactccacctctcgatgagaggagaagcgaattgatgggcagattttatcactgtcctggggcctttgctctttgcccttccctttgccaagaaagttccctgtactctgcaatgctgagtacttctcatccttcaggtctactgcaagtgtcacttggccaacacaccatgccttcccagtctctggtgttactgtctgcatactgtagaccatcatcttgtttgcatacttgtctgttatctctttatcatccgtctacccacatcaggcaattccaagagagaagaccactggttttgtttgatctagtccctgttgagtccctgtgcaccttcagaaccacatctagcaatagaaggcgctgcacggggaattctggaatgaataaaaacgcttggcagtaccgcatggcgagccagtacccgtgaatgctactt

SEQ ID NO: 84282 - DNA, 1025 bp, Homo sapiens
aggccgaggcgggtggatcgcctgaggtcaggaagaacctgggagattggaggttgcagtgagctgagatcgtgccactgcatgtcagcctgagcaacagagcaagactccgtttcacaaaaaaaggaaatgctaccagtgagcaggaagttggtggtcctccagaattgccctgttgagggtatctccctgccctggtctgaaagctgccacttgccgcccaccgcacagccccagggctttagctcactgtgcaggaagaggccttcctctgtgcatcctcccacagggtcgagagtgaatgccttgcctttaaaaataaaatgcatacgcctgtcctcatgcgctctgatctgccagcaggctgtgctggggagtggtgagtagtacagggatgtgtctgaccccaggagaactgccccgatccctatcttgtctctgctcagttctggtaactcttttatcttccctggagttatttttttcccttctttgtttctctttttctgtgtgctcttctaagagtaaaacgcatgtccccccatgaagtcactcaaagctcaggcgtgtgcaacagggacagcaaaagcacacacaatgatggccagagacactgctcagtgtactgtcttccaccgggacagcccactcaccaagggttaggtcctgtgctgcctgggtcccgggtctcctcggaggtcggtttgcatcacgtggatacactaatctacccaagttgacttggagaaccaatctgaaatcagatgggagctcccggaagcaaagcaattgcaggttcatttgttacttttattgtctcatttcttcttatttttttagcccaattgcctcctacatggggaaggttggggtcctctttattctacttttcattctcgctctgccgccctcccaggtgtttgtaatcacatatttttcatttggtttccgggtccagcgacaagaacaccagaaacacctcctccccagagaggaagagaggatgctccgccgcctgtaaggat

SEQ ID NO: 84283 - DNA, 1169 bp, Homo sapiens
tagtcatgtccctagtccctgtctccgtatattttctccttctcttattagtttatcttttccaaaatgggctgtttcgtctctgatcctgatttatttttattttaattaaataatttatttttctgagacagactgtcgctctgtcgccaaggtggagtgcagcggtgtgatcttggctcactgcaacccccgcctcccgggttcatgtgattgtcctgcctcagactcccgagtagctggtactaaggcatgtgccaccactcacagctaattttagtatttttagtagagacaggatttcgccatgttggccaggatgatcttgatttcttgacctcgtgatctgcccgcctcagcctcccagagcgctgggattacagacgtaagtcaccacgcctggcctgatcctgacttagttacggttacctctctttgtatctctatatgttctcaaattccaacctgtctttgtaatcctctatttaagctatcgattacctccaaaaggccctgaatgtttcagaaagaaaggatctactggcagcttctgaaggcttctgtaataccttgtaccccaatgagtacaatgaaatcattaggggttctttcctctcctttggaatgaaactgctgcttaacttttctcccactgatgagatgcggtgatgctgtcacagttgggtggttgctcctcctgcagtcttcttcccattgcatgttcactctcttccccacttgcccacgagcagcaactcctgtttcttgtttttttccttttctttttcttttcttttgagacagagtctcgctccgtcgcctgggctagagtgcagtggtgcaatctcagctcactgcaacctctgcctcctgggttcaagcgattctcatgcctcagactcctgagtagctggtattataggcgcacgccaccatgcccacctaatttttgtgtttttagtagagatggggttttgccatgttgctcaggctggtctcaaactcctgacatcaggtgatccacctgcatcggcttcccaaagtgctgggattacatgcatgagccatcgcgcctggctaggaactcctgtttctgtttttatcctcttcccaagtctgcaggccccgcctggcccacccagtccttcttagaagatgatgacctcaac

SEQ ID NO: 84284 - DNA, 1103 bp, Homo sapiens
ttttgttttgttttgcttgttgagcaagggaatgcggttcccctgtgtcggacttgtttcagaaagacaatgtcactgaggctggggcagggagattagctgagaggctcttgcagttatctgggaaggagctgtccataaaggcctgagttaagacagtagccctttgggttcgatttagtggtggctccccaaaagatatgttcactggaacctagacatttgagaaaaagggtctttgcagataagttcagttgaggatctcaaaacgaggtcatcttgggtggaccctaaatccaatgacaggtgttttcagcagagacagaagtgaagaaggcacagaagagaaggcggtgtgaaggtagagactgagatcggagtgattcccccacaagccagggagcactgagggctgctggcacccccagataccaggagaggggcacaaataggttctcctcagagcccccagaaggaactaagccttctcacacctagactttagacttctggcctccagaatactaagaaaataaatttctattgttttaagctaccacacagatgcaggaaactaatataccctttaatgattttctccatggcctttctgataatcctttcatccttcatctcccctgttgccgttttctttgctttgctttgcttgcttgctttttttttttgagacggagttttgctcttgtcgcctaggctggagtgcaacggcacaatcttggttcactgcagcctccgcctcctgggttcaagtgattctcctgcctcaccctcccgagtagctgggataataggtgcctatcaccacgccgagctaatgtttttggatttttagtagagatgggttttagccatgttgtgcaggctggtctcaaattcctggtcccaggcgatctgcctgtcttggcctcccaaaatgctgggattacaggcatgagtccccatgcccagcccctgttgcccttttcaaaacactaagtgcatcatgttaaccttccactcgcttctttaagtttcctcactccttttaggtgaacaacccaaaccctcatatgccctagaggcccttttcagccctgttgaca

SEQ ID NO: 84285 - DNA, 2099 bp, Homo sapiens
ctacattgccaccagcatcccttggctttttgcttggcttaagaatctatcttttccgttcctccttccagcatactcagcacagtccacctctgtggtctctctgtggttttctttctgttttcctgctctctccatttctcattcaccacaccctgggctatctttcactctctatgaaataccttggatttaggaattggagatttccttgggtcaggtttcaccctcttcaagtagcgtctcaaacagtatacccactacagctttctccccactctgtcaaccatgccatggggcctactttttgccctgactcccaccagataatgcccatcagatggcacctcttttggctgaaaaatcgaaaactcatcactcttcctgcattcattagacagtaccctttatgttcaactttgtaatttaagtcccattcttgcctcatagaattattgcccgttgacctccatataagtatctgcatttgctgcatcattcatgacatgtgaggcctttgacaaaccctcctatggtgcagcttcctccgagcagctcctaaggaagtgccagagtcagggctttcctctgcctgaattatcggagctcttggcttaatgtgggagaagagatgaatgatctgtccttctatgaaaggcttaccaactccattcaattcacagtggctctctgaagctctgtttttggaaggactgtgaggctgtacctgcacttgattgaacgagtgctgggattgattagtgatgtctgcagtgagcgaaggattgggaagagtaaacaggcatgctgcatatctgtcatcatggctctgagtgtatcctgtttcagaagagatgaactgtgctgtagagatgttagcatcaggtattttagacacatgaagagaggatcagattcagtggaagtgccaaagggattctttcagatgggcaataagtggttctgaagatacgtatttctcagtgtgttatcttggctccatttagccacacaaaaggaatatgggtatagtgatgggtctctcatggctcacgtattaactgtatttgttgttactgcttctcaggcactctgttaagaatgcagggctcttcctcagactcagggcggggcctgggctttacagcaatggttttcagtttgtaatctctctcaaggaagggagaggagcacaaagctgccttgactgccagcaccatcagaaaagtgacagcagtcttggccctgtaattgccaacagtaattcatttgttcgttctctctctctcgctcctgctcctgactctgggggatgcttcttttcctaccctgcctggaaagtgctggggcatgggtgaaaccagaatggttttgattctcaagtctttttgtagagaggaagaatggatattcctagggtcagttgattgagggtgtgttgggggaatgtgattatcgatgatgctgtatgctgggtactagactgggggttcgttacatcaagttgtggggtctgtggaaaggaagttgtcataggagtctaggactcagcagctgtcaccttcccaaagtcacactgctgatgagtgacagagaccacatttaaatctgtgtgtttacaaggtctacaactgcaccctgctacctcccagaagctgaggcaggatgggcaggttgccacaccctcccaacctcctgcaaccttagttgttagtgaaaggttattaaataggcctcacaatcgcaagccaggtaaatatgtcattggagaggttggttttgtttgcatttctggtgaagttgagttgtttttatcccctacaaggtcatctagacatttttatccccaaggtcaggagatctttctgccagaggtcagcattccatccagctcctgcctgctctctgggtggccgactgtgccagtagaaatgccagctgcagccaaaggacaggctttccatccgagaaaagcactcacactcgcatttcttttctggttctgttcctcccctacataaccagaaaaagctcgttaacacatgatggcaaccaggctccaatatctgccagttcccctgtacagattcctctttagc

SEQ ID NO: 84286 - DNA, 1030 bp, Homo sapiens
tcctgaattaccacttggaggacagcggcttgctgatcacagcacctgttttggattttatgttaatgaaaaacaaacttactgatttaaagcattgcacacttaggttttagtagggtctcctgcgcatgatgcaaaaattattggtgagtccacttcccaagaaaaagtttccccttcccacagcaaggcaacactttactcctctaaagacaactttttctcccaacaggctccaacttcaagtcacacatatattaacaactgatcagcatgaaacaacccgaggagtagggctgcagtcacacctgtttattttactgttgtgatggcagcaaatataatggctacagcttccttgggaataatcctgctataagcgttaatgggcgaagagccgtgacgtgtgatttgggtcagtgtcttgtgttcacaaggagcactcaaggctgctaatctgggctgtaatttctcgtttctcctcaaccactttgccttttatggggcttatattgatgaatgcagaggataactgtcagctcacctggtaaagctcagtgcaagaagtttaacaattcatctcgtttcctaaaggcggcagaagagaagcaagctctgggccttcaacaggttcgacccaccctattctcctcacttcctctcttacctccttcccccaacctatgtagccccattcatttcgccagattgattttttcaattgtaacggaagtcatgtcactcctgttcttaaaattcctcagcagcttcttatgcaactcaaatacaagtgcagtcttgggtcaggggcccattcttcaccctcctctctggatccatgccccgggctttgggactgcagtatcctccctctctaaccgtgagctcagccatgtgatttatttggggcatcagtgtgtgacagaggaatgggtatgccagttctgggtctagacttgaaagtccttatgtgttttgagttgctgtcttgcatttctgcccttgccataagaaagtcatgtctggtcta

SEQ ID NO: 84287 - DNA, 1025 bp, Homo sapiens
tcatcttcactgtaaatctagacaagataatgaatgaagaacctgacacatttaaggaactccatagttgggagcccagtgtgagtcattatggcgagtccctaacactgcggttcccctacttgagggcgcaggtaggggcactttgctgcctcctttgacaataagcattgccattgccatgtgatttgctttgcctaatgaaatgtgagtgacacttccagatggaaatattaagagccagtgtgtggttcaccctgaccccttcctatgccccagcaattaaggaagcaatgttcagatgaaacccatgtcttcctcctgggtccctgagtgaccacagtcaacagagcttccctgttggccattactaatgtcaagaacaaagctgtgtaaagtcactaagattttggaggtatcggctgttgcagtagaacctagcctatctcacctgacacaaacgttttctttctcacaaaacctcacaccagtgttgttttattcatctgcttatgcacgcgtatggctgcaacatccttccaaaatgcattacaggctctaatgcacgataagacagttaggttcgaaggaaaacaaagacaattgcacggcacagagggaatatactgctacggtaaaccgatcactaacacccggccctgaatttgcttcaaagttttcactaaggcacaaagggagccgtgtggagctccggagttcccatctgaggtcttgtctaactccttggcaacttttatgtatttgtataggagactcttttgccagatggttgaaatgttcatcctcctattttgttttaatgcaaactgacatttcttcatcttcctgcggtgggtttcttttatgaggtcgtgctttgcattttcatagaaagaatttctgactcccgatcggagcccacccttgtagtttctgtgggggctgttttggttaaccactcgcatcagttttaagtctccacaggcagaaccagaccatcgtgaacttcttgatttacatggtgg

SEQ ID NO: 84288 - DNA, 1079 bp, Homo sapiens
ctagaaagactggattttaccctgattgagcgagggaggctctcgaggttttatttggttctgcccagtgaccagccaccataaccacatccttcccccagactttttcctcttcctataaaacaaaacaaacaatgtgaacaacaaaagcaaaaacaaaaaactaagtagtagttggggcatttttattttaatgctgcttttttttttctcaccttttgctatatgctgatcccagtgcatgaaatttttttgtaatctcattcctgtgttgaagctctttcactgctttcgtgagcacagatgaatttgaaggctgccaggcagtagcaacatataccagcttccccactgggtgttcattctacccaatttttgttcatgtggacttcaggaatctgggatttatgatcttcggatttggctcttggcttgaggcttagcctgtgcagtcatcttggagagagggtttactaagcaaagaacaccccagaacaatctgggggaactgtgccctttgcaagagagcagttttaaagtaccctcgggcaatttagaagctcctactgactcaaggatattcttacctcttcgttaaagcagctcgcctaaggactttgctagataaaagttggttttctcaagagggtttctgcacacacccgaccgcatctttttcttttcttttctttgttttttttttttttttttttgagacggagtctagctctgtcaccaggctggagagcagtggtattatctgggctcactgcaacctccacttcctgggttcaagtgattctcctgcctcagcctcctgagtagctgggaccacaggtgcatgccaccacgcccagctaatttttgtatttttagtagagacggagtttcaccatgttggccaagatggtctcgatctcttgacctcgtgatcttttctcgcctcggcctcccaaagtgctgggattacaggtgtgagccaccgcaccgggcctcacgtttttcttttaaagaaatgtgtaattcagatcagtcttgctttcaggtagtctgaattaggggagtttgcctgtgtgcaa

SEQ ID NO: 84289 - DNA, 1844 bp, Homo sapiens
cttttaaaatttctacttctgatagagtaaagggtatagttttgtccgttttgtgttgctataacaaaatacctgagactgggtaattcataaagaaaagaagtttgtttgattcacagttctcatgcctggaaagttcaagattaagcatctggggagggcctcaggctgctttcactcctggcagaaggcaaagagaagccagtgtgtgcagagatcacatgggcagagaggaagcaagagagaagggaagtgccaggctcttttaaacaaccagctcccgtgggaaatcacagagggagaactcactcactaccatgaggatggcatgaagcccttcatgagggatccgtccccatgacccaaacacctcccggtaggctccatctcctgacatcttcacacaagagatcaaatgtcaacatgagatttggtggggacaggcaaaccagatccaaaccatagtgactatgatatatctttcacatttctctttacaaaaagaaaaacaatgtaaggtcccgtgacaattagccttactgccggggagaccataaggagtggtggagactgtggtaaactgcagcgcgcacactctgttaacagaggaggtcactttccattctagctgactgttgtcatatgaggatacacaactatgctggccagtttctttaattttttttctcttctaacagaatctagaaatgtagattgtgtgtgcgtgtgtgtgtgtgtgtttgtgagagagagagagagagagagagagaaatctttaggagttttaaatattggcaactaattcaatttatttctgtttttaacatattgcaccaaatacatgggtatgggccgaaaataacatgaactttttgcagtgtacaaatctctaatttgagacttctaatgaaaagatatttggttacagtatgagagacaagggactaaaataaggttgtggatcattcagggttaaatcagagcaacagcatgagtaggagatatatagaaacagatttattgcaaggagttggcttatgcaatagtagggttgcctaggcaagtctgaaatccatacagtgggcagtcgagagaggcagacaggaactcttggcatatgctaaagctgctatccacaggcagaatttcttcttctccaggaaaagaaacagttcttctcttaaaatcttccaaatgattgactccgtcacactcagaccatctaagattatctcccttcctaaaaggcagctgaataagggcttcaatcacatctacaaaatactgtcccagcaacaccttgattcatgtttgactggataactggaaactatagcctagccagggtggcaaacaaaatggaccatcccagggtagatgttaaaaaaaagatacccaccaaagataaataagatcaagattagaatgtcttcttttgataggatgtctgatttttctgaatttttgttcctaaaacataagattatttttaaaagcctgagaaacgagacattagtgatccgattcagaaaagaagccctgggtttaagccaatacgagatgggtttgtatctttaagtggcctttattaccacagtaataaacagcaaacgggcccaaatcttacaggcttgtgttggctttgaccaatgaagtagaacaagacctctgaataccccgttagttccaggctgtgctttgatggctctgcacagacagctcttttcctatacaagtcaccagcctcacccgtgtctcttaacaaatgttgttgacaggccgcgttgcaatttttctgcatgttctgacagtttaattcagtacctcctagctaagcactcagc

SEQ ID NO: 84290 - DNA, 1020 bp, Homo sapiens
accaggctgcaattaaaataattcagggactggggctgggcttgcagaaataggccttcttccctttggaacatacaatgcattttccagtctccccgtggagcacacgagatccttttagagcagagggcagtggaatgtattaacaagatgtccactggcaagaactagctccatttgtatgttgcacccaacggggttttctccataggggttaggcgtaacgtctttggtaaacttggcacctgtagaaaggtcttgtggtgggcaggggggtgtgaatgggggaatgagaactagggaacccaggacccaggacccaggacgagagttcagcaaagaccatttacagaagctatccttccaaaacggccactcagaaatggtgtcttttattttgcattctgtacaggaaggacaaatggagaaaagtctccagaaattggcctcgtttgaaaggacctcatgcaaagagagatctttggagacatttcagaaaggtttttattcaaacatattcgcagcttgtatgacagtggaatgttttgaaatgagcttgattctgtttacccatccttcttaatccaacaactctgctggtctctctgctgacacaagatcgttcgcaggttatagaaggatttaacacgtcaggtaaggtggaatttggtaaattccccaaatttacaaatagatgaaagttgggtaaattccccaaaattacttgatgacaaagatcatttgggagagattctttcaaaaatgcctactccctattcccatatcccagcctaagggaatgagtttaagtgggtctacagtgggtcctgggaatttgcttcttatctagcatccctggtgaatcttttcattcaagccaatgcaggaagtagtcctctgaaatacatgtccacagaacacgccgtgctttccagaagacgcaacagacagaaactttccaaagggaattacctgggatcatttctcatcctctctctctttctctgtattacttagcct

SEQ ID NO: 84291 - DNA, 1089 bp, Homo sapiens
acacttacaaatacaactccttatcctgtcagcaggggcttgcttaatctgaccctttccacatatgctggatcacttcacgcctccctgttctttcaattccttgaacacaccaagttcctgcattcccgcctcagggccttcaccttcagcctctctgtccccacctgctatcctccccagctttgcacacctgattgctttttgtaagtcagatctcagattaattgtcgcctttacagacagatttttcttaactctccagtctaaagaagccacctcctccagttctcagcactgtgcttctcactctcgtttattttgttgtttattcatttgcttgtcatctgtattttcccactagaactcaagtttgtgacaacaaggacctaggtcattttcactgctgtagtcccagttcctacaacagtgcccaggacacaccaggaacgtgacatttattgaatagatgaaagaacagtgtaaaaaccacattgctcttcactctgcctgcagccaactcaagaacaatttcctaaagcagctctgaaaattacgaaagaaatagtgcatggattccagccccagtaggcttctgggcttggtgtttctttaatttcatgtaaatttctctaagtaaatatgccttaaaagtgaataaaattttatttcgctttaacaagagaatataaaagttaaaaaggtcactgtagtaatagactaatctcaattaccagggcagcctctgaaaccctcactcccacctaatctcattcggtgcatacgcagctcaccgtgtgatttccaacacagctaaatgaaattataaagcagtgttaaatttattaatcatttaattagctaaatgttcctgcaagtactggctagatgaatggcatgtcattttctaatgcaatttgcctctcaggcagccagggtcagaaagggaagctcctggcatctcgaatgagctctttatatcacaccttctactgggagacggttgttataccactgattatatttgagacttgtacacaagaccagggcactcagatgctggaattggaaaatgctctctttcttacc

SEQ ID NO: 84292 - DNA, 1051 bp, Homo sapiens
tgtgtcttcatgtcattaaactttgaatctatggacatgtctttttctttctggcatagtttggaggtcttcattttatgatagaatacaaaacaccgagggctttaaggaggcatagtggtatgttcagctgtattttctcataatatagagtcataggaaacctgagccttggcatttgtaaggcaaaaagacccctggaaaagagtaatatagtaattcatctttatttgaaaagtatatcatcatccatttatttccccactggcataatccaggccgactttggctccccttcctgtgaaatgcaccctttccctctcatcagtttccacccctcctgctgaaaatggagtacaatgaatagatgtataataaaatcttttaattgtcttagcatatgttgcttttattaggtgggcataattgcattcatgggatcacctacaaagtcctttcgaatataaaattgaaatggcttcacactcagtgcacaagtccttctgaggcactgttttccccttcgctgcctccggttccccttttgctgtgaagttcacattgaagtgtgaaaagagagacgtggcaactgacacatgctggatcttatcagccgcgagtgccgttgtggccgactgaaaagcgactgtcatttctacaccatttattcctcgcctggcctcattgctcgcttcgtttcggaggaaattttccctgttaaagtactgtacttgtcatttatttcccttttttccactctccctccgtggctgggtttggatatgcatttatccaaaaggcaaggcttttacacacttccgctaacctcttatggtcaggctcataaaagcaacccaacaaagcttttatggggtcattacagatccctcaaatccctctccttccagctttcaataattctcttgtctctaatcaattcaccggctcttttatttgaaaatgggtgatggagtgggggaaaaaagtgggagcatcagctgaaaacccactttatttggactaaggtttctcaatgtgtgttcagttctgg

SEQ ID NO: 84293 - DNA, 2005 bp, Homo sapiens
ttgacagtgtatccactgtttttggggtttaataaaaccaactagaatttagacttaaaaagaaattattattccttttggttgtccacataaagtagtccagggctatcatatggctaaaatcaagttatttggttcatctctggtatgtatttataaagtcaacttatcagccattaagatggagatttgctttaaatttttgcagtgtgtgtggcagtcagaaaaacccatatctagttttcaacttcacctctggtgtttttatggcttaaccttatatcattgatccaacatctagcctgatgctggagctcttatttctagcctgatgctggagctcttatatctagcctgatgctggagctcttgaagctgactcttggaagtttggagggtgtagagtttcccatctagtatttaatttgtccctgtgccattagtcccagcttgaagtcatttgccagtgtcgatgttgacaggattgtgacaatattgcctttcataaaaccgagaaccaaagaattccattattctaacaaagcctgagtttcatagattgtgggcacatctagacagatatgtgcatgcttgatggtgcagagaaactgctgacttccaccaacctcatgctccccctggctggccatacagagggattcgttgtcatattgaaaaggctctgaaagatgagtttctaattgaagctcactatctcaggttggtgtttctactgtgtagtcccaagcctgtatccatatcataaaagtggaggcctggtactcctccaggttatctggccagtgtagactcctccatctgaatatgaacctccagggtaagaatttttcagacatgtctatactgaacagtaggatcctgcactttccaaatgtctgcctccttttgttcttcattgacccattctaattcctgttaggtgtgagaagaattgtcttcagttctctctccattctcattcatgatggaatcattgatccattgaccagttgagaaatgattgatgctgaagaagtggtattctattggtaaggcttattaccaaacttccgataatgaagcaggctaccaaaaacttatccagcccaccctaggagtgtttggatttgatcatggatgtagcatacaccaaaatccaccgagacctttgcaaaattaggctacttgttttattttgccagattatcatgggagagtctttaactagttctgaatatttgtaagtctgagtacttcatagaattataaagaaggtacagctgaccccttctcaccatgttgtaaatatttactgagactgggtgcagtactgagggataataatcttctgatttatcaaatcctgactgtctagagcaaattgtacactctctttgtgaatggtcctgtaacgtgtatgaacacatttctgggtgccttagaagttgtatttttcatgtgtgctaatatgcagtatttatacattgtgagaagctgctttgaataaaaaggttgaaacttcgtctgcatttgcttgtgttccccgttttgcaggctgcacataaagttcatgagtagattctgtggtttctgagcagagaagtttttgggggccttctagcggttgagacatctgatatttctaggttgtgcctgtgtttctagggagcagaggcatctgaatttggtgcctctgctccctagaaactacccagatttggccaggaggcttcagttattcaggaagacagtcactaggtgggagcaacagcttgatgccagaggatcccagaactggggggcacaggagtgattttttggggggttgatatcagcatttatcccttccctgatatttccagaatgtttccttgtaccaggggctccctcctcaactaaagatgaacctctctggagctcgagcttggacaatcccagctgccacacctttgtcactatggacttacacaaagttctttcacatacatgctctcattgctttgat

SEQ ID NO: 84294 - DNA, 1499 bp, Homo sapiens
gatgtacttaatgtgccccttccggcatagaaataatgtctgggtaacagccatcaaaatcactaagaatgacattggatagctatgagaaagtagtagagaattgatttaaaatatcattcttgtttggtatagattaaactaggaaatgttctctctgaagcatgaaaatgtttttcccatgtgaagtttagtacaaggatggaaaaataataatcacagtagactttgaacaatgcaactgtatctctgaatatccacatttaaaaatagccttcactgaatgctgaattgcatttcccattaatttttggttttaaaaattttgtaaactttttttttatttggaatttagtcacatccattaaattttccaatctagtttctgtggaaattttttaacagagagaaacaaatagaaacatcttcaaatcttcctaagtgaatatttaaaatgcagaattgcttatcttctgtttttctgtattcagacacttatatctgttgtatatattagtttagacactctcactaatatacacagtatttaagactctaaatgagatttcttaagtattttattttattctctgtaaatggttttgtataatctttaaacatctacactttgcctttgtagatatttaagggaaaccatttggggttgtcttgcatgtatatttttgttgtagataagtgttgcttagttatttctgcaaattttggttgaaatgcttacagactttaatacagtatatattttcaaaatataaacttttatatttctgtgataagttaggatatgcgttttaggcaatatttttcattaatatcacttgttcttttgaaaaatagcatactggtttggtgccaattttttcattagaatataatgctcttatattgttggagagcaggttaatcttttttcgaagtaattgcgtttgaagtataatttcaaaatgtattgaatttgtgaataagccttaccattaggatcagtaaatttttcaactttgcaactacataagtagtttaagatctccccgtaaattctcactgtgtggcagttgatggagtttgtgaacagagccttaagcttgttgcaaaaaaatttaaaaagggtaatacgggttgtttcctccatgcaacgtaagccatgctgatggactgaatgcagtctgtaattcatggctaatccgaagagtttgattgagttgatggcggcagggaccagatagacaccttggtgattgtctttggccataagaatagaccaaggataggttttccagagacaccttcatactgtaaacatggtttagacacggtcatagggaaggctgctggtccatcatttgttctgaacaaatggcatttcctgctcctgaccctggcagttggccccagattccttgtcgatgacttggaaacgtccattctgggtaaggtcagcactccctgagagatgttaacaaagtttacctatgagtcttact

SEQ ID NO: 84295 - DNA, 1703 bp, Homo sapiens
tctccttgcccctgtgcccctgggctgcaaggggactccagcagctgtgttagaccatcagattcaagtccctggattaactacagagaaggagggattgggggttgtggttttgagtggtgaggagaaagttcaggaaaacctgaagttgagagcagacaaatggaagggatgtgttctgcgtgaggtttaaaccatgggtcaagcacccagaaaaagctagattctcagattctcaggatggagggatttttttccgtttctatcacagcccctgcgtattcctggaggcccttggccctccccttcttcccctttcctgttgggcaccagcctttcttggcccttctttgaagagagtggaataaggcagcaagaagtgggcacagcttatggaggtgaggcaggcttagaagagagagttctggtgacagttctctaactctctgtggtcctttatcttttcctggcaatcaggtgcactgggcagggcaggtggaatgtattcgtggccctgagctttgagtttcaaagaacacgttgatagtctacaccagatctagagacatggtcctttaagcagtgaccctcaagttaatctggactgctggtccttctgatgaccttggttccctccctggaaagcgtgtctcctttaagagttcatgagggtcaggaaggaggggaaacctctccttcagccagaggaggatggaattaaagtcctgtgcaccctcccctttgtccatgtaggatcctgtaaggacttcggacctgtcctacagggagttactatagggagacacctgcttttgcccaaatgcctgttgtcacagctctatctggatcttatctcctcctttgagaaagcaaatgtgagctttccaaaacccttagatgaccctggttcttacatattgtggcagacagtgtcttcactactgctaaattttcattagaaagagccccctcttttctgttgaacttctgattgggcgcagttatattcagcatcggttgaagtggggtcaggattctccttggacatggaaggggatgtttagaaattcctttagatcagtgtccaccttcattccctgcttgaaagaactagaaatgcttcagctttggatgtactatcaaatccaaacttctaaacatttcaaggatctctgaagattaaggtaggaatgtgaaaccatttctaaggtggaaatcttgctgttaagtcacaggtcctgggtgtaacgggggtggtgaaagtctgtattttggttgtttccatacagtcagttccaccaattgggtgaaagcaggtgaaatctttttgctgcagggtggactgaatttttcactttctgggtagttgttttgatcatgtgtaggcgaattccaggtaacttacagcaaatagatttgggatggaaaataccagacctctggttgtgtcagggtttatcctaatagctttcctgagacagagctcagactttcatttttgatcttccaccccagggccccctctctgtctatgggatcctttctcccctctctctaccattttcccgtaccttcccccataagtcactcccaagagcctgggcaggtctttgaggaattgcggctcattttggcagccccgtcctgcaattacctttgggtttgaaagaatagctgtgggtgggcaattgaggacacctctt

SEQ ID NO: 84296 - DNA, 1757 bp, Homo sapiens
cagggtgagttgtatgtgacaaccattcgttcatttcatcgtcttattctgtgttctcagtgatccttgagttattgccaacagatcatgaaaatgaatcacgggaggttaaaacagtgtctcccacactttttcatgacacctatagaaaaggactctgtgtttgtatcaccattgggcaacaggcaagcctctagtggtctggggtgacatgggccccactgagccatcccagggcctcacagtgttcacgtcttgacacatctgggatccattcatggccgtgctggaaacatgggactgggaaggcccaggctggaggaggcagccttctctggctgtgagtatgggaggttggccagtgccccatgggccaggtacctagttctggagcagagtccctggtgcccggctaatcaggcctgtctatttccctctaggtgttagaggagtccaaatgcctcgtgcggagcttcctgaaatcagtgctggaagacgtgaacgagaaggaatgcctcatgctcaagcagctctggagctcctccaaaggccttgactcccttttcagctacctgcaggacaaaatttatgaagtctgaggggccccagctcacgggcccccaacttccagctctgccctgtgtttcggaaaccagagcacagtgtctgccccggccaaggagtttgtcaaggtgtctctttatacgtagggttgtgtccatttcctcgtgtcctttggttgctcctccttggtttgattttgtgtaatggatggaaaacgcagcatacttggcctcccccacctccctgcccttcctggccagagagctgtccaaggctgtatcttcccagggctccgccaagcaccgctgtcctttccccacttgctgaaatgcaccatgacggtccaggaaggggaagaccactttcacattcttctgactcaggctgtgtctacacagtgcctctgacttggagacttggccatcatggctctctctggttgtatttagatcgggtgtcagaggacgaccaatcttagggaatttccagaccaatgagcaaaatgattgtgcacacctggcctcagtctcctttccgacgcaaatctgtgtgactattagggcttggtcttaaaacccaattgagtgatttgcaaacccagatattgtacatttagaaatgttttgttaaatatatatttttaaaacaatgtaagtggaaattctgataatttatgtgtattatatgtaaagctagttttgcaaaaacaaactactagggaaatgttttttctttccttggacttgttttatttatttatttttgtttatatattgtgatgtctgttgttcacacagatactattttcatactaccctggaccaaatcccacacaaggttcatgccgtttggtgcattctagcaatgaaccatgtagaaataaagtttagagagatgaaaacagaaggatttctgtggacaaaaggaatagcgctgcacctctgtgtaaaacggttctcagctgtaataatagaatactagttccttaggtttgtccttaggagacatcttgggagagttttttcttccctctgctgtctttaaggagttaaagggccctcttagcctgaatgatcctgaaacagacccagtcccaaattgcgtgatgttgggcaggagtggggataggccctacctgagaatagcatactgtctagaataagacttctttctttggggcaaatgactgaact

SEQ ID NO: 84297 - DNA, 1681 bp, Homo sapiens
cctggtctggaagtaagaatagtgaccactcactggtgttggggaggctggaacccatgtagcagggtacctggcctgcagtacatgttcactgctaaggtagcacttgttggtcttaccacttaccgagggcacctgtgtctatctcccaaattctgtcctgccctccacctgcctaagacaaggtcatagagacctaaaaatcctagggcatacatgcaggagacccaagcaggagattaggggaacttgtcccatgatggcagggtggccagcacagttcttccatgtcagatggcacctttactggcatgaagaggaggaacaaaatgccttttatccagaattcatcactacctcccaggaatgtgaacctgcaggtggccatagcataacctttcctttcatttattcttcactggaggccttgagagtgggtccacccacttatagatggggacattgaggatgaataaccagcatggctcaggtcccatggctagtaaggtgcagagccagaatttggaccaggggcttggaactccagtgggacactgaacccaggtctggatctgatgccaaagcccacttgccatgtggcacctgcaggccgtgcggggtatgagctggaggaaagatgagcaaggatgtataataattaaattgagtcatctagagatggcttacatccctcacttgggctgtgcatggattttttccacatcttgtaaagggctaaataagcaaatgccagaacaagatttgcagagatttaccaaggattgagtgactccaggccaggcttccagatctgcagccagtgaccacactgcctccttattagcactcttctgccttctccggggatggtgctggagggctttggctatgataagtgtttttctccttgctctggactcttgcttgtactcaggggaggctccctgcacaggcagaagcagattccctggcctctaccctcagggggtcaggcctctggctgtcttgcagtctgaaagccccaggcttacaggatagacacttaacatccctgcaaattcatctctgccggcagatcatgaaagaagtccggcgagcgctctgcaacgcagccacagacgacagcaaactgctgctcctcagcgcagtggggagcgtgttctgcagcggcctggattattcctacctaattggccggttgtccagcgaccggcgaaaggagagcactcggattgcagaagccatcaggtgagctgtgctccttttcacacaccctggggtcctgcgtaggattaccaagtaaaaatacaggctgctcagttaaattcgaatttcaaacaaccaggaattttatttttagcataagtatatcctgtgcaatactcgaggtctgcttacatttttaaaatgttggttatttatctgaaattcaaattttaattgggcatcctatattttcatctctaaccatggtcctgccaaaattagggatgctttgccctctaggttagatcccactttcattcttttgatcggaaagattttttatttgctatcaaggcctgagtctggtagtggccatgtgttgtccacactactcccgccccttgcctgatggggagagtctctggttgtctggttgtttgtatgtcccagcactgccgtagctcagcagtgggga

SEQ ID NO: 84298 - DNA, 1060 bp, Homo sapiens
ctgtttatctcatgtcatttcgtcacctcccttctgatgtaggattgttatgatccacattgtatagatgagaaaatttaggcttaaacaacccaactgggctagggtctcacagcttaaccaagtaggtgccaggagggcaggggttctgttcttgctcgcccttttgtctcttctgttcatcccagtgccaggcccactgaagacatttaactccgagacccctttttctgtccttgcaatatcctgtattctctttttcataatagcaatgggaggttaatgagaagggtatgttttggaggatgaagtcaagggatggccactcactcacatcgggataatagaatgacctagcattgtccagtgtaccccgtaccatcagggaggcataggaagtggggtggggagggaggtgctgtgctcttgaatttgtgattgcattattattatggttgaaatagaccctggttcttttacggggttgtgggtgcggccatctggaatgattgacaaatggtgagggaagcactgtggctaaagctttggggttgtggggtagtggttgtgtgctgccccttctctgagcatggtgttttgggggcctctccatcctccgcctgtaacagaagcatccctggggttctctgctgtgtagacctctgtgtgggattcaaagaagcccagagcctgcagtccaccccgaaagcagctcttcatatgtttatacacctggaaacctcattattttaagctcatcatgacatctgcagagaccagtttttcctagattctttctacttcactactttctaaaagcgtgctctaaaaaggcacagcattttctttcaagaaattgaacacatgtgaagtctccagttcattccctctgtggagcagccctgggtggtaactgttgcccactcatcatggaaaacatgttgtgctcgtctgatttaaggtgcacaggttctcacctcctgagctgcgggcttggttaattggggttcctgccctaatcagtgtcagttggttacagaacaggaggaaaacagtcaaa

SEQ ID NO: 84299 - DNA, 1054 bp, Homo sapiens
tttggatgttagctagtctaatgtgtgtagtggtacctcctggctttaatttccttgctttagttccctaatgaaaaatgatggtgaatgtcatttcaatatgcttgtcatctgtataacttctttgttgaggtgtctcttcagatcttttgcccattttaaaattattgaaattattttgtttaaattatgttctttgtaatgtccaatttaaaaattttttatttcacggatcatgtttttagtgtcttatgtaaaaagtcattgcaaacccaagttccctagggtttctcctgtactatcctctaggagctttataatttgcattttacatttaggtctatgattcatattgagttaatttttgtttgcaaagtacagagtttgtgtctaggttcttttttttccctttttcaaatggatatccatttgttccagtacaatttgttgagaaaaactatcctgtctccattgaattgtctttatttctttgccaaagatcacctcggtatattgctgtggatctatttctgggtcgtctatcatataccactgatgcatgtatctgttctttcagcaacaccacgctgtcttgattactttagctttatagtaagttttggaattgggtagtgtgagtcctccaggtggattcttactcatcagtattacctaggtcttttgccttcccaaataaagtttagaatcagtttgccaatatctacaaaatagcttgctgggatttgaattgggattacattgagtctatagatcaagttgggaagaattgacatattaaaaatattgagtcttggcgaagtgtggtggcacacgcctataatcccagcactttgggagcctgaggtgggaggattgtttggggttgggaatttgagaccagcctaggcaacatagtgagaccctgttctctgcgaaaaataataaaatagccaggtgtgttaccacatgcctgtagtcccagctacttgggaggctaaggagggaatatagtttgagcctaggaggttgaggctgcagtgagctgtgatagcag

SEQ ID NO: 84300 - DNA, 2017 bp, Homo sapiens
acccccgtgcctggctaatttttgtatttttagtagagacagggttttgccatgttggccaggctggtctcaaactcctgacctcaagtgaatttcctgctttggcctcccgaaatgctggggaaaatataagcattttagaaattaaagtctccatattctcccttcccaaatcctatttagaggtgacttctgttaatgtttccttatggatcttttgggactattctctaagtttatatatatgtatatgtatttatatatattaaatctatgtactttattacataccatatattatatatgtgattatattacatatttacttaaatatttgtttgttgagtgatgaacaggaattatcccatttctttctctctccatgtatgtaggtatagatatgtatatatctgtctgtcatctgtctgtctattcatttatccattatttatctgttagccaaggcctcaccaagttgacatccgagtaaagattgaaggtggtgagaacaccttgtcctgcaatttcttttttgacttaaagcctgtcttggaactctttctgagtcaggacgtgtggaacggcctccctgtttttggctgcttgggatttacggtgtgcagggacttaactgttcctctgtgatggccatctgggctgcctacaaagggacctgctcctgccaaacctggctagggccagtctttgtaatgcttttccaggccctgttgttttaattttagtttctaaatgtgggtgagcatcttctcatgttccttccacttgtgtctctccctgggcattgcccgggtgccatcctgctgtggaaacagtggtggcgagtcaggggcattcagccatgttgcctggaacaaatgacccagcctctgtgggccagattcttaatttataagatgcagatattcatacctcacgggttgggggtaaagaataaatgaattcgtttataggaagcccttaacatattcgctggcttgtggtagacatttgataaatattagccgttatttcaattttttccccctttttccaactgggtctttatatttccccacttgtttttaaaatcactttacatacagtacacatatatgaatcctttcctatgtatgctaaccagtactcataaaatgactgccatataccaggaactgtttagacaaataactgcaatacctcatgctgtgatggagacatgcagaagatattgtggggccataggtaagggcaccgaagccagcttaggggaaggaattactgagggcttcttggaggaggtgatgcataagtggaatctgataaaatgagccgaaatgactgaggaaaaaggcagggatgtcaggaggtgatgacagcatgtacaagggcatagagctgagggacagcctctgggtgcctgttgacacatcacaaagaatacagcagtccagccaattctagagcagcctgcacgggaggctgagctccagggaattcctcgggtagtcaggcttgtcttaagaaccagatagatggaagcccaccccatctgtctgtgttctgcatgtgtgactccctctgtctgaatgcctcccgctgtgagccctcacgtgagtagtaacctctgctcatcctgcaggtctggctcaagcagcaattcccccatggaaacctttgctgactgccagcatagctcagtttccgtttttatttgcacacatggaatggtgtttcttggttgacagcactgacctcggtttgtagtggtcacactgattattcgggtaatctctgcctctttcactcgatcagaagctccacaggggagggatggtctccatttttgttcacagctgtatcaccaacacctaacaatgctgggcacttagcaggtgcttaagaaatgaatgagtgagtgaatgaatagatgaaagagaggacttaaggagccggttctgctttaagatgggggtcctgaggccaggtccacccactgcaaacccttctgacatctgtc

SEQ ID NO: 84301 - DNA, 1411 bp, Homo sapiens
ggattcacacgagcctttactctgtgaaacgtccctaactaggagccatcgtttctctttgagccctagaatagcataaagacttgcagcgttctccaaattaccaggaaggtgatgagcatcactgttgatgccagtcttgtggccccatgtccacatttctgaaaggacgtttaagatcctttccttgcatcttgatgactgttgtctgctgcacagacgttgcatctcacacattgcatgattcagtgtttgcagaattatctctaccattgaacgagtcattccacacaacacacacacgcaacatttgccattttctctccattgatcttttaaaatcgtctcagctttcacttctagaacatttgtttatctcttcctactcactctttcaacatgattatcatttttccctttattgattataatggataaccatgttttaaaggcagttggaaactaagcgcaagcaatgggaagtggcctatggcttttgagaatctaggggctcccaaacatggatccggcgtcagaatcccttggagggcatgttgaaacacagactgttgggtgtaccttcagcattctgatttagtaggtgtagtgtggagcctgagaatctgcacctccagcagaagttcctagatgctgctattggtccagtgagcccagtttcagaactactgctctagactaatgagctccaagatggcggagatgaaaatgcagatggtgttgtgcctgccaggtggtggtattgaggaaacttgaagtgcttgtgctctgcacctggagttggcattcataagactttgtaaagagaaagtttgtgaaatgaaaagctgtaaggttgaaagttttagagtataagtacttccctgagatgaggccttggagtttccaaagtaccttgtgtgatcctcatggcagtcgtgagaggtagtttttctacccattttacagaggtggagaccgaggttacaagtgtccaggttggaattaggagagaaactcaggcaatttgactgcaaatttaactatagagctggcctctataccacggcccagctggattccaggcagtagaatttccccaagccctgattactgacagagacattttgtgactgggggagggtcaggagtgcttggtggtacaggatgtacttctttgacaccctccttgtttgtttatttatttatttatttatatatttttattattatactttaagttttagggtacatgtgtacaatgtgcaggttagttacatatgtatacatgtgacatgctggcacaatgcacccactaactcgtcatctagcattaggtatatctcccaatgctatccctcccccctccccccaccccacaacagtccccagagtgtgatgttccccttcctgt

SEQ ID NO: 84302 - DNA, 1049 bp, Homo sapiens
tcccatagcactggtgcccgtaaggttaaggcactggttctcagattctgcatgtattagattatctggcaactgatgagagatgcagatcccatggaatctgatttcctaagtctagggtggagcccaggagatggacttgttaacaaacttcctgggtgactctaccgcattttgagatgagctttgtggccaaatgtgtggggggtgggaccttgaagtttcacatcaggtgtcaatttaattcaattcaatactgatttttttttatgacttcctaagagttattcaccatgctgggtgcttgaagtagagtaatgaagagataggtatggacttttccctctgaaacttatagcttccctctgaaacttgccaggaagttggaatgccggcctctggccccatgctgagaaggcgcccgaggctggctccatggaaggagtaacacatattacatacatgtgcatggcttcaccatacccacaatgacgtcttctgtggtcactcgtgtgataattgtcccagccaccatcagcctttcaccttctagtcagaactagcttgttagccaggtctgggggaactgggaagaggaaaagactgagaatccttgcttgagagagaaggagagtgttgaagagagtggtttgaggttcctggacaagacccaagacaggggatgccgtggttccagaatttttcagcaacaggccagaggtgtagtccagcaaaacgtgtttccatgtgtgttttcagccagagggaagctttgctgaagccagtgttcaggcccacgtagccctgaatgtcctccttctaccctcttccctaacctcaccttcccttatctggactaaaggatccagtctccaggggcccaagggtgagcactgggggtttgcagcacaaaggagggctcatcttagcccagcagaaggggttgggggatcctggctgcagttgcacagcatttgttttgggggtgggctgttgctttttatatggttttagcttctctttggtgagttaaggttctgcatacagaa

SEQ ID NO: 84303 - DNA, 1034 bp, Homo sapiens
aagcagtccagtacctccaagctgctgcgtgacagtcgaggcccgtcggttgagaaactgtcccacagaccttcagatcctggaaagagcaaggggacctcccataaacggaagcgaattaaccctcccctggccaagccaaaaaaagggtattcaggcaagccctcttcaggaggtgacagggccaccaagacggtgtcttacaggactacccccagtggtttgcaaataatgcccctgaaaaagtctcagaacgggatggaaaatggggacgccggctctgagaaggatgagaggcactttggaaatgggtcccatcagcctggcttggatttgaatgatcatgttggagagcaagatatgggtgaatgtgacgtgaatcacgctacactggcggagaacgggctcggtttgtagcttttctttctcttgggtttggctctggccatggcgaaaggggagctctgcctgtagcctagggacatacataagacccccacctccatccccgtctcttagctagccagcaattcccccttcatctctctcacctagagctttgtggactcggtcgtaggcccatgttggttacagaccctcatgcatgtggggaggctaagcctctgatgctccagccaaggtctggaatgggtccaaagttccagactcttatttcaagacacccaaggccatggtaacccctctagacccacttccctgagggcagctcaagtcctcacccccaggacccaagacacgtgtcctcagcgggccagtgcctcccagggcacagtgcagagcccttgcttgcagcctcatcatgcccccagcagtgtagcccagagaggtagggtctgggttggggtccgtgccgtcttctcagacacagtgtggacttggagttcaccacgccagtgcctgtgctggagcctcttgtccttctgctatctctaggttggatgattgacctatattaggtcctgtcttagtctgttcaggctgctgtcacaaaacaccttagaatgggtaattta

SEQ ID NO: 84304 - DNA, 1020 bp, Homo sapiens
ttattattatatattttaccgatggggacaccaaggccagagaggtggggtgacatgcccaaggtcatacagatagaaaatgacagagccaaggtgtcttcctccacataccaggctattagagatggtcctgttaatactgctcatcattggtattgggttaagtagaaattgttgacaagccacccagtggctttgtgaatgggaccagaggtagaagaactagccttgatgtcccccataaagctacctgtgactctgtgattgcaacctccagtaatttggagggaacaaaactaagctccgcctccaatgtggccccaaatagccatctagaccctgcacccttgctaaccttcagcttttcatgtagcccaactatgcatagccaccttccatgcatggaagcacttatctaagtaggtatactctctcttcttcccatggaggagttgactgttttaaggggtcatattctgaaaggtggaggaacattctgtctttagacaccactaaggtttgtggtcacaggagtctatgcaagattactgtggaatgcaaacgtacatagttgtgtattttccgcaacaaccccaagagataggcgctatacttctgccttgctctatgagtcatctgaggcccaaagaggtttaataacttgctcaagaacacatgataagaggcatagcaggggatttaaaacagatcgttttgttacaaagccctgttcttaaatattttgctaatgccattttgataagtgtcatctattaatctatccatccatttatgaacccacttctgtccccaccttttcatccatcccacatctgtccatccatccatccagccagccagccagccatccatccatctattcatttatttatccatctagtcacccatacatcctaccatccatctatccatctatccagccatctattcatttatttatacatctagtcacccatacatcccaccatccatctatccattcatccattcatccaccca

SEQ ID NO: 84305 - DNA, 1007 bp, Homo sapiens
aatcctgggttccagagcaattgtaattttatacattgtgctggtttggtgggaatctgtggtggggattatgactggtgatgagtctgtttccatttggaccaatgaagaattgaagcagagggagaggaggccctgtggctggcatggtaggggctctaggagaggccagcgcaggaggctaatccgaagtgatggaaagatgcttcaggacttcaaggaaattggcaggagttgaggggaagagcctgaagctgcggatatgctgccagccttggtcaggttggacccactgcacgatgagaggtgtatataatgtggtcgccgagagcatgggatttggagccaagatgcattagaccaagtcttagctcttctgtgcttaccaaagtccataacttctgggtgcctcagttttatcctctatataaaaaataagaaaataaaattacttaccttgctgggttattttggagagttaatgtatagggatcaagtacagcagcagctggcccttagtcatgctgaatcaaggttaggtggtgatggtggtatgttatcagcctgctagtggaaaggctgaggaggagggggtggtctcccttgcttggaaggcccctcactgctccagtccttctcatctctacaggctgagtttgctgtcagtttaaattgtcctttcttggaggagcctttgtgactgttctgtttgaagtaaatccattcccgctgccgttgtttctcacagcaccttcctctttgccatcagagtacgagtccttttttatttctatttatttttttattttttttttatttttgagacagagtcttgctctgtctcctaggctagagtgcagtggtgcgatctcgcctcactgtaacctccgcctcctgggttcaagtgattctcctgtctcagcctctggagtagctgggattacagacatatgccaccacgcccagctaatttttgtattattagtagagatggggtttcaccatgt

SEQ ID NO: 84306 - DNA, 2305 bp, Homo sapiens
tgaacttcagtttgtttatctgttttcttgttgaagaatatagttgtttctagtttttggaaatgacaaattaagcccctgttagtattcacatacagaacttttttttgtaaataatacctttggcctcatttctgctgtcttgtttaatgctttttgtcttttatgctttattacaatttcttttgcaatatagaccttatttccatcttctcatttgatttgaaatgcatatttcctctttttatttctatgtgttttgtgtgtgtcttccaaacaactttattgaggtataacttatttatgattacacacattttcagtgtaaaagtgacttttgacagatgtatacctcaccacgcaaatccaattatagaacatttccatttccccagaaagtttccttatggcctttgcaatcactctcacccccaccccgccatccacccccacacccagcccccactgatctggcttcgatcactatagatgagtttgcctggcatgtagtcttctgagtctggccccttcattcagcataatgcctgtgagtttcttccaaattgttgtgtgtgtcattcctttttattattgagtggtacttctctgcacagatatgctatggtctatttattctgttaaaatacttagatttctccaggttttgtctgttatgagaaaaaatgctctgatcattgatcgtgtcattttatgggcgtgtgttctttcttgaaagtaattgttttgtcaatatacacaaacatgttactctagtgataaaggcagacatcattcagttaagttttcactcttcttcatgtttgaccatttcctatactcattatcttaacttggcatttaaaaatcacattattatagttttgctttctattttcacattatatatgcaagtaatcctttgaaaatcatttaatatttgctttcaatttgtcataattacaatgattacttaagcctcaactccaggtatttatttggtatcattgtatagcattaatcctaatatgtattcttactacaccttctccagttttacgttaaaaatttaggtttaaaattgttctctgaagtacctgtttgagtcatgttttaaatgggcagttcctattttgtcccctaagagatgagttatcttcttcccccgttctcatctgaaggaccacttgggctatagaatagaattcttgagttcagaatatttattgcttcaacaggtgttctggaacataatgttctgaagttggcctgatttttggatgggggagggctgggggatgaggcagataattcagttttttgaaatgaagaagctttgcatggatagaaataaagttgatctattctcaaactctccttcccccgtcagtgaagtcttcttttgacgtgcagacttaggacgtagatttcttctattatgacttgattagcgtttctgccctgtttagatttttttctctttgttggacttagactgggtggatctctattaactcttctaggtatctattctcattttccttagtgctttctttaaaatttctgtgtccttttttcctgctctcttggacagcttttcgagtatgttgtctatgtcgctggtgtgatttcccgcatgttggttctgtcctttcctggttccagcgggaattttattcccttgcttgcgttttctctttgattcctttacatcctttcttatgtaaatgaatcgtttttttcatttcagcttccttctcaacctgttggtttcatttcatcatgtatctcttcttctctctcttttaaaaacatgggtcatattttctgtagtattggaagacacaccacaaatactattcaaaaatatacagtagtactcttcactggtgtgattgtactgggaacattttagttatgatcatgttcttatgttttaaaaatttttatgaccatgttgtgtgatgatgctgctattactaattttgtgtgaggtctctctaggcatagtgttttccagcagaatggatatggaaattcctgttggtctctctcaccacttggatgccacagagtcccccagtcagacccttgcccagaatctagcttggtttacatggctctgagccaaacttcttggtctgacagccatttcccttgtgtagttttgctgcactggacgggaaaaacctactgccttctctggctagattagctgaagcaatctaagtcttctggattttaaatagcccatgccaagttgttcccagaacttgccctctttatccttcctgaggacttcataccc

SEQ ID NO: 84307 - DNA, 1067 bp, Homo sapiens
ttatatcagatggactcttgaatatttattcttcgggttataattctttgggatatatattctttgggttactcttattatcaggagcatgttgcttaattttgttctgttactcagattgttccagttttggccatcgggagctctttcatttggcccttttgatatattcccgtcattgtgggtttatttatttatttggagcactttcataccttttagcactctcagatcttctagggtcatcttgtatgttttctgtcccagccctagagttaggcattttcctagggagccctagtttttttcattggagagtgatattaagaaaccatgatctgtgttgctggatgtgctcattgatagtagggtgtgactgcttcttggtcttctcagaggaaagatgtaggaaatatgtgtgtgctctaactcatgtatacatatatttatatttccatgtttatatgtgtaaatgtattaaagtaaacatgagtttatactgatatctcttactccgattcagtattccagggtttattctaatcttctcctttagcttatttatagctttttttttaagccagtgagaaacctggctttcatttcctatcaattatttacatatttgctcaaacctagtgtatgcttaaggtcattttttaaattctttgtacctctgcaaaaaacaattttaccaactagagcaggggttcctaaccccctggttatggactggtaccaggccgtggcctgttaggaaccgggccacacagcaggaggtgagtggtgggtaagggagcattaccacctgagctccgcctcctgccagatcagcagtggcattagattctcataggagtacgaaccctcttgtgaactgcgcatgcaagggatttgggttgcgtgtttcttatgagaatctaactaatgcctgatgatctgaggtggaacagtttcatcctaaaaccattccgcccgtcgtggaaaaattgtcttccatgagactggtccttggtgccaaaaaggttggggactgctgaactagaatacagtatttgtatactttg

SEQ ID NO: 84308 - DNA, 1057 bp, Homo sapiens
ggttgcagtgagccgagatagcaccaccgcactccaggctgggcgaaagagtgaaactccatgttaaaaaaaaaaaaaaaatcagcctgctgtccataatcatgtaattaaaaaatagggcttacggaaaaagtaggattggggtacaaaatcaaaaatgttgtcagtggctcagtgaaaaaagggatggtagtacagttttgcacatgcaagatggttaagaaatctataattcctacaataaatgtggcactttaccttaaaaaagactgaaagttggcctgtggaagtagatgtgagaagggctagtaattattgtggggttgtgaaataggtttttctgaaagttgtgcacaagtgtggtccagaacacactcgcttggtgaactgggggagctcatgggtgtttgaggaagtgtgtgtgtgtgtgtgtgtgtgtgtgtgtgtgtctgtttattcctgcatggctcagtttacttaggtgcagctttagctttctgcattcatctagtgcttctcatggacgaaattgtgcacaagaaaatgcaaaatttgcgttatgctcaaattattccctgatatataaattgtgttggaacaaatttgtattttcttttttttttttttttgaaatggagtctcgctatgttgcctaggctggagtgcaatggcacgatcttggctcactgcaacctccactccccgggttcaagtgattctcttgcctcagtctcctgagtagctggggctacaggtgcacgccaccacacccagctaatttttgtatttgtagtggagacggggtttcgccatgttggccagggtggtcttgatctgttgacttcgtgatctgcccacctcggcctcccaaagtgctgggattataggcgtgagccaccaggcctggctaaatttgtattttcaaaacaggagaaggcagtcctgcctgtgcttttctatttgtatttcttcttgtctgactggcgccttacgcttctgttcaatttgcaaacaggagctctgctgccagaagaacatttttattttcggaatgtag

SEQ ID NO: 84309 - DNA, 1477 bp, Homo sapiens
gagccggtcatgcatcttacatacatcagatgaaaggaagcagatatcttatgtctgatggcattgggacacagtcctttttgttgactgcattgtctttaagccatgcatttcccattcatcccagagctgtacactgtagcttagggctgtgttacccataggcaccttttgggggccattgtggtttggttttcctttccaagcacctcgcagagacctatggagtccaccttctttctgcctccagccacccacttctcccacacggtggaaggagacgcccctgccccatcctgctgctgggtttgggctcatttttgcctcattcacatctgagagggttcagtttcttgctgtggtggtgaggaaacagggagatgtgaggcgcagccgacatggagagcagccagggaccagcaatgttgtgacattgacgaatagaccaggagagacttgtaagggtacacaaaggacaccaggcagggatagtttgcactgggggtcttatgcatggtctccaggtgatccagtggctacgtttcagggactctctggacattattttaaaacatacgcaaatttaattgcattcagttaaatcacagtgagcagtggtttggagatatatatatatatatatatatatacacacacagacacaaagacacatatatatacacacatgtatatacacatatatgtacacacatatatatacacatatatacacatatatacacatatatatacacacacatctatatacacacatctatacacacacatctatatacacacatatatatacacacatatatatacacacatatatacacacatatatatacatacatatatatatgtgtatacacatatatatacacacacatatatatgggtgtccttctcccctgtcggttggataatggataattcagggtcccgttgacgtctctattccgcagtgccatactgagtgtggtcagccagggcattatgctcttgctaggtacatcagacaagggcccaggattgggagtacaggtggcaggagtgtcccttgaaacactatgcttcagatttactgagtatttattaagcgcctcttagggccaggtgtgttgccttttcaaacatttaatacttagaacaaccattggagacagactgttatccctacatttctgaagatgaaaggaaggctcagagaggtagaggaatttgctgtgggtcacacagcatgtagctcaaattaaaaatcagagctgtcaggatccaaaccttgagctctcttccactttgcatcctgcgtgttcagaggaggagaaagcttttgcgtatgggaaatgtcaactcttttattaacttcaagtgttaataaaaacaggacgctctgttaagcactcaaagcagtccccacctttgccccctcccaggtgtgcatgcagccctccacaagctgtcaacgtctgct

SEQ ID NO: 84310 - DNA, 1050 bp, Homo sapiens
tacaaatggagaaacggaggcactgagcagttagaagacttgctcaaggcccacacagattcctgctcccagcctcttccggggcctgggaatcttcagttttacaggtacctctggggatcctcagactccagtttgagaaacattgcctttgcattcacgggggtcagtgactgtgtctttcttgctcagcactctatctctagggctttgcattggccaggcacgtaacaggtgttcagtacttgctgaaggaatgaatgagtaatgttcgcttccaaggagtccctggggaatctcaggagctgctgcccaattctctgggagcgttaagtcgtcaagcccagtattcatgccctagttctgacaactttggatttactgccaagaacaattctatctggtttcctggttctgctctctggatccctacattgttccctggctctaagtccttccctccttagtggcctccctgtgtctctagaccccaggcgctcccctgctcttgtcagtacctcttttagggactgggattctgtctccaacagcggtgtggctgctgggcaggatttccggatgctgccctctggcccattgttctgggttctccatcccactatccacgtgtctgttgggacaccacctaccatctactgctgtggccttgagtgtcaggttacacttgccagactggacttccagctccttcagctgcattctttttccatagtggccaattctagctcctgagcctggctgccatccagcttgccttgtcacggagcagtaaatcagctctgttttaatatagccaggtgatgcagatcttaggcatcagagtgggcaggcttgggttcaacttttggctcttagggtgagcactttaattctcacagcctcagtttccacacctgtaaattaggtatgatagtcctaacctccccttcagtgggttgatgtgaggattaaatgggattgtgcacataaggtaatagttcagttttaactattatgtgagtttgccatccatctttaaacaagtaatga

SEQ ID NO: 84311 - DNA, 2468 bp, Homo sapiens
ttttcattcacttatttattcattttattcattttcttcttttttttaaatcagtatttaaaaacctctttgggtgattctattttgcagccaatattaagaatcattgtacttttaaaagaaacacctctattatatgactcaatgcttccttatcactgggaatttttattttaatttgtttatagagcccttttagacattctctcagctcctgaggggtccataaccacttcttcctcaaagaagggtctcctgagaattttgtaacagctaacagacaccagaactgggtagtggctaggacctcttcgtcgctgtgcctggaatacagtccctgaatttgcagcccagcaggttcagtgagtttggggagaggtggacagggcaaaggaactgtggggactgcatggcaccaggagaaggatggggatggtcaccggggaggggacagagcagctgtatcttctgtcttccctgtggtcactgctcagcttcagtcctggagaagctgaagggtggtctagctgggccattgttaggcatgcttgatttcaatcctgattacagagatgataaaatgggaaactgtgcatattttagaatcagtggaatatggtggatcacgtgctagatataaacctgcttagaagaaagtggtcaccagcagcttggctttgcaaaggatgactgggctcctgcagacaaggcagaacccagagctcaagaagcagtttggagagtcatgatcgccactctcccaaatagtcactgatggaaggacttccccatctgatactattttgctgcccaaacctgctcatgccttggaaaagaagcttgtgaatcagggatgattttgaatccaggccccagcgtgtgtttgctacatgacttcaggcaaaccctttaatttttctgagcctcggttttcttaggtatcaaatgggaatgagtcaccacctcagaggactgttgggaggattaaataaattactgcaagtaaaatatctaacatgtgcagacagcaaacagctagcacatgacagtgattagtttcttagcactcttattctgtcattggttgttcttagtagcactgggatttttgtacttcttgttttggtcaagaagtgggggcactgagaaggaagcccctaactgctggggaggagctgacattttcctggggtcttggcggaaatgtgtttactgcacttagggtctctccaggatgagctcattattttctctctgtagccacttccttataatgaaatgatatgggttctttctggttattttagtctattcccttatttaagataagttaccccacttgtgactctaaagaaagcctttcagcaaccacacatgctcaatttctgaagcggacggctctcagggtatatttttaaaccagaaacaacattacaagtggtagcaggattcccaggccagcctactgaaatcttcactcactaatgctgctgaatgaaagtaataataagtggcattatcagctgctgcctacactcatttatacattggtccaagaggaaaatgcaccctgaatcccaggaagaaatgccaggagcatgttttcccagcagcaacatcttgtttcagaagccacgttgaagggattaatggggatggatactcctgagcaaaataccctcaacttttaaagagttgtcagcagagaacagtgtccttgctctgtagacgagcataccctcctttctagagtatttcctgttggagtcaaatgacactgatgacaaggtttgtcagaggcatttgtgagaataggttgtttttgctctacctggtcattggatactacatggtgactgttcacagtcatggcagggattgacatcaaatctgcggggcaaaacccagtgcctagtttttgtctctttgcttccttgatgttctggcatttagagtgccgatgactataggtgctttccaggattcagcacggaatccaggcatgtccacagagaggggagtcatgaggggaactggaagaagggccctctgagcaagtgttcccctcctggatctgtgtggatattgtgtagtttcagggcccgagagatggctcaaattcttatgttcccagtttcattctctacctgcccatttctgcctaaatattatttgctcgaccactaaaggctggtggctttacagtgtcaaggcatgggagaggggacactgttgggaaatgagccagccacagggaatatcaatgatagatttgaatcccttcccagatgatcagggtttgggtacagaggagggcctttggcctctctatgccaggggagggccagggttggacagcaggtagccaaggcaggtcccaacaatgtctttggtaccctcttgggctgattctgttgtcatcatccctgtgtggacagacacgggctgtgaacaaggcacttcctgtc

SEQ ID NO: 84312 - DNA, 1249 bp, Homo sapiens
aagtgacattaaactaggactgaagggatgaatagatgttggtgaggcaaagtgtgtgtgtgtatgtgtgtgtgtatgtgtatgtgtatgtgtatgtgtatgtgttgcacaggtgtatgggagttcagagtgttccagtgaaagggaacaatgcccaccaaggctctgtggtgggaaaggacagaacatgtccttggaaccgatagaaggtgactcagttgaagtgtggtccaggagtggggcaggcaggtggcatctagaccatgcttaactcagtagactgctcagaagtctggatttcattcttagttcagtgggaaaccaccaaagggtttgaggacacgatcttacagagttggctttacagtttaaaagattcccctggccaccctatgaagagcacattggccatgggtcaagactgtagacaagaagaccatgtgggaagctgccacaaaggtctgggtgagaggtttggtgacttggtgatgcagagaagtggatggatctgagatgtaattcacagtgttagtgtcatgactttcaaactttcttgactgtgaactatagaaagaaatctatgttgtatcatgggcctagtacacaaatgcatgtgtgtatatgtatgtgaaacaaagccttcataaaacaatattacaggcaatacacactgatatagttcatgccaggtcatgaagtgccacatgtgtgtcatgtgtgtgttatgtgcttgaggtgggtggagagtgttaggggtcttcatgaactatgacaaggagtcaggatcttcatgctgcagggagtagaagagctccagagttttacagattttttctttgagagagagaaccttaatggcatagaaaaaagagccacctgatagcaatgctaagacagaaataatttctctaggtccttctactccatttcttcctcctcctcctcttcctcttcccatcttcctctctctcttctcctttctttcctcttcctttctcctcctcctcttcctctttctcctcatcttcttcctctttctccccctcctcttcctctttcttctcctcttccttcccctcctcctctcctcttcctctttgtctcctcctcctcttcttctttctcttcttttttatctcctctttctttcttctcctttctcttcctcttctttttccttcctctcctcttttcctcctcttccttctttcttcctcttcatcttctttctcttcctcctcccctcttc

SEQ ID NO: 84313 - DNA, 1053 bp, Homo sapiens
attaaaaataactttaccacctatgctgcaaatattttccccataatgtttttttaaaacctagattatgacactttttgatatatgaaaatttaaaatgtttaataaaagcttttatgtttttctgtaagcctagaccttgtctgtctctaaatcacaagtgtgtgtgtgcattttttttttacatttaattcttgaggtaaattggattcatgttggttaatgatataaggtaggcattttataatttccctttacttaaccagttgtcccaatcccactttattgaatctagaatctaaaataccattttattatatataaaattcttatacacacatcttatatagtacatgttatatatatattatgtatatatatgtttctgggctttttatgcaatttggttttttgtctatgcttacttactaccttattgtagctttattttttaataattggcagtagaagtcttgaattctttttttgtttgtttgtttcagaaatttctgggctattcctgtttgttatttacttaaaataaacttgtcaagtttaaaaaatccagatggggttttgattgaaattgctttaagttgaaaaaattaacatgtttatagtaatgaaacttcccatccacaaatatagaagtgtctctatttggtaaaacctctttttttttttttagtgtatcacagttaagttttgtggattgcttcatttaatcctgcacatttctcattaaatatatttctaagcattttctattttcgttgcctttataaatagactttttttctactatattttctcactggttattactgattgttgattagatctgtatttgggaactacacatctttctgaatatttaaattcattctaaagtatttcagttcattcacttgggctgtgaagatatatgactgtgtatgcaaataatattttagagattcttttgtatagatcacttctcatttttatttcctgccttattgcattggctagaagttctaaactgatattaaaaataatggttttgaatgtcag

SEQ ID NO: 84314 - DNA, 1028 bp, Homo sapiens
attcatccaccctttctacccatccacctatctatcctccatccatccatccatccattcatccattcattctccatccatcctccacctatctacccactcacccatttatatatccactcattcatcccaacccacctactctttcattcatccatctattcattcgttagtgtatccatctattcatccatccatccatccatccatccatccatccatgcatccatcctccatccatcctccacccttctacccactcaaccatttatatatccactcgttcatcccctaacccacccactgttttattcatccatccatccatttgtcagtccatccatccatcccatccatccattaattctgtcaagtgaatattctggaatgtgtttaatcaatccttgttgttggacattaggtagtgttaaagtgtttcctgttgatgttgatgcttctttagtgacatcttagtggttaagagtctgggctaggtaggcacactgcctgggtttgcattctgaccccacctcgtattgtgtgaccttggatgattcttgatctctgtatatctcagttttctcatctgtaaaagtagagattacattaggatctgtttcttattttttaaagggttaaaatacacaatccatttgaagcatagaactgtgcctagtaagtgcacatggttcccataacgtggtgatgttgaaaccttgcacattgttctggttatttccttaggctgttttctgaaagtggaattactaaccaaaacatgtaactctttcaaaggtttttcatgggcgttgccaaattgtccttcaggaatgttgtaaattagtccaacattaacagctcccccgtatgagaatgcccattttacctgaacatctgccaatgctgggcgattatttaatttttgccaattttgtgaaaattgccaattcatttttttcaatacttttattactggtgaatttaaatatcttttatttgtttactggtgaatttaaatatctgttgtt

SEQ ID NO: 84315 - DNA, 1084 bp, Homo sapiens
ggttacttaccatttacccttactcctagagtgcagccttttggggtcccagtgggattcccagtattcccaacttttgtcagctgactcttctggtttagaaaatgtcctccagtggctctgattctggattcatttcctggctttctgttttctcccagatcttggctgtctaatcgtttaatttcttctcttcctctattttacttttttaagaatgagacaaaatctttagtggttgtgtctaatcttttccctagtttttgatggcataataggattttgtatatttttctgtagatttaaaagtattgtatgtcttattttaaaaaattaaaacttagctttgacattgacaagaattagacatcaagtctaaattttacatttatctttgcttatcatgaattattttatggcacatctgccccatttttgaatttattgtttcagttcactttgtagtcagtggtataattctatttttttttgtgggcaggaaaaatatatgggtggtatactttctgggctttagcagatctgaaaatagaaaatgtatttttttcttttgtttttctacatacaatatttagcttggctggttgtgaagattttgttgcacattatttctttgaaaaccatggtgtggaggagaagtctgatgctaacatgatttaaaaaatgaataattccttctggttcttgtaagatttcttctttaccttttaaatacatagttttctgaagtatatatccaggtatagagttttcattaacataacttggtacctaatcttttaatctgcagtaaagtccttcaggattatatgattgattattactttattaactcatgttgcatggcttaatatattttagtttttctggagatactttttactatttctgtcattttgcctatcattttttttcatccttaattctcagacaattgttttaactcgtcttttaattaacacattcggttttctgcagtgaccattgctaactccatttattttgcaaagtagttttgttgtttttgtaaaacctgacactttctaatataaatgagcagaaaaat

SEQ ID NO: 84316 - DNA, 1053 bp, Homo sapiens
tgattgtatggatgattgccaagtcttggacatttgcctggatttttctcctgagctctggaactatctatctaacttcacttgggctctttaaactcaaaatatcaaaagttgaagttaggatcttccttctggattcctagcctcagtagcacccccatccacctgttcccaaggtagaagtgcagcctcctttgttttgcgcagatgccatgtgtgttctattgaatcagcatcctgcatatttcttgactccatcctttttccttaatactctcaccactttaattcaggagaaaactgccattgcttgggtctttctagtacctctcagctgatatttctgcatctagcccttcctacttccatttttctctggactatactcatgagtctttcaacaatgtccattttattatgtctctttcctgattaaatgcctttaagtgatatataagctttttgtggcttgactccttctcacctcctcctatttctctggttacagcatgtattcaatccagagaaatctgttttcagttccttgaatgttctgtgctctctcctttaatcatatccttccaaatgactgggacactgtccgttaccaatccttgtcacatttttgcttgtttaattcctactcacttcagatctcagcttatgtgttattcttggcaagcttcctcagcttatcaggagatttccaccctttctttgggctcctgtggaacccttttcttctcttgttatagcactcagctgaatatgtagtatcttattttctaaatctcccacttacattgtaagctttgtgagggcagtgattgtctgtcttgtttcatctgtagcacctagcacagtgcaagactcaaaaaccaatctgtttaatgaaataattaatttattcaatctttcatttatatgaaagttggaatcatctcagatatctctatagtctctttggtctgatgcttaaagccattttcagtctctcagttttccttaattcttgaatgtgtttcctatgtctttatggatcaaataatggga

SEQ ID NO: 84317 - DNA, 1755 bp, Homo sapiens
aacttgattgatggtctgtagggattgagggaaagacaagagttaaggtataatttccaggcttccattctagtccattaggtggatggtggagccaaggatgagcattggttggagggagtggagggagtggaaaggacagtgagtttggagtgtttgttgaacatccaggtacagacgtccacagcagcaagttgtgtgtgcctgaagctcaggagcactatttgacatggcgatagggattgggaataattagtatgtagattataattaaagccaaaaaacagtgtgtaaacatgaggaggggtcttgtgatggagaaagtggacattttagagatggaagaagagaaataaggtcagatgtacaaggggtagcaagagaggtagaaaaaaaagaggtgttgctggtatggaaggcaatggaatattgcattttaagaaggaggggatggttaataatgtcctttggagttaataaccagtgagtcattggtaaccttggggtgcatctattccatagagtgtgttggtgggtcagggatggcttgattgcagtgtgatgaggaatcgaggagtttgggtcttctggatttagagacatcttgtatgggcaactcttctaagagtcttgggcatgatagtaaaaagaaagtgaatgtgatatccagggtgaagtgggagaatggattagtcatctccacttttctagttctatacactctctgcccctttggatgacttggataacaaaagattgtggtgtagactttggatctacatgtttagaagaggtgattttccataagccctgctgacatataacagatgtgtttcatgtcttcagtaattttaattggagaaaaaagtagaacatacgtaatggagtcatacaaaaattttgttcattaagaatttgttgcagccgcatttagtgaggagggctaaggtggaaagaagatgatggtgctattgataagttatgtgatggtcagttttatgtgtgaatttggctggctccagtctccagttactcagtcaaaatctaggtgttgctgtgaaggtcttttgtagatttgattacagttcataatcagttgacttaataagggagattatcctaaataatcttcatggtcctgactcaatcagttgaaaggcctcaaaactagaactgaggcttccctgaagagctagaaattccagatgtggacagcagctttagcctgggcccaagtattcccacttgctcttcctgatgatctagcctatggattttggacttgactagccagccccacaactatgtaagataattccttgcactaaatctcttaatgtatatattctagtgattctgcttctctggttgaatcctgactgatgcagttagggttgttgtccacaactccatcatttggtaatagtgtatggctagacaaagcttttaatcttttgaacttctataaaatgagatctcttctatttttgaaaactcttcttctgtttcagtctattacttcttcaaataaatgccttgatttcagtagctcacatcatctcacacatgtatgcatgtgtaatgaggggcaagcgtagagctctgggtcttagactagaactggtaactctaagaactcaaccaggcctgggtgttctgtcacactggagtgctcaggatggcaggcatggtggtgctggaccttgaggagaggcctatcctgggcctgaaatttatccttgtctggagtcagcc

SEQ ID NO: 84318 - DNA, 1008 bp, Homo sapiens
tttcccatggctgattatttgcatagtcattactaaaagggctaaattgcattacgagaatataacgaatgtcaacatttttatagcctgtgtctacattacataacatatactgagaaatttaatttattgttcaaatttagctttaagaacaattaagaagtgctaagtgtacattagcatatatatttctgactgtaaagttgttatgtgggtaaaaagtagcatattgatttaagaaaaatattggaatatccagtgtatgttgactggccttgaaaggaaaaaaagaaaacagatttcattctaaattatgagacctgtttattactttcattaaatattatactaaagtgtacataaaatggcttctcgcaatctctactcaagaaaccacgtttttagtgggccaagagttcttacgtttgtaattgatatatttcacctgtgtgtctgctgacattatctttgagcctttatggtgaagtgtgatttggattgtagagattcttcatcttttctttggcatttcagacaattaagttgtaaagagtgaacctccataaagcagttgttaggaataggtgctgatttttaaagacaccagaaaacgaaaactttgtttatgtaatagcactcttcaatcatagtgaagaaataagaaatcaagctcaggttccaaaatcttggatcttgatagatagttctggtttgtttctcctgtagtggagttctcatcatcttctggtgcattgtagccatcacttataggaaggtgattttaaattttgggttatgtcttagagtcaggtatctgtctggatcgaaagtgaaatttcttagccagatgccctggtctatattcggctaaacataggggccatggagtggcagcctgtgagccaggtctaggctgcatacgcattttgacttggctcaatggtagataagaaaaacgatttgaacacttttagatggagcatatgatctctagcttgtccctgtccc

SEQ ID NO: 84319 - DNA, 1041 bp, Homo sapiens
ccttggaggggaaggaggaagccgggcggagccggggcgggggaggtagcggtcccggggaggtgtttctcgcccgacgagccgcctcgagtacagaaagtacaggtaaaagtcggcgccggacgtgctgggaatgcgggggggcgcgccgcggccggcgggggtgtggggcgggggttgcgcggcccggctgggccgggggcgcgggggaggaggggggcgggcgatcggagcggagcctggccggggcgaggcggggtcccggggggctgcgaagggggaggctgggtgggggttcggggggacaaccgccaaaccgctccccggggtccccgggccacctccctcaccccccacctgctgcccccgcaccagctcggacgccctccgggctcgggcgtgggggtggcccttgcgggtgtcgtgctccctgggggcgaaagggggcgctgcggagggccctgggtgggaggagaacgtggaagtctgaggtgttggggacataggacacagatgccagcccagcgcccagtactctcgtcaccctcagtggatacctggctccaggtcctaatgagtagtggccagcgttggatactctcatgtcttcccaaaagtggcgaaggaagacattagtctggcatctttcaaacaatggaggaacacccatggtctttggggagcaagggcttaggaacacaactgttactgctttgggttttccacaagtggacaacacaaggaacagccagccaccactccccagagggaatggcctcagaggtgttggccgccaagaccaggttcaggataaagaagttaagagaccagccatcttcaaccagagggccttctgggcctccgtgaaaccagccgcatgggttagcctggacctgcacttcccggaacataaattggttaacgccatctggttcttaaggctttggggctccattgagataagcacccagaaggggtagaattagccttttgcataagacattgtagggtgatccacccacgacagactgcagggggtga

SEQ ID NO: 84320 - DNA, 1037 bp, Homo sapiens
gtaattctgtttcagtcttcttttcccctaatgacaggaaactcttatgagctgtattcaatacacacttatttcttcagtatttgccaaaaagcatacatatctgcgtttttgtatggcaatatcattatggtattagatgactgatattcaaaaacagtaacattttgagtatttattgtttattccaaagtctgaacttgatttattagtaactcctaactttaaacaggatcgcttttctaagaaatgatacaaaagactgcatttatcagagtattaatgccattaaccactttgtttttgaagctcagtaacaggctatcagatgtttttctagacttctttttacacttacggggaaactattccctaattgcagctcttacattttactttgacaagtattataaacacagaggcagtaatcctagtaatagtcttgcaaattttcatttcaaggcgctgacaattgctagcaaacaccatcagattgtgaaaatggacctgagaagtcggtatctggactctcttaaggctattgtttttaaacagtataatcaggtgagccaatcagtgactctctttaaaggtaaatctttattttctctttgacacaggagttagaagctactgggaaaatctacctccgacaagaggagatcattttagatattaccgaaatgaagaaagcttgcaattagtgaacatgaaaggaaaataaaaattcctcacagtcatctttttataattgtattgtgttttataccactcattagtcactggagtctgtgttgtagatctcagcttccaaatcacctgatcacactagaatttgttttctctttagagaaacttcacattatcttttgaagctaaatatattattctatgaaacaacagagaagtagaattaactttttgtcccatcactcaagcaggttatacaggcactggaattaaagggaaaagcagtggttttttaaatcccaaagttcatttgttaaaataatttgaatgtaatgttcccctctaat

SEQ ID NO: 84321 - DNA, 1001 bp, Homo sapiens
ctatagtcccagctacctgggaggctgagttaggaggatctccaaagcccagggagactgaggctgcagtgagccatgatcatgccactcactccagcccgagcaacagactgagatattgtctaaaaaaaaaaaaaagacagtggcattcttacgaaaatccacgttgtcaagcacagaactataaaaacaatggattcagtgggtgaaggtaggagaaggggttcaagagattcagacttacagtaggaaagttatttttccaatctcagtaagttttttagggttatgaagattgagcactgacgacgctgaaataccacagtgcaaatgcttccgtagattccctgggctctgcactcaccagatccatttctatgataaagcacagagctcctcaaacagaacagtcgagttgcaggctcagcagcctccttgtcagtgtcctgctcaactcagccaactcagccaggatatggctttggatctttctgttggaaaaaaataaacatttgacatactttaatatactaaaaaaaaaattaatatctgtacttcaagatgtcaagattagtaaaatattcacttttttttccctagacctttgaaactcacaactctacgacacctctacaggaaagaagccttggactagatataaatagtacgtgtgtgttaatatgaaactgaattttggaaatgcatcattcccttatagatttctttcacttggtaaaacgtgtatagtaggatcctaatttaaaacttttattgttttcagaaaaattgaaaagtaaatatctgttgaaggaggaaagctaatctaccatagttctcctttagaatttactagaataacaataaacaacaaaacaataattacaaaaacaaaagttagctaatagttgttgagcatttcttgtgtgccaggcaccacactaagatgtttatatgtattctttccttaatcttcacagtagtcctgtgaataagcgccattc

SEQ ID NO: 84322 - DNA, 1527 bp, Homo sapiens
agcaccagcgggtgagtggtcagcttactctataagctagaaaaattaacaacatgcctccattccatccttataatctgctaattacttctgagctcacccatcaccctagtctgctagcccatcctgctctctcttgcatcttctgcttctgtacttaatagggaggaggggcatctatgatccaccctctaatctcagccatttttaaactgactcaaatccatcctcctgtgatgacttttaattttctttttcccttttttttttttttaatttcaggtattgcagatgctccactttctccactgctcacttgcatacccaacaagagaatgaattattttaaaattagagataaataagacgtgcgtggtttcttaagcacagctcctccttcttgatattgcacatgcacttcagttcatggctagctgtatagcttccgtctgtaaacttgtattttcaagaatccttggtattgaatttttagaaatgctcacataattgttgggactgattcattcctccacgatatgcctcctctctctgatatcctgctaactgtagccgttgtggcatttgagatgacaggacatatatatatatggccccacacttgaccttgagtgcctgaatgctctgaaatcaagcatatggcacagcgctcaagacttttgggtttgtgtccttttttctatggctgtctcttctcaattctggagaggtctggttccagtggctggtttccagggattgattcttaagctctggatcacagagagaagcaacaaggaactatactcaactcaaaactttttaggagaatcatgaaattggtctattcaaaggatggagttgagtccattctgttattgttgcaagaggttgcatatttggtgagtcagttatataaaatagtgttcttattgtaaatatgatacttctcataatctattttatcatgtgtataacattcaaactgacaaatatattgacttatgaataaaggtgtcaaaaaactggcacatcagttaattttgatcaaagtacttcagtgatcatcactaaataccctatctttttaaaaattttttcctttctaattttttatttctttatttatttattgagacagggtctcactgtgtcacccaagctggagtgcagtggcatgatcatggctcactgcagcctggacctcccaggctcaagtgatccttccacctcagcctcccgaatagctgggattacagacgcgctccatcctgcccagctaattttttttttgtttgttttttgttttttgagacaagtctccttctatcgcccaggctggagtgcaatggcacaatcttggctccctgcaacctctgcctcctgggttgaagagattctcctgcctcagcctctgagtagctgggactacaggcctgcaccaccatgcccagctaatttttgtatttttagtagagacagggtttctccatgttgcccaggctgatctcaaactcctgggctcaagca

SEQ ID NO: 84323 - DNA, 1122 bp, Homo sapiens
agttcacctgctataataggaccaactcccagagttgcgaaagaatggatttatcttgtctgggttgaacatgacctctgctatagatgggggaaatggcatttgtaagtgaggatagagtgtcatggtcgaagaaagttgtattttaaggttttctttttgctctgtcattgttttcagggacccacctagtaagaaaaggaaaatggaaaactgtgcacaaaaccagaagttatccaacaagaccattgaatcattgaacaaccaaccaatccctagaccagacactcaagaactagaagcttcagaaataaagctagaaccatcttttgaagactcttgtggctctaacactgacaagcagactcttacaacaccaccgagatatcctcagaagttgcttttaccaaagcccaaagtggctttggttaaactacccgtgatgcagttttctgtcatgcctgtctttgtgcctacagccgactcctcagcccagcctgtggtgttaggtgttgatcagggctctgccacaggggctgtgcacttaatgcccttgtcagtaggaaccctgatcctcggcctagattcagaggcttgctctcttaaggagagcctacctcttttcaaaattgctaatcctattgctggtgagccaataagtactggtgttcaagtgaactttggtaaaagtccatctaatcctttacaagaactagggaacacgtgtcaaaagaatagcatttcttcaatcaacgtgcagacagatctgtcttatgcctcacaaaactttataccttctgcacagtgggccactgctgattcctctgtgtcgtcttgttctcaaactgatttgtcgtttgattctcaagtgtctcttcccattagtgttcacactcagacatttttgcccagctctaaggtaacttcatctatagctgctcagactgatgcatttatggacacctgtttccagtcaggtggggtctccagagaaactcaaaccagtgggatagaaagtccaacggatgaccatgtacagatggaccaagctggaatgtgcggagacatttttgagagtgttcattcatcatataatgttgctacaggtaacattataagcaa

SEQ ID NO: 84324 - DNA, 1078 bp, Homo sapiens
acccaaactgaaggagtctccactgctaaaaatatacctgctctagaaagcaaagttcagttgaacagtacagaaacacagaccatgagttctgggtttgaaaccctggggagcttgttcttcaccagcaacgaaactcagacagcaatggatgactttcttctggctgatctggcctggaacacgatggagtctcagttcagctctgtagaaacccagacttctgcggaaccacacacagtctccaacttctaaaactaacggtggagtccatgtgtgaaatggcatctaccatttcctctggattaaaactacggactggggacaacagtattaattcgattgaatgtggctgatgatgcagttgcttagcttctttgtgtttctttgccttttgtacttgtaaacagaaatttgcgtataaatgtgagtgtattataaagtttgagatgttgatctaaattgtttttgtgttgcctacatttgccttttcacagctagtcttttcatgttaaaaaaaaaaatgtatttcatatctataaaacctatatagccatttagctgaagcccagcttaccaggttcaagggtacaaacttctcaaatcttcaaaacattttagtcaaagtgtaatatacttaaactgcacctaaaatatctttggcactgcttgttagaaattcctgattcctgttactaatcactaaagaaaccggatgctgccaccgtaggatttaagcagtagtgcttccatgctcttaagactcctgctgcctggaccttcgtcagctttgacacctcttttctgatttaaagacaccaaggaaaactacaactgtctttagctttgaagcagttttcatgtaatcattgccacctcttcgctacatgaactactattgataccagcatacaagtgtacagcactttacacacaagaggtttattgatgtaaaattatcggctagggaagcagcagcgggccaggtgtggtggcttacccctgtaatcccagcactttgggaggccaaagcaggacgatcacttgagcccaggagttcaacaccagcttgggcaac

SEQ ID NO: 84325 - DNA, 1156 bp, Homo sapiens
gctgaggtgagaggatcactcgaggagattggggctgccatgagccatggtcttggcactgtactccaacctgggtaacagggcaagaccctatctcaaaaaaaaaaaaagtcgccagcaacaagcacgtagtgtagtgttcctgctaaatgagcgtaggttatccaaaccttgggaacagggagttatggaaacatgcctatgacttcatcttggggtgtgtcctatgaagatcctttctggtctccacagtaggccagagttgggggctctggagctgtttccccaagtgcatccacaagctggatctgagttttgtcactctaaaattaaacaagaaaaaaagtgggaaaagggcatcccccattaggtttcaatactttgcacttctactaagcttgatagggcaggagtgcaatctacaattattttaaagtgaatttccttccattcaccattctttatcttttctttgaataagaaaaagtatctagcaaggatattacttgtgccttgaggctagcaattataggatagattcatctaaaatatggtattctgcattttggttttttttcttaagtgaataataccagtcttcaaagaaaacaaggtgaagacctattgcttcaataatcaagaatgctttgtgtgttttgaggtaggagcatgatcaagtatgctttggggattttctgtatttaggagatcctggattcttaattgttggctaagttccagtcaagtaggaatcagtgcagcctgtaagttctccacattgacacacacacacacacacacacacacacacgacatgctcctttctgtggcacatgcctgtattactgaaagctaaatcctcaaaacctagtaaggggactaatgattcattaaagtaaattgatggttttgctactaattcctatcccatacatttgacacaaaagaagtgttggtaatggataaataacatatcccgggcagatgagctcaacctagtaggtaagagtttggtttggtcacagttgcctatgagtgtgggtttcaaaagaaacataaagccttaacttagaatttcattatgttttagaatcatcactgccttaatattcaagcatctatttaagtcctaataaaggagaaatgcatgtttatg

SEQ ID NO: 84326 - DNA, 1726 bp, Homo sapiens
ggctggagtgcagtggtgcaatctcagctcactgcaacctccacgttctgggttcaagcaattctcctgcctcagcctcccgagtagctgggactgcaggcacgcaccaccacgcccagctaattttttgtatttttagtagagacggggttttaccatgtttgccaggctggtcttgaactcctggcctcaggtgatccacccacgtcggcctcccaaagtgctgggattacagatgtgagccactgcgtctagccatgaattttaatctagtttgtttagcaaggtgttagccagtaaaatgttttaaggccaagaagatgactacattgtttttcaatgtttaaatccaaaggattctctcagttgttggaacggtatttattagcagatacattgatattttagtttacatatccagagacgcaggctagaaaacaaacagggacggctctcaggttgtcggtgttcttgacgttcacaggggcactgcatttaaaaatcagcttgcttgaaaggagcaaggcccaagctatatgaatcagtaaaagcagcactggctatgccatagctggaacactatcaatattcagtttcttcaacaaactccagaaaaaacactaaatgttttactgccttactaataaataacaaaacaaaaactcataaatattagtaagacaattttatttattgctttactaattaataacaaaataaaaactttgttctaactccacgcattccaaaatagtatagtttgacctatcagagaccacagccatggcccctccactaacttttcatactttacttggaagcaagttactattacagaacattaggctgcaaaaaagaaacaacaaaaaatttaaacaagtcatactctttttaacatcagtgaaatagtccaatgtatctgaaaatgaaaataaattgttttgaaattatctccacggtgactttgttattttcaaaagtacatatattatattacctctgcatataacctctttttgggggccgggttggggagacctaaaagagcgagccgatgaccatggcaggtgtaaataagaccttgctccaaacgtggcgtcttcttactgcttctgcttgcagcgtttgactctctgctttctggtgatccgccgcttttccatgtcctgggtgaaatatttgcttttatgattacatctcaaccgtgttgctgcttaggactgaatgtgaaactgatccctctcctactttatcttctttttcctgtgctgtaacgagaaatttaatgacttcagaaaatgtagagcccatgctgcaatgaaaatgtggcagaagtcaatgcatctgaattatgacaaaaggatattcaaccatgaagactgccctcaataactttttccttggtagatgaaactagtctctaaaaaccaacaagcaaacaacaacaacaacaacaaaaaaaaacaacaaaaataaaaaacttttttctttttaaaacgtgagcccaccgaaattaagattttaattttgggaagtcaaccaaactttggcaaattatgctttaggaattatttactctatattgtcttatttcagctcatggaaataattttggttttgttatattttagagttaatactattaatgaattgcaagctggtatcaatttttctgcaccttttttggtaacgtgatatatatatatgtatatacatgttggccagg

SEQ ID NO: 84327 - DNA, 1007 bp, Homo sapiens
ttattttcatttgttatatacaagtattttaattcttaaggctaaaatttaaagttctatgaacaaataatgtatggtttttgtaaagaatacaagattgaggcgctcagaaatttattttacgttttggatgaatttgactttttaaaaagttaatgtggaatataaggttgtcttttggttgcaggttggctgatcaagatgacactgagtaacccttcagaactagatgaacttatgagtgaagaagcatatgagaaatacataaaatctattgaggagtgaaaatggaactcctaaataaactagtatgaaataacgcaagccagcagagttgtcttaaattagtggtggatagaagacttagaatagaaacttttagtattaccgatggggaaaaaaaaactactgttaacactgctaatgaaagaaaatgccctttaactttctaatgattatagataaatataatatgcgtctttttcacaatatcctatgatttttagactaggctctagtgttcagaattcatgaaattatccatggtaaaaactagttataaaaattacataattcaaagataacattgttattcttaagccttatataatattgtaacttgcatgtatccatacctggatttgggatgaaatacttaatgatctttccattggaaataactggaagtgaagaggttttgttgcttgtacagtgtcagatgaggaacaccactatcttaattttgcgatacactgcatttgctggtgctatttttatacagtgaagcaacagctttgcagcaaaataataaaatacttcttcgttaatcatgtttgttttgatgttaatatttcatttagtaactctgctagtatttgtgaaagtgctaactttaacttacggaaagttactttttaaaaggaaatttaagccagaacaatgcaaagctccaagaaaatgttttctttagtcacaaatctggtttttcttaagccaagatctgtcac

SEQ ID NO: 84328 - DNA, 1077 bp, Homo sapiens
agctgggattacaggcatgagccaccgcacccagccatttatttttattcttgacatggagtcttgctctgtcgccaaggctggagtatacaggtgcaatctcaactcactgcaacctctgcctcccagatttaagtgattctcctgcctcagcctcctgagtagctgggattgcaagtgcctgccaccacacccagctaatttttgtatttttattagagactgggtttcaccatgtcaaccaggctggtctcgaacttctgacctcatgtgataacacccactttgggcctttcaaagtgctgggattacaggcgtgaactaccacacctgactgagagtagtttttacatgtttaaaggattttaaggaaaactcaagaatgtagcccctccagtataaaatatatactaaatcttcattataggggattcagtgtttggcttattctgtttactggagggtttagttataacttcttagagatttttggttttgtcttgttttatttaggaagcgttgggagatgttgtttattgtagtctccctgaagttgggacaaaattgaacaaacaaggtgagtgttcttaggatcttagaatgatccatgccatgaattttgtttacattgaatagtaatttgtttgtaccctggattaattagagtgcttttttttttttggagacagtcttgctttgtcacccaggctggagtgcagtggcaccatctcggcccactgtaacctctgcctcctgggttaaagcgattcttgtgtctcaggcacgtgccaccacgcccagctaatttttgtattgtagagacagagtttccccatgttggcaaggctggtctcgaactcctgacctcgagtgatccgcccgccttggcctcccaaaatgctgagattacaagtgtgagccaccgtgcccagccaattagagtgcttttgacccaagtattaggttggtgtaaaagtaattgctactcagaggctgagacaggagaattgctggaacttgggaggcggaggttgcagtgagccgagatcccatcactgtactccagcctgggcaaca

SEQ ID NO: 84329 - DNA, 1050 bp, Homo sapiens
tctcttaggtcaactctgcctaaagaggcacctgattattactgttatttttttttttaggttaaatcatttcttatatgagccatctttatgctgcctccctaaacctcatcaccccaaatttgtcttcagaggcacagatttttttttctgcaagacagaccagtaatagttaagtatacatttgaaatatgctccaaaattttcttttgtgatttaggctaagtaatgttaaagcagataatccaatctccaaaagatgcacaaggtgttcagatgaagccatctttgcttaaatggtactgctgtttaaatgcgtcatctctatacatgatcttcattctttcctgagccatgcactatttaaaggtagtgtcaacaggtcaaacagaaattctgggaaagtcttttgaaagcaatggtaatgaaaagtgcttcttaagaagtaatgctactgcttttctgaaatgttggtcttctgttttagtgcgtaaattcacagagaaacacgaatgggtaacaacagaaaatggcattggaacagtgggaatcagcaattttgcacaggtattggattatattgaaatatttgtcccagtgtgctcttgcatgatttgctttatctctacctttttaaaagtgtttaggctgcgtgaggtggctcatgcctgtaatcccaacactttgggaggctgaggcaggaggattgcttgaggccaggagttcaagaccagcctggtcaacaaagtgagaccccgtctctaccaaaagttaaaaaaaaaaattagcctggcatggttgctcatgcctgtggtcccagctactcaggaggctaaggcaggagggtcgctggagcccaggaggttgaggctgcagtgaaccatgatcatgtcactgcaaaatacaaaaattagctggtcttggtggtgcacacctgtaatcccagctcgtcaggaggctgagacagaagaatcacttgaacctgggaggcagaagttgcagtaagccgagattgcaccactacactctagcctgggtgacagagtgaga

SEQ ID NO: 84330 - DNA, 1010 bp, Homo sapiens
ctcaaacggacttgaaataactgggaaacctgcccatgaatgtttcggccatttgtgctacttcagcacaattattgcaggggaaaaacaattttctttttttttttttttctttttattgagacggagcctcgctctgtcgcccaggctggagtgcagcggcgtgatctcggctcactgcaagcgccacctcccagattcaagcgattctcttgcctcagcctcccgagtagctgggttcactggcgcccgtcaccacctccagctgagttttgtatttttagtagagacagggtttcgccacgttaggctggtctcaaactcctgacctcaagtgatccacccgcctcagcctcccaaagtgctgagattacagtcgtgcgtcaccgcgccaggccaacaattttctttacgcccaaatgtttgatacactgactgctcctctgcttcgattgcgtagatcagtgatggctcttgtctcattagctcattgttttagaaacctgtttggagctggaatggttgataaatttattccaaaatttgtagcataaagatttacttatgctgtcttgctaatagtctgtccgctctgtttctgatagggatccctacatcactaatttgaatacaaaggtaaagcatttctcagataagaatttagtttcaagtctgtggttttcgttccttttttttttcttcttttttgagatggagtctcgctctgtcgcccaggctggcatccagtggcaggatcttggctcactgcaaccttcgcttcccgggttcaaacacttctcctgcctcagcctgtggagtagctggacgacaagagcacacctccatctcaaaaaaaaaagagaagaaaaattgactaatactaatataaaatattttatctgactagtgacattgaaaaaggaaaatgcaaaattttcataaattgctcacaactcctaattttccgaggccaaaaaccacctttttcaaggcccagttagaaagtaatt

SEQ ID NO: 84331 - DNA, 1023 bp, Homo sapiens
tgttctgtcacccaggctgaagtgctgtggcatgatctcagctcactgcaacatccgcctcccaggttcaagcgattcttctgcctcagcctcctgagtagctgggattacaggcatgcgccacaatgcccggctcatttttgtatttttagtagaaacagggtttcaccatgttggccaggctggtcttgaactcctggcgtcaagtgatccaaagtgctgggattacaggcataagccaccactcccggccagtactttctaatattaactgatcccctcatcacagaattgttattcccatttcatagatggggagagtgaggcatggaaggatagactcacttgtgaagggcgcctggatgagatgtcgcagagctgggatttggacccaggcaggagatcccatggtctgtgactttactcctctccgctgcctctataaagattggttccattgtcaccacagtggcgaggggctggtctaggaggcctttccatttcctgacttggactgggtgggagtcgtggatcctgcctgagcagggactgtgcctccctccccagcatacttgggcttcctgtggatgctactgctcgtggcctacgggcagagggaccccagcgcctaccacctcaacagacacctccagcacagcttcaccaggggcttttcaggtgtgctcggcttccgagagttcttcaagtgggccaacaccaccctcgtgagtaacctgtatggtcaccccccaggtaagtcctgaagccctggggctgtgtcagcctccttgtgccttctggctaggaacagacgtggggcactgtcagcatcagcctcataagaaaaccaggccaagtgtggtggcttacacctgtaatcctagtactttgggaggctgaggcgggaggattgcttgaggccaggaattcgagaccagcctggcaacatggcaagaccctgcctctttgaaaaatacaaaaattagctggatgtgatgcctcatgcctatagtccctgcaact

SEQ ID NO: 84332 - DNA, 1003 bp, Homo sapiens
gtattttattcttacactgttttctctcttgacggagaattgactcaaattctttccttcacttttaataaaagcatcaggcaaatagatacacctagacaacagccagtggcaatgaagtaccttttgagtaaaaccattagttcactggaaactgtacgggcaggaatagtagacaggaaatacagggaggaaagaaagttgtctaaataccctctgtatactgtcatacacattatatatttgatgttaaagatgtacaagggccttctactgtcaccagaatggactggcttccttctgctggtacatagctgtcattccaggatcattcttcaccattattgtgcatccctttcacttccttcctgtttggattgcatcttgttagtatccagaatcttccactttcttgatatattcctttgtttttttggggcacattttctaacaccatcccgagaaaggttgcatgggaagtaaattgttttgtgacttcatatagctgaaaatgtctttgttcccccctgccacttgattgatagtttggctggttataaaaatctaggtctgaaataattttctttcagaattttaaagtaatttcttctttattatttaactttcatttacaagtatgaagccattctgattcttgatcctttccatatagcctatttttctttctgaaagcttgtaagacttttttctttatttctcgtatcctgaattattatgatgatgtgctctggagtgggtctattttcatccgttactgagagtacttccttaatagtcttatcttttttggttggggggacattactttttttcaggtgttgaaccttctggactgatcttccagttttcttaacttatctctcattttcttttttaaaaaattatttaataaattttaaaaaaaatagaggtggggtgtcgctgtgttgcccagtctggtcttgaacacctgggctcaagcagtccttccaaagtgctgggg

SEQ ID NO: 84333 - DNA, 1057 bp, Homo sapiens
ggccctcactccttctggcctccatgagtttctgaaatcttccaggaatgccctcaccccagccttcacatttatcctgccctgtgcagatgccagcgtggcctgccccctcctcgcagcaccttctcagcgggcctccctcctgcctcttagctttcctgtccccgtcttcgtacgacgtctcaccatctcacggaccaggcatttaaagtttttcacataagctctttgatggcagagaattacatgtgttctggtcagtatttcattttcagcactagaatcgtgcttggcacgtagggtttactacataaatattcattgacaaacggacatgaaacacctagggcttctatgatcccaaatagccttggcctgaccctgtcctccacagccctttctgccatagtttatactagcctttcccacgtcaacttgaaaacactgccctttgttatgcaaaaataattgtattgaaccagaggtaacagttcattttcttgttgtgagctattatgggttaaaaagtgaggattttctgatgaactcaccatgtatttcttaagtttgttttgagaagtggctttggcctctctggctgttgtgctggaagagtgggctgttagggaagccagaaatctttaagaagcattaccggagaaatggttttgaacgtggtacttccatgctggaacactgggaaaaaagatttctctaatttttaaaaatagtttcaacttttattttagactcggggatacatgtgcaggtttgttatgtgtgtatattgcataatgctgaggtttgcagtaagattaatccagtctcccaggtaccaagcgtcgtacccaatagttagtgtttcagcccttgctcctctccctgtctccttgctctaggagtccccattgtctatttttgccatctttatgtttctctaatttttattaagtgtatgaatatcagctttcaatatgatcattggccttgtgtgttcagggatcgctaatgtaatttcaggcaagacataacttcggaattgtggagatagatggga

SEQ ID NO: 84334 - DNA, 1051 bp, Homo sapiens
acatgctgtttatgactcaatacatgtttcattctagcacagacaaaactcctatctgtagcgactggcagcatgtcggtggttacctggcagtggaacgtggggtcgagattggcacagtgcctgatactgctgatgactcaccaagcttgctgtgtcagtcttcctagatgttgttgtcatccttttgatttccttaattttgtgcatgggctttgttttcaggtggatctatcttaacgaccagaatttatgcatccccgccagttcctcttttgtttatggagctgtacctataggagccagtatttatgttattggagatcttgatacaggtaagagtgttacagtgattttcttggaactgtttcctggtgattctgggtacattttctcacccttgcttatttctgtggcttaggtaccaattacgactacgtgcgtgagtttaaaagaagcacaggaacctggcaccacactaaaccactccttccatccgaccttcgccgtacaggatgtgcagccttacgcattgcgaattgcaagcttttccgcctgcagcttcagcaaggcttattccgtattcgtgttcattccccttgaggaggaagcagagcagagtgcgagatcctgacccaagagcaccataacatagctccgaaagggagagcagagatggcagctgaaactcactctgtgctgggctttggtatggtaactctttggtggttttatgatgcttacaaacttgagctttagctcttgtttgggagaacacgtaactgttgaaaaactacctgggaggagtgagttcctccagttaaatgtggctgtagatgttggaggctagggaggctagtaaatatcaaaaggaaaagggagtgggaattgctatcatgtaaaatatcaaagttaaaatactaaggtgcattttccctgaagggaactcatgtctgactgctgtattcaaatacgtagctttggtaacaaacaaaatccgtatatgcaaatcaacatatccaaacatgccaagactgcttttccactgcac

SEQ ID NO: 84335 - DNA, 1046 bp, Homo sapiens
gataaaattgctcttttgtaactttatcttagtaatgtaaagattcagtaaattgatgagtcaggttgcagccctcatgtgaactgaaagaagttgctcgcttctgtgttgacttagatcaagacacgtcacgcatcctttctggggtagtacctgtggagccgggaagggtctcctgcagtgccattctgccttctcaatgagcaaaaccattttctaagtatgaggatattagtgagtaggagattttataaaagaaagacctgagtcagacaaataataaaggtctgctgtggctaaaaaagcaaaaacaaaaaagctatccagacaaaatacatagggatcagaaactttttcatataacctgtctgaaagcacacaaagtcttgtttactactgtttagggtttgaaaacttgtcttagaatgcgaatctgtgttaagaatctagtctttgtaatagaagtttcccagtggcattcactagtgagagttttagacaaattatgttacgagtaaagtttggctggtagaataaactacctcaacttaatttcattctgttcatagtagagcaaattaatcttttcctccttccctcctttcctatctctcattctcacctcaacccactttaccccacttctcattgggggaaaaatgtctttcgttcgtggaacgtatcttgtaagatattttgttttccacttgaattacaccaccctagtgtgaaatcggggacttcaaagtgcttgattccttcctaaattgaattttatgcaatgtcaaatttctaatcaatttaatatacagtacttcatttttaattgttttctaaaaaaaaggttttttttttccttttggaatatggctgtaagaagcagcattttgtcttattaacacatgtataaaggtatcctttggttttaagtcgagaacaggaatttcttctagaaacttcctgtatggaacgtttatatgcaattaacatgcatatgaaaaacatcacttacgttctcccacccatagacataaaaaagggtgacc

SEQ ID NO: 84336 - DNA, 1075 bp, Homo sapiens
tgtttggttcctcggtcttgtaccccttcagttcgccggcgacgtaatggtgataccctttgttttttgtatcataccttttgtgaattgtgacaaccatcccgtaatcattgtggcctcagcagaagttttgaacaatctttgcagccactgttggggtgtgtaccagcagcctggaagtgaccagcagagctgacaaaagcaccccctgctctgcccacctccgcagagtcctgtcctcatcagaaacggtatcgcggatgctcctcaggtaggcgtaggcagacttcattgtgtgttagcagtgacagtgatgtctgtacctatctgtgagtgagacccattcatgacacactagaaatgtgtacattcttttgttttccatcacgggtataggtcttctgccatgaaagagaactatcaaggaaattcctgaaaacaagatttgtaaattcgatttgaccctcccaaattcagggctgctctttgcagtggtccctggcccagcaggtggccggcgtggctcctgttggctcatgccagtgttgtgctggaccctcgagtatgtgactgtcacccttgtccaagactggtttttaacagtcttgatttgtcattttgatgctttgaatactataaggaaaatgccacgaataccatataaataccacaccaatctgttgaacatatctgtgttttctgacatgggacctgcagaatagtatttcttttaaatcctgcaactttattatctagtagaattccaagtaggtctgcttagacacatattcagtgaagattgtattgtgtgtgatattatcctatctttaataaagtcctactactgaaaaacagggatttgcaatgaaaatcatagctaaataggcaggtttagaaagttcaaaatattggaagtgctagaaggctgcaacttgtaaaattgtactccccaagttcagtaggatagtagagaagtcgtgctaagttgatttcattgaaatgtcacgtctcacatcctgtggtccaaaggtactagtttgttttgtggaataattttctgttcacttgctgataa

SEQ ID NO: 84337 - DNA, 4033 bp, Homo sapiens
tggtgaccgcggtgccccctgcctggattctggagaccccagatctggcttcagaattttcacctggctcagggggactttattgggctttttttttttttttcctcttacactccacaaaatgaagggttgttggtggtggggtaggaaaatggttagaaggaacagtgacctgccatgggaaggccaggaggagccccttctccctctgggagaagccaggagtgagtgtcccgctgctaccgtcctgtttccggaaagccagctctcgaggctaatgcctccccacttacctccgattgctcaggaggtatatctgagagaaagagggaaggaagaaagacctgaatagccagaggcccctcgctcaccttggccagcccaggtaggtggcaccatcggtagtgtgggcctttccggaaagcacctgtctagtactggggactgaggcttatccatggagcaagattctcttggcagagccatgctctggtgttaggaaatgtggcaagaggaactataaggaagtgtttgatggactggcataatcccctttccgctgcctttcgtcaccaagcactacaggcagggggtgtccttaagtcttacccttgccctctggtgggctccagggggccttgcctcagggcctgtgagcctggaggtggggctgtgagggctggcctggctggagcgctggcctcccgggtagaggtgaggttgggactgccaccagggctctcgtcccatcatgagacacctggttggtgtccaggctctcggggaagcagcggagcccctgtggggtttccctgaggcctggacattatgtaatctgtctgcgttttatagtgcggcccaagcactctattgagaaatatgagcccaaataaaacaaaggtgaatttgagtgcagttccctagaacaaaaaccctttgcagtcctgtggcttcgcagcagccgctggcccagccctgagctcccgatattccaagtatgtttcctatagagtcatatccttacttgaaatatcagtcatccatattttaagccatctacacagcccaactcagaatcatctggtaattatctggttaattgtatgggcttcaggaacaagacccagagtgattgatagggattcaaaccaataaacaagccaaatactcttttttgcccaaaccttttgcagtctgtttccattgatccaattaaccgaatctgagagatttaagaccgtgcttccaggagcacatctgcatcaggctgggatgcaggcagactcgggctcccagtcccacctgctgggtgacaccggctaggtacaccttttagtctggggtccaagggacctgatagccctccaggctgtcttaccggtggagccagcagcctcacccgcctggcctgcctgtaaactttgcctcctgtgggatcaggtcgcagcttgccctgccctggtctcctgggccagttactgattaaatccttgcagagccaacagcgtgcctaatgtggcttgtgacggccgccaggtctgatgcaccctgtgcttggagactttggatccgaaatgctcgtaaacaaaggaggaagcagataggcgacagctgacttgggaggggagatagggaggccagggccccctcccttggggacccaggactgcacctttgtggggaagggcctgtctgcccaggctgtggcctgaatgtggtgccccattccctctttgtacccaaacttcccagttcctgggcctcactggctcttcatggctggtgatggtcgtgttggttgtaaatgacagccagggcagccaggggttctgcataagcggccgggttcggcaggaccagaatccattttgctgctctcgtctgtgggttgaatttgatcacctgctaggcatgtttgtccgtgggcagagggctttgtctgtaggctttgtttcttctgcaccacagaagtacaaataagctgcctaccttttatttcatcttacttttaagagaatgtggcacacggtatttcagaatggtggatccactcagaaagtcctttattcaggggtcggggcacaggtgacagtagtgttctttattctcaagccataattcatcagtggcttgtttttaaattttcaccactctgctgtttgattgcaatgtttctgggcatcttgatatggatgggaaaggagaagccaccttcattctcattggtttctttagtctggtgttttctgaacttggactttgtttagcacaggcttactgcatgcctactgtgtgtcacttgctgagctaagagttacacatccacatggcttggtttctacctaagaattaaaatctatgtcctccagggtagtcacagatcccacgagaactcatctgtgcccacatgcacgcatgttaattgctttttcacttttgttacataccccccttccccccatgtgcctagcctgcctttaatttatttgatgtttttttgtggcagtaaacacacagatttccccccccccctttccatgccatttgtcataggaggattttggagtgtatcaaaattgtttcctagacaacttgtctgattggaggtggtggaggggaggggctgagacagagaggagaaaaagtcaaaattctctgtaaattgcaaacgtggtctgcctttcccaggctgtaataagtaagtgcattttaaggaaggagtaagttttgatgctcgcatttgcctggtgcaatctgagatgcctgttccggccacggcaacatcatgccagtccaggtggaaggaatttcactgcatgtggctgagctttcctgcaagtgggtgacagaggtggcagttgctgctggcttgggctgcttggcccacagattgactgatgtggcggccctgcctgctccttagtgtctcatcgggcagtgagagggcatttctggggcactgtcctgggcagggctcagggggacctggtagaaggcaaagctgtcccagggtacctcaactgctgccagccaggactgactcgtcttgaaggtacccaattggtgttttgttggcatggacattgcagggggtcagcttacacctttgattaaaggaatacatgagattaggtgaggcagcctgatatggggcatctcctctgtgggggagaacagatttgggttttgcgttctcatggcgctggatctggatttgaagggtgcagtttcctggctgtgtgacttttggtgctttgctttcccttgctgggccttgtttttcctccatccttagggagagcacctcatgtctagggttgctgtaaggattggagaggatagataagcacctactagtatagtcagcatacagtgaccaggattccaattcctgttttgctaattgccctgaaagagcttcatgactttctgcacaaatggaagggattattgttacctaaaaatgggtggcctccagagagttccctgagatgaatagtgcattggggaaagctaggggtgtttagcaggtctcataggtaggaaggcaatgaaattcttgccagcagtttaagaaaaattccttgcggggcgtagtctagtttcttaaaataaattacaaaaattgaaatactcatgtatgcatcaggtagatttgattagtataacaaggtgtttaatgaaaaatgaagcttcccttactcgacgtccacacagcccctagtggccctccttggaggcaagcactgctgctcatttcttgtgtatctggacatgcatgcacacagctgtctaccgtggttcttcactggacagtatattttggagaccctccatgcgtgtgcagctgccttgttctttttcattgctgcatagtgttctgttgtagaagtgtatcacagtaatgtaggtagaccctcccctgttgatgggcattgaggttagtcccagcctctttgatatggtttggatgtgttcccacttaaatctcatcttgagttgtagctcccataattcccttgtgttgtgggag

SEQ ID NO: 84338 - DNA, 2537 bp, Homo sapiens
ggactaatacactcttgttccttgaaagaaaacattttctatttttactgaatggagttgtctctattttgatgttcttttgcttaattctttgggatgggggagctgagcctccttttgaagagggaagggcagtgtttcctggggttattgctacctggagtcatgctttgttctggctgaaaggtcaccaaccagggatccccctcagagggtctggccacttggtcttccctgcagctgaaggaacataggtgaccagggggctctgacaaggatgcgctgacttccacccacagaacaagggtctgtgcagctccacctgagggcattgctttttgttccctgacttcctgctttccccaggatggaagccaggccacccagccccatggtggaggaagagaggaagtgagagtttctcttccttgctcctggctctggtgatgaaccacccagtgtattcaacaggcaccgagggagactgtgcgcattttgaaaggaagcttcgcttacatcagcagagccctaaccgaagggtgatgagacgtgcgtgtgggggaggtgtttgctgtgtgtattgaggcaaaggagatggcagagaaaatatttctggtgctgaaattggttcctgacttcagtagccatttcgttacccctcccatgtgcacagcgctcgtcctggcatttggggtgtgcagtgaggccacaggaagagaacacggcagacccagtggagtaggggagtgaggacctggactttgaaatcagacaggggagcttgaatcctgcctctgcagtgtcccaggtggtgaccttgggcaggtcccctagcctgtgtccttatctgtaaagcgaggatcagagaaacttcctcttagcattgatgtcagggtaaatgaggtgaggcctggcggtgctttcatgcctccattcagcagttaagtgtcaccgttctaggcactcggaagaaaacaggagcctgccctcgtggagcctgtgttggtgggagtggacaaacaactaagttaagagcaagtaattataaaatccgatgacagggatcgtggagaaaagcaagcagggtggggcgagtggtgggctgctttgtacatagtggtcagggaagcgggtgataggacttccagggggaagagcgttccaggtagagggaacagcaattgcaaaggccctgagggaggagatcatctgtggaaatcacccagtaaagtggcttgcacctggtacatgttctatgattgtcagtttccttcctcctgctctgtggagctgttattatctgtttaaaaaattaatgagtatgtagaatgtgcgaggtgatggacacacaggcagctccttgccccgtaaagcttccattcttttgcttctgttgtgtgttttttcttttgttttttttttgttttgtttttttttttttttttttgcaaacctggctgcctcccaataaatagtgaagaatagccctggtagcagtgccttaagagattcttaaatgacaaagcccagcagaactttgaaaacgcaactccctttgtccataactacactctaaggatcctaggatctagaacacactagtgctctgattcacctctggttttgccagcgaggaaggggtgaggggaagtgtgtcggcaaagacccttgcagctggctcagcagcccacctgggattcaaacccagactcctgccttcccatggcatcctttgttcgtggctctactgctttcaagctactgtcagaaatggtagggtggacggagcgactaaactgattgtgctgggcgaactctttttggagggaagcacgtggtctggatcgtctggtccctggtggatataggatttgagtgtatggaatcaaacagccatctgggtgcttcccttgggctgggctggctgcatccagctcaggtggggtcatatggagaaggaagatcacaccgggactgctgctagcttctctgggtgtcctgggccagtgccagtttccttagaggtccaggatatctgaaaattggagcacacagtctgagcagacccaggcctggctctcctccctcgcatgttggctccctgtgtggactaggtgaccctgtttaccaacacacacaccggtgcgaggctctgcagggaaggagagccacgggtatggaaggggctgtgtgttccccaggcaggctagctgccgtaacacgcagccctggcatctgggtggcttcatgcagcccagttcttgcagtcctgcaggggtctcccgagggttctgccccctctttttcttgtgaaatgggtctgccctcccctaggtccttcattgtcagggggatggggaaagagtgagcaccacagccaagccgtttgtagatctggccgcttggttggctagaactcagacacacggccacacggagtgcaggggaagacttgggaacatggtttacatgtgcgtctgggaggaagaggagagcatggaagcgatgactactcccaccccagcatccttgggatg

SEQ ID NO: 84339 - DNA, 1264 bp, Homo sapiens
ttaggtagaaataagtgagcttttcagtttagtgtttgccaaggttggcggacattcctttgtgattttgtcaaaaaagttaagggaaccgatgtgggaaattgaatgccagctattcgtaaagggtaagcattaggtgtataacttgaacaccatatattatttgtgcaaattgagtgttctggggcactgttcttgcatagtgagtgctctcaggcatggcacttggaaagtcagacatactcttccctcccaagggactcatagttaaatgggggtattacaattatgatacaccattgaacaaagcacattgcttagagaggtttatgtcttgtcctgtgtttggacggaggaagagacgccatcatgggggtggggagtttcaggaaggacttctttgtaggagacaggcatctggatggagaggtaggatggagactgatggagatgagggtggcaggtcggaggtgggaatgagcagagggaacagtgagcaaagggacaggccagagcggctgggcacattccgggagtctgtgcagtttttatggggtggacaccgtaagacggcataggaattaaagatagaggtgggtttgcctcctagagcagagtctaccagtgtggggtgattaatgctgggtaaacccatgcaccctggggcgggtggtgctttacgatgcagagagactaaggactggccggccagccgggagcccgggatgtcacagattggaaggcttaggagtgcagggatctccgagtcgccaggaccaggcagttagtcacagtagtgaccgtgcagcggccactcgtgtgattagtgtgtttcctcttgccaggggctatgctatgcaggttttatcagtgatccgtacaacccagttagatactgttactctctccattttaccgatggggacactgaggcactgcccctcaacagacatagtttggatgaatgaacagcttgcctagttgggaggtccgtcctgttggaaggggagagggacccacggagagggaggcgcaagcccagatctctacccctccacttccttgtaaccccacgggcctctggccctctgcgtaagtgcgagttctaccactcccctgctgcagggctctgtccgtactgaaagcaggggattgcgtacatggtgtctccaacacatggcccagctgtggtgcacacagcctttctcggtgtgcacacaggccctaggattccgagcccacccctgtggcctgtgaagagtgg

SEQ ID NO: 84340 - DNA, 1024 bp, Homo sapiens
ggagtggcactctgcctcttgtctgcagtgggggaagtgcagtggggtctcagctggcaggttacaggggcaggtctgcccattggaaaggggaatgatgacttgttgacatctgtttgtcgccctggttggttcatgtttcacgaccctgtgactgaggcttgcttcagggtaggaaaatggaagagctcgaactgtcccagcaggctggtggcaactgagctcggggagtcccagcagggccagacagagcccagagccagatgatagtcatgtccaaggtgagtggaggggaccgcggggtaatcatgaccatttcctccagtcattctcagacctttaggcgtgtgcgcatttcgtcctctcatcagccccgtgaggcgttagcaggggaaatggagacctcaagagttcaaggttacacagctggaacccaggcagcctaactccagagccagtggcctccagatgtcacgacgagtccctggtggggtgtgagcacaggaaccctggcagcaagggccgaatcaccagcaaggcaacagtaaggatagtgagcacttacccagaacctgttttatgccagacactactagagccctttgtgcagatgtacattcatctaatcctcacgatgcccctgcgaggtggtgctgtcattgtcccccttatacagatgagcaaactgaggcccggagaggagaggtccctacttacccagcttgtaattgtggagcgaggatttgaccccaggctgtctggctccagagtatcactgcctgtggctggtaagcagagttttggggctgcaaagcagaatgtcagaaaggcccacagtggccaggctggctgtgagctgagaggagggccttgtggaagggagagcgtgtggacagagcagaagggtctaccctgactgcactggggccccttccgggagcttcctgggccagcttcctgcagacccatctccggaggagccgtggcagaggatcgcttctcacctgccctcgttgaacctggg

SEQ ID NO: 84341 - DNA, 2290 bp, Homo sapiens
ctgcaggactgtgagcttgaaggcagggtttgggtccgtttttccaggaatacccgatgtcaataaaggcctttgtctgttgcatggtgggggaccttggcatccaggctgtgaagggacaggaaagtctcacagttttcttggaaaccttctggtgaccttggagtcaagggaagctcttcttgggtgtgcccgtggccctgtgctgtgaccctgcgctgtgaccccgtgccgtgaccctgctccgtgacctcgctccgtgacctcaggcaccattatttggaatgggctctcagcccctgtcctaaccccagccaccaagctcccaacccaagcaagatggaaacccgccgttgggaggattaagatattattggtggttttcacctcagctttcagcagcagtgcttgggaaataagattttgatctcggaaaatatgatttaaaaacagaattgaaagtcgcttttattttctaaacgatattgcccctgacgcatgcactgcctctgactggtggcctccggtctgagcacacccgtggggtaaactgcgtagcaattccaggggtgtgctctctggattttatagacttccaccccaagcaggccctgcctttgatcccccactcgggtctgcagtgacagagcacctgctttagaccaagcccaggaggctgctgcttctttggggaattgtcttagcctttcccactcttaggaggtggccttgtcagatgccagctgaaggggtcttcttcctccgagccctgctgggctcacctttgaatgccacaaaccaaacccatggaccaaggggactttggccacatcccagtgtcccctccagtggggaagggaagttcctttccttcctgttgtgtgagggctaggggcactgagtccccacaaggcctcaccatggaggctctgagaggtgaggtttggctcccctggccaccccagagtcaacacagggcctgtgtgtttttctttgcctctgggcccatgttctattctttccagcctttgccttggaaaccccaccctccattcttttctgctcccctgccttctgggtgggtctggccagtggagagcctgggggagatggaggatgggaggagggtgagtgggctatttattccctcctcccttttccttcgggttgccagcggttgccatgggtgggtggcgtccctcagccactcctgcagtcatgtcactccctctacccaggtttttctgtaactgctccttcccctgcagtgtcaggcccagggatagaaatacatgggggagaaatgaagtgactgctgtcctggtttgcccaggactgtcccaggtttttgcagtgaaagtcctgtggcccaggaagcccctcagtcctgggcacacttggacggctggtcaccctaggtagaaaaaccatcttttgtgcttcccctgtacgctgcccatgccttaatatattgtccttttgtgaaaatttcctctgccatctgtttcctcccaggaccctggctgatgcaccaggagcttgaggagatggagtggtgttcagagcctcttccctttagagttcagagcaaccaaatgggcatcatgctgaacgtgggagaaacaaaagaatctcttgcacttggactcttttctgaaaatttgccccctgcaaagcaaaatggtggtggtgatgatgacggtgatgatggtagtggccatttctttgcctacccactgtggccttgttgtgaagaactttgatgccctgttgtatgtgatcgttatgacaatcctgtgaagtttttcaatgatgaaggaaactgaggcttagagagttggagtaatctgtgaaggctcaggatgggcaagaggtcccgcccaggtttgagcccagatgcgaggttaccacgcttcctggtgaggtgttttacaactaaggccaagccaggcaaaacccattgttctgcagcttctggcttggattgggtgtcttgttgagtatgtgggcagtggatctgatgttttccacttcctcccatgtggcagggctgtgtgcatggagcatgaggggctggctgggcagacagccttgatttgactgaattcagccatggcccatgttggaaaatgttagcctatttttccttctccatttgccccttccccctttttttgtttttataattagaatcagagccagccatagttggaagagaacttgaagttcatctagttctgggatggcaaataagtgacacatgtgctgccactcctcattgccttgaccg

SEQ ID NO: 84342 - DNA, 1364 bp, Homo sapiens
gggtgagaacgaagtgagaagtgagcagatatgccccaggcctctcgcaggggcctgcgcgtgccgtgccctctgtgctttcagagtgttctctcattcagcagttaggcatcgtgcctgaagcatgcccttatggggcacctcctgggtaccaggcattgtgctaagggttgggagtgtggagacaacagcatgggagaagagagttatggacaatcggttccagtgcccgcaaacgagggtgactcagggtgggcactcgtgggaagcagcagggtccctggagagaaggctgctgatccaagaatgggtccgctcaggccaggaggagaaagcagggaggagctttctgggcagaacacagcattgggaaagtccgaggggcctggtgaggcctggcacacgctccataggcctcaggtgtattgagtgggctgggggctggtggaattgtggagggcggacgcagtgagctgcctgcatgctggccttgggactttggacttcaacatggaagccgaattacaggaaggccccatgaacgtcttgttctttcctactccgctttgagaggacctaattctttgccccgatttggatcaaccttaggcccaagaacctggcaatggctgagctgatcaggagtgtggggcccagttcgttgccaacagggaaatgtcctctgtccctcaacctttgacgttggtggggaaacccaaaggggctggcagcccttggggtcattctggactagaagcatctagacccaagataatgcaaagaattgtcacgtataggaaaactgggatcagcccaggccagtaatcaaaacagcatgttggaagttctaccttgggctctgccacttgcctgctgtgtgaccttggtcaagtaacttcacctctctgagcttttgtttttcatcagtacaatggggcagatagcggtaccaactccatgggcttctgtgaaggattcagtgagataatgcacatctggtgttagccttgtgtctgacacagagaaagtatacaggaaaaacagagggctcttattactgccgttaccactgtcattgctactgttaccaagattacagaggaggggacctgactacacccaaggtctgaggggccagagagggcttcccagggcaggtgacgtcaggctttggagtcagaccttcttaagttcaggctttgcctgaactgtggattcacagttcttcagagaactcactatgtgtgacattgggcaagttagttattgaaattaagttgagcatgttatttacattctgattacgttagttaaactctacctggaaaatgggataataacacccgacagccaggctgccgtgg

SEQ ID NO: 84343 - DNA, 1125 bp, Homo sapiens
ggtgcttttcatgtcctgggagtagtggcgtttgcacagaggccgggtcacagagacagatgtttcagaagtttgacctcaaaacagctttcttttcccttgggttgtctggagaaagtgctaaaaataaggctggatctgagcaggcgctgctgacaggccacctggaggttcgagtccaccacgaaggtggagtcttggggttatactggctggagccataggaaattgagatttaaaaaagctattaaaaagattataaatgagatcttgctgtgtttcccaggctggtcttgagctcttgagctcaagggatcctcccaccttggtctcccatactgctgggattacgagcatgagccactgtgcccagccaaaattgggattttgtaagtagaaaatgattaaatattggttccatatagtttgtaagtaaacacaattcttgacttcctcatgtgatctcttcgctgtagccctgaaactcctgagatcagtacaaaaagaaatcctttcttgggaaagaaaagggagtgttatgattggtgtacatacacataggcacacacatatgcatacacacatgcacacaggcacaaacgtgcatacacacatgcacacaggcacacatgtgcgcacaaacatgtgcatacacacatgcacacaggcacaatgcgtgcatacaaatatacccacatgcacacacacgtacacataaatgcatgtagacatacttgtgcatatacacatatacatgcatacatatgtacatatacacgtatacacataggcacaatacatgcatataaatatactcacatgcgcacacacatacatgtacacatacatgcacacatagaaatacatatacacataccatatatacttgcttgtacacacaggcacaatatatgcatataaatgtacccacacgcacacatatgcacacataaatatgtataggtgcacacatatgtatacatgtatgtgtatacatgtgcatatgcatatacacgtacaaatgcatacacacatacatgtacatgcacatacatttgtacatgcatatgtacacatacacatgtatgcagacatgcacacagatacataggcatacatatacac

SEQ ID NO: 84344 - DNA, 2009 bp, Homo sapiens
tgctgcactggtggccaccgcctgcaagtgcttatgtcggcctctgtctctgcaggacgacgtgaacaggctgcggctgtcactgacgtgtcttccttcgtgtttgccgtggggggcatataattgcattcctcatgagggaatgacacagaaagggcagggggtgtcagcaggggccgctctgtaatttccatgtctgggacggatttcaggactgagctgttttcctctttgacccggcagaggctgttgcccaagtcaacagtggtgcgtttttgaatttgtctttgttggttttctttttccctttcttcttctttttaaaataggtctttttttttttttttccatcctatgaaataaaactggagacttggttgtagtgggtaagaattagcagttcctgtccttttggtgtgggagttgggcgggggttgacttaaatatttatttcccattaagggattcatgggcttggacgcttgtgttggaatggggtgatctcaaatctcactcatgattttcgacccctgtaggacttgggcctgcctttgggggacgcggggacgcagggacgcattgagcagaagctgcaagcggatgacccatgggccaagtcaagtctgctgacgtgttttacttggcccacacagtggttttttttttttttttttttcttaaagcttcagtaagttgtctgcctttaaagttgggagcattcccctaaaaagttccggatatccattttctaataataacaacagaagcaaacatttctatgtgacttaccacaggcctggctcagctctagacgactcccatccctttgctcctgggatccccagacagttccgaggtggtgcttcctgtgatcatccccattctacagctaaagaagcagaggcaggcctttaaccgggcactcctggctgtgcccatgttcctgtgtggccaccccttcaggctgggcacggcctctccactcccccagcctcctagcccactgtactcaggttcccccctgctcagagcttgtgggcgtggactttgtaccccccgggcttggagagggcaaggtgactgtgggagtccagctgctgctccttaagttgagttgtctgtcactgacttaccctccctccctctctccctactgtctccattcttctctttcccccttctttctcctgcaccctctttttccattcctcccttcccccttcctttctccgctctctctttccttcactcccttcctcccattcatctggtgcttaccgggggccaccaggtaggcacgtcgcacactacttctgcttcatgtgaggggttcatggtggcttctccctaccttcagaccacacctctggtgggaggtgctgcgtgaggatcccaggggtgaactgagtcaggtcagaggagcagggagccccagcccctggtgtcttcttactgtgtggtctcttccgtgtcaccgcacttctgtggaaggggaatgatgggggaagtggaggaaccactgtccgcctgcggaggggcctcagtgttggccgtgctcatggcgccctcctcctggggctccctctcctctggtcctgcctctcctgcacgcccttcctgcctccttggtgccaggggagccagcccaggacagtctctgtgcctaggccctgccagcctggctgccctgcctccagccatggggggcgggcggggagggagtcgaccagtgcttgtctttgcagaactgctggtggactgaatgtggttctgggggtggccaggcctgagggtaactcattttggaaggtttgggatgtcacttcacttaaggagccttcagcaacatggagtttaagtggccctcttcaccgtggccttgtggcttcatgaatggagctgctgtggtcagcatggctggccctctggagaggagggtgggccatgaggagaagatgctgtgtctggaggccttaaccctttcctcccttctctccctccctccctcc

SEQ ID NO: 84345 - DNA, 1146 bp, Homo sapiens
acgggaagccaaaaccgcctgtgaaggaggcctggtgcagctcagaaagccctggctctggccgaggtttgggatgtgtggctgccatggcaacccgtctccccgacgaagggtagacgggttgggcgccgaacgcagggtgttgcaggttgggctccattttgactctggtggagaacgatcacctggctgcaaaaccaacctccccgcccagtacaagcatctcctcttcccccttgggccacgagggtgggggacttgaggcaggagtgggtttttgtagtggggtcattgggtaatcatctccggctctctgctgcagttggtgcgcacagacccggctagtttaaggccattgatgggactcctgtagacgctaagcgatggaaacattgtgcgcatccagtactcggcgtgctctggatggggctggaagatgccaggtgggcttctgaaacgagtgtggggttcactctacctttgatctttgcctgcccgggtgtcctcattcatttaactcttggcttccttattcctctgtccttatccccttcctaggagtggggtctgctcagatataccctcttccctgcctctttccctccctcccctcctgccttcctcctcctacccctgaaaacctctttttttttctgtccaaggctttcttgggcgagtttagagcagcagtttccaacttgagctgcgcattggaattacttgaggagcttaaaaaatgtcctgatgcctgactccacccccagaggttgagattcatttgctgtgtatggggctcagacgtcttattttttattccgacatcatttgcttgaatagctgtggagtattctattgcgtatgtataccagaatgtattaagctactttcctgttgatggacatttaagttgttcctaaattttcctagtataatatgttctccatccatctccttgtgagctcatatctgtcaagaaatactgcgaacgactttgaaatgggtggagaaagattcctgggtgtgttgtctagctcactcatccgagctatttctaccttttgttttctttgagctattttacaactctaattgtggaaagctgataatactgcaagtggttctggttcatgaaaatgcaaaccagct

SEQ ID NO: 84346 - DNA, 1025 bp, Homo sapiens
gtgcctggtggccggcactgttgcagatgtcctggccaaagccagcttggtttggaagcccggccccaacagccgccaagtctggaaatgaagtaaatgagtgagttgttcttggccattttcccctcatctcaacccagctcaaatcaaactggagctctgacctcaggcatcgcacattccatactccccggcctcctggggttcaaaggcgcacggcaggcgataaccgcactgggcgttgagcgccgtgagggaagcttctggagggagcgtgggactggggtgggggcagctggcgcagcttcgtttctctggacaccaggcctcggagaaacagaaggggacgcctgctgggctgtgcttggcctctggtcatggggggccctgagaaccagaacaggccctgcaggggtgaggcttctagtgaaccggggggggtgtgggggctactttggggtgccccctccccaccctcccttgcctcctgagcctcactgctctacctgggagccccagcgtgacttcttgagaaatggtggcctctgctaagcaaggctgtcccgggcggtcacggcgagctggcacctggattcctgaggtcctgaggaacccgcttcaaacctgggtggtcagggccgagtggggctctgactgctccactcccgaggccccagaccaaaccacacagcccttgagggtgaatcactttgaagtgaggggttctgagcctgtggcctgccaagcgggccggcttggcgggaatgggcaggctgggcagcatggcccgcgtggcttccaggcagcaactcctctcccaaggcgaaggaagccagagccagagcgcaaggctctgggctttgtggtcagagagcggctgagttcagatatcatttcctagctctgtgacactgggcaagtcacttaaccactctgagcctcagcttgctttatgtgcaaactgtggcttccttgcaccactctcacagggtctgtgtgaggattaaaggaaaaaacccatgcaa

SEQ ID NO: 84347 - DNA, 1050 bp, Homo sapiens
tagtcaacagctggctttgagacacatgcctgagtgccttcagctcctggctgagtcctctgtccctctgtccgtggccactcagccatgagcacttctgttagcgatgaagatgaaaaagtgtcccttctgcccaggctctcccttcctcctctggctgcagagcagggaggggtttcagtggcatcgcggtggccgggagcgagtgtgctggccggctgggccttgctagcagggccgggccttgctggccaggccaggctatgcaggccctcgagagggcctggggacaaaggcgccttgggaggaggaggcaaaacaggggagggaagggagggccctggagaaaaaggggggaagagaaacaaagacaaaggctggcaaaaatagaccacggaaacggcaggcagccgggataaggaggacaagaggcaggatgtggaagaggaggggaggcggaagttgtcgtggggggtcggggagaaatggggagtaaagggagagtgggttacggggagctgtgtggggtgggggtacgtgggagagagagacccagaaagacagacacacagagagaagggagcggccgaagaggagggcccgtgagcgagaagatgcagatgcccctttagtaggagggcattgctccctgcgcccctggaagggactctgggctggaaaggaccagaatgcagggaggagccgctggcgggggtcactggaagcttgattcgggggaagctgtaggttggagctgggagacccgagttcctgcccctccagggtcttgtacgtcctcacagaggacctagggccttgatcctggtcccggcacacagacacttcaggggtgatggagccaccacaccgaattctcctctagggccctcccccagcatcagagtgcagtctgagggcagcagtgggagctggactggggccatctgtgcaaggggttattgtgcccaggtgcacaggccggagctctggggtcactcaccctccgcgttacctgtcgttacctgtcgttacctgtcgttacctgttgtc

SEQ ID NO: 84348 - DNA, 4008 bp, Homo sapiens
gtcaggccaactgcaaagcctgtgctctttcgactcctggatggacactgcccaggtgcccctgggtaactgatacccttgtccccaaacaactctgaatctcttttcatcatgaatattattaataacaataaatactaataactgccatttatcaagagcccctacttgccaggtgctttctcattcagcctgccaaggaagcccgtgagttgggcaccagtatcgcactttacagatgaagtcattgaggtacagagcagctatgtaactagccatggatcatagagctagtgtcggagatggcacccacacacaattctgatgacaaaaccttacacttggggactgtaaggctttgggcacattaggtgacctctctgagcttcagttttgtcttctgtaaaatggacctcatatgctgtccgtggcataggtttgcatatgtgaattaatgactgtggagtacctggcactcagtgttagctctcaccatcatcatcatcattactgtagcatagggtttctcagtgaaacagacactgatggtcagagtggacctctcagcctgggggaagcagaggatgaaccctctggggcggggccctgggcaggctggttcagtgataagcaggagccaggcgacccacaggcttcttggatgggctgggcgtgcatggcataaccgtttgagaacaacaaaccaagccggccgggctgccgctctgtttcctgcgaggagggaagttacagatctccgccctggcgtccggggaaggatgggacaggctgctgaggtacagtcccatgtggggaacgactctgtccagcttgatgtctgtgcctaaaacctcgcctgctgctgctggccacaggccagtgaaattcacagacccacttctcagagggtgggcaggtgtgtctgctaatctgagagaccccaggccccttctctttttatgtttgtgggaggaatggctgagaccccaaagctgtgggctgctgctctttggaggacttgagacattgtgagagctgtcacctcctcctggaagcccctgcctgctgtggtcagccatggccactcactctcctggggcatctgctggcctcccttagtgacttggctgttggctgtcattttctttccacctcattcccccaactagacaggaagctgtcagtcctcagcctccttatctgtaaaatgcagtttgcgagataatccccagctcccccagctcccccagctccgagacttgcaggagcagagaaagaggccatgaagctggcaggggcgcaaaggaagcagggcgttgttccagggaagggagagcaagtgagccagggaccgagggtggggctttgaagatgctgtgaatccagggtagcaagtgtagtggtgcctttgttttttcatctgtagaatggggataatgggactggtctccaagggtggatatgagtgctgggtgagttaacacacatcacatgtgtaaacagggcctggaccatagtaggtgctatggttactattaaaattgctacatttagttaattaaaataaatattaaatcaatatttgtcgtgcctgttgtgtgctcagaatacagcagtgaacaaaacagacccccttcatgggggcgatcctacttgggggcgatggatgggaaacaaggaagtaagtgaaacctatttagaatttgtacgatggaggggagttaattgcttctcaaccctgacaagtgaaaagaaaagtgagaaggactttgaaggacaaagaccaattaaaatttcagcctttcagcaaggatcaaatcagatttatggttgtttcatccagtgataaaaccctttgaatggatgacgatgtctcaaagtagcaaagtggggtgcgggagagctcagttttaaatttggtgagcttttgtgcacgtgcttccagggatttggtatcacagctgtctcctccaacagcaagaagagaaggttcataaaggcacaccatcccagtagaggcgggggtcagccccctgcggaccctggacccctgggaacacagtttgaaacctggtgctccatctcttgggcttcttcccaattaaaatgagcagagtcttacattctgtgaaactgaatgggagccaaggggtcaaaggacaagttcaagagggagaagccagtgccgcttggcgggcagtgcccgggacacccacccacagcctggcagctgggccatttgcttactgctggctggctggggggttcaacagttggaagaggccataaaagtggattgcacagatgccctgatgctgggcctcgtaaggggtgtccgggctgtggggatgtctaggcggagagggaggtgtagaccctgggcctcccaggcacagtgatggggcagctggagctggtggtgcccatgcaacagtccaccctcctccaacccctgcctgacagccttgcatagcccgggggactcagtagcttggggctcccctctgctcaggcagacctagggctctgatggctcccatttatgagaacagctgtcacttggaaggacctgctacctgtcctccgagatgtgtttttcataccttgtattggtcctctccaccaataacccctcatggatgagtgattgttactgtgtaggaagaacttggggctcagtgaggttgagccacttttccaagaggccacttagagctggagctcataataagtaggggtctctaggaactgtttctaaacaacccccgaacccagctggtggctcccagaagggtctctggaagcaaggcgactgtctcattgtttcattagtttgagccctacggggccttaggacacagccagcttggagaagtcactctaataacccatcttgccggtgatgcccaggcctcggcagactggctctccgagggtgtctgggcctgggcagccgaggtcttgttaaccccaaatcccacaggactcgcatagagtgcagaatcccggttttctgaattggtgctaaaggctcagtggcctggccctgctgtgaagccacagggcttgtgctctgggagccttggccgacacaggtgccccgccgcctcctctgctgctgcagcctcaagggctacaaagaaagctccttctgcccgtgcagcgtgggctcctgggtcccctgcaggccaccatggctgctgctccagctgtggtccccccagaggcttctccaggcagtgcctgccgactctccggtgcttcccttattttattcctcttccgggcactaagtttcggtttccttttcattgttctttgttggtctgttcattcattcatgcatgcatgtgttggttcattcattcattctcagagtaccatggtggctctgaggacagaggtcagacccagctgggttggaacctgctgctccctagcagtgggcctctgggcagatgttttaaccatagaactcggcttccttgtctgaaaacgtggctccttctaggacagtcaagaaggttcaatgaaatgatggatgtggagccccaggacgtgacctgaggatggtgcttgtcatgttggggtctgtgtccctcccttgggcacattctctccttccttcctttccagcttcctgaggacggtccagtgccgggggctgggcacaggcctgagtgagatgcggcccttgtcccccggcctttttggtctgggtcctcacctctgcaccgagtccccctggggctgctcggcagctctgagggggccactctgcctctgcccagtggtcctgctttctcacgggggttatcaggcctctgctcctcgcgcctcactctgagagggtccttccacctgactcatggctcccatccctccatgcccctgcccaggtgcccacacatgtgtgccccagaacatggctgcacacacttgcataccccacgagcacacacgtgtgtgcatgcatacaccccatggtccttgagcacacatgtcctg

SEQ ID NO: 84349 - DNA, 1008 bp, Homo sapiens
tttttacgagcaaatctggtggttatcctttggaaaataagcaaaggcaaaccacttcctgccacttccaggagctgctcaagtgccggagctttctaagacctactgagaatctgaaacttcaggccagcgtcctccgttttcctggagaacgcagtaatttgtgttggtgaaattccactgggcctgatggggttggagattgcatttcagtcttgtcttgctaaggaatttctgagatcgagtaatttggcaagaagagaaaaggagaacaactttgggttgtgacgcacgggcagcaaatgcccgtcctattttgggactggtgcctcctgctttgcgtgtgccacacagcctcaggggacctgaagcccctctttggccccagggggagctctggcagtgccctgtgccacgcattgtatcgggctccttgcactccttcttacttgacttataaggttacgctattaaatagcgtcatctgcagaacagccctaaattcttgaatggggagagaaaatgcggtagctgggggtggagtggggtcgggggcaggatctcaggatgggtgtggcatgggcattgatgcttaggtttgactctggttctttttttttttttttttttctgagacggtgtctcgctctgtcgcccaggctggagtgcagtgtcgtgatctcagctcactgcaacttctgcttcccaggttctcgcaattctcctgcctcagcctcccgagtagctggaattacaggtgcatgccaccatacccagctaatttttgtatttttagtagagtcgggatttcaccctgttggccaagctggtctcgaactcctgacctcaagtgatccgcccacctcggcctcccaaagtgctggggttacaggcgtgagccattctgctactaaccggcaagtgacttaagtccttgtgccttccttgcctgatttatgaaatggcaacaatcctggggatgatgggaggacttttttattcagtcaa

SEQ ID NO: 84350 - DNA, 1029 bp, Homo sapiens
ggagtgaacacagccctgggtcatcatctgtggctctgctgtgtgacagccgggtgcttgatggtgaagagtttccccctggtatgagcagtcagtgttatccctggtctcagtggatcactgggtcgcctgcctagtcccagatacctctgatccctttattttaatttttattttttgaggcagggtctctgtgcacccaggctggagtgcagtggcaacaattatggcttactgcagccttgaccccccaggctcaagccatcctcccacctcagcctcccgagtaggtgggaccatagatacatgccactgcacctggctaatttttaaatttttttgtacagacaggtctctctgtgttgctgaggttgttcttgaactcttgagctcaagcgatcctcctgccctggcctcccaaggtgctgggattataggcctgagccaccgcgcctggccttctgccccattgaggtgccagtctggtcaccttatctcactgtggatgtctagaagtgaattctgaatctcaacccactgccttgttctgaggttgcctgaaccccatggcacccctccagatccctgagcggatcaccaggcctgtcagtgacagacgtcatcacctgggaacagggcaggatgtggctgagtagctgacatgtaatgagggcgtgttcacacctggccctgtgctccatggactttatatttaaatcctcacatgccaactgtcattttataaatggagaggtgaggcttgggaaggttcagttatttcaccagtgttagaaaaaggtcagtggggttgggcgccgtggcttacacctgtaattccagcacttgggaaggccgagggaggcagatcacttggggtcagaagtttgagaccagcctggcccacatggtgaaaccccctctctactaaaaatacaaaaattagcctggcgtggtcgtgggcgccagtaatcccaagtacttgggaggctgaggcaggagaatcgcttgaacccgggaggcagaggttgc

SEQ ID NO: 84351 - DNA, 1461 bp, Homo sapiens
gtgctttcttagtttgggaactgaaagccttgtctgtttccccagactgtgaagaaagttatgagtagtgtcagggagctctgcacagaaactttggccaagatcatttccctcttgtaagctgggtctctctttgagtctctcctcagtgaaagagtggctggtttaaatcaggaacaggctgggcacggtggctcatgcctgtaatcccagcactttgggaggccaaggcaggtggatcacctgaggtcaggagtttgagaccagcctgaccaacatggcaaaaccctgtctctactaaatacaaaacaaaaaatcagccgggcgtggtggcacatgcctgtaatcccagctattcgggaggctgaggcaggagaatcacttgaacccgggaggtggaggttgcggtgagcctagattgtgccattgcactccagcctgggcgacaagagcaaaactccatctcaaaataaaataaaataaatcaggaacagtaagaactgccgttcattgagtgcttattacatgctgtcacattgctgagcagtttacacacgttgtctctattcatcctcctgcaaccctaacaggtgggacccctcttagcctcattttattgatgaggaaaccaaggctcggagaggttaaggaacttcctgcagctcacgtagttagaaactggcgaagctgattggatctaggcctgtgtgatcctgagcctacactcaggaccgttctgatcctgaccagtacttactgatttggggtctgagaagacagtaatgagcaagggcccccagagaagttttctgaccttcacaaagccctgctgagatcttgacctctgttcttaagaggtggatcttgcctcagttatgctcagccatttcattacacaggaagacctcattcttccttacattgcaatttattgttttttaaagaaactggccttgtattgtggaaataacattggaaaatggagattaaaatgggtaatggaaataacaatcagtaatggcttaagaacagaagcttgattggggaaaagtcttccgaatagaaagatgatcaagtgggaagaaaataaagtggaactttgagtttgaaatggctcactcatgcctgtaatcccagcactctgggaggccaaggcgggcggatcacgaggtcaggagttcgagaccagcctggccacactagtgaaaccccgtctctactaaaaattagctgtgtgtggtggtgtgcgcctatagccccagctatttgggaggctgaggcaggagaatcacttgaacccaggaggcggaggtggcagtgagctgagatcacgccactccactccagcctggatgacagagcgagactccgtctcaaaaaaaaaaaaaaaaagaaatggctcaaagccttgttcctgaatgtcctctaaagaaagatcatcggccgggcacagtggctcac

SEQ ID NO: 84352 - DNA, 1328 bp, Homo sapiens
agcctgggtgacagagctagactctgtcttaaaaaagaaaggaagatcatctgcccagccttggctttctgggggtcttgggtaccctccctctgcagctgctaaagataagcctaaaactacgtttctcaaactgggatatgtgcagcctgtgagggtgtcaggagtttgagaaaccataggctaaattgggtgtgtcctctatgtgtgtccacttgacttgtggattcagagggaaaagattaagtaatttaactaatatataatttagaacatggctcatcttcttggaatgagcattttccttgaggggtggaaaggttaagtcgtttaattggtgcgtaatgtaaaacatggctcccctttgtgggaacatccactttagacaatttggtgaagggagaaaaggtgaaaccatttaattcaggagtcattggagatattattttgctgttaaagtgtgcacagatgtggagtggaatgcaaattcacaaggctcattaagattaaccaggagacctgagtggaatctcctggttggggtggccgcagatcactttgcgtttgccctgctttatatttggggttcttgggggaacaagaggactgggttctggggaagggctgtgagggtagcactcagtagtactggggtgtgagtcccattgctgcctgggacactggcccagcctgctggagctggactgatccggtgatttttgcctttcttggtttatttcccatttggttttcccaggcttttagtagagcccacttgggcaatgccaacctatccacccatgcttaacggaggaatcagagatgattgaacagagaggaacaaagcaggagcattcctcccccaaccttgttctagagacaaagtgagtgctacatcctctactttatattattttgaaatattaaatgtgtgcatttatttttgaatagataggactttcatatgatgcacagctcaggaaatctataaggaaatgtggtgaaaagtccctcttgccctgtggcccggctggcttatctcctccccagaggccacagcatccctggtttctgatcatctcctttgtggacataattaggtacatagacgcaaatacgtacaaatttggtttgtttaaacgaatgatagaatcctgtgcacattttcctgtaatattttctcactaaacaatagtgaggaatggttgcatatcaggacagcttccctgttctctttttgtggttacagagcattctactccatagctctatttggtcattttcttactgatggctgtttttgcagccttttactctttcaagcaatg

SEQ ID NO: 84353 - DNA, 1060 bp, Homo sapiens
atgtctctgggaaaaattcctagaaatgaaatgtctgagtcaaaggttatgcacctctggaatattgataggtatttacagactgcattgggagtttcagcactctccatcagtctgagagggtgctccgtgagacagatctcaggacagctcctgcaggcctgggatggtgtgcagaatgatctgatcatgcctgagggacccacgtaggccccaggatggggatcctcatggtgtctcagggccccttctgatgtatgcttttgtcaactgtgcactggggttgggaagtacttaggagagcaagtgtcatgtctggagtggttctcccttggccttgcctgccattcctttgctcagcgtggagtctcccctactccaggaatgaactcttgaatacaattcaggttccctttcccttagccttaagagcagcagcttttatgatgggaagggaatcattcattttatttttttcaaataaagatctactcttcagagagaaaaagtgccagcaggtcctcatgaagaacagattcattcaggtgtctgcaggtgtcaccaacaccgtgtgctccccgtgtggcagacctcctgtgtcctcagctgtcattgccccacagggctctctttagctccatcctatagatgcgcaagcaggtgcagagagatgtggcatgggcaggaccacccagctggagagcccaccggaatgatgctgatgtgccctcagcctgcacagttccctgcctgtgtgtgtgtctgggggcttgcttcctgtcacctagctcggcataacacattggtgggagtttggctttggagataggcacttgggtttgacattggggctgcctccttcctgcgtgcactgcctctggcacctctctgagcttctggttttttagctctaaaaatgggaatgactttcatgttggtgcctgatgtgcaggtactcgggggtcatagtctggctgtctttcccttccgcccactctgtccgcctccctctggtcatcctgagcaggtcgagccagggcggccctaagcagagccctac

SEQ ID NO: 84354 - DNA, 1155 bp, Homo sapiens
ccagctgcacatccttggggctgggtcttaactgggacccagacccctcagcttgctgtcttcctgtctcccttaaccagggaggagagaacaggtgagtttcctggtgggcaggagcatggaagtgtgatggatctgatgcagtgattggctgggggcccctttgtcaggagctccggacatcctgccctcacggagaagtcctgccccaaaggaagtatgcctgaatcagacctggctggcaaattgaacctcattttctgatcaatttccatcaggattttagatgaggatgcttttcctgtatctttaatggggcgtttggcaaaagctctgctcactttggctgtgactttgtctcttgggcctctatcaaggtattgacgacagtgacgtcagcatcctgctgcggggctgccaccctctttgtgttatagttctcaaggtctgatcggggacgagggggtgctcgctcctcacagctgcccaggagctccacggagcaggtgtcagggcccttgtttccctgggtgtgagtcgcccaagtgggaccatgatggccgccctcatcacttcatcactgatgtttttgctaataataatgatgacaatgtcaataatggtagtgttattaccacctaacattattatgtgctctcagctaagcacttggtttggattagtttaatcctttgacagtcttctgaggaaacactattgttagtagccctgtttaggaggtgagtaaactgaggtttagcaagcaaagggacatgcacaaagtcacacaaccagccaggcacaaagccaggatttaagtcctggaggtgcgattccaggtcttttcaaaattacacttcactaccacctttctcagatactgtgatggaccagtccaagaccaatgtttttttttccttcattaaaacaaaaaaaatcacaaatcacaaacctttattttgttttgttttgtttttttggtgagatagagtcttgttctgtcgcccaggctggagtgcagtggtgagatctcagctcactgcaacctccacctcccaggttcaagcaattctcctgccttagcctcctgagtagctgggactacaggtgcatgccaccttgcccacctaacttttatatttttagtagagatgg

SEQ ID NO: 84355 - DNA, 1003 bp, Homo sapiens
gcttcctcatggtgtcatttaacacattcctctgttccctgtatttcctgtagatttcctgcataccttgtgaattcctagtttgtttttacacaaggtctcactctgttgctcaggctggagtacagttgcatgatcgtggctcactgcagcttcaacttcccaggctcagatgatcctcccacctcagccttcctggtagctgggactacaggtgtgcaccaccacgcctgcctaattttttgtatgttttgtagagatggcgtttcaccatgttgcccaggctggtctcgaactcctgggctcaagtgatctgcccacctctacctctcaaagtgctaggattacacgtgtgagccactgcacctggcctctagttagttttagacctgtgctgtccaataccacggccaccagccacacatggtcgctgagcacttgaaatgaggtcctcattgagatgtgctctaagtgtaaaacgcacactggattttgaagacttagtatgaaaaaaaatatacagtatctcactactcattttttgtattgattatatgttgaagtgataatatatttgatatattgggttaaaatatattattaacattgatttcacctgttttacttttttaaaatgtggctactagaatatttagttttaaacatgtggcttgcattgtatttctattggagagcactgatctagagatttggttgatttggattaaaattttcggcatgattcctctctaggtaggtgtttctgtgcacttccagttgcctcactccagggtccctcatgccttggtgggggtctttcttgctgtggttgatgggcaggttctggtgctggctgcctgatctatccatcaccacccccatcacctttcctgctcatgttccagtgggcaccagcaatcactgctcaggtgcattatttcattagagattgcaaagggcaggtgttttagctctacctttccttcctcatttgtcagatggg

SEQ ID NO: 84356 - DNA, 1073 bp, Homo sapiens
acctccagaggatcagggtgagggaagcttccagaagtggcatgaggagggaggaagaggcagcccagtttgaccttaggaacgaggctaacttggggtgcagtggtcaggagtgtgacgagaccatccaggttccaacccagctggctactcattagtccatgaccttagacaagtggtttgcgctcactgagcctccattcttcatctgcaaaatgggtgtactgtgagaattagatgggacagcctattaattaagactttagcgtggctctcagcaccgcatgggcacccctggtagatctagtgttgcggtcaatcgcggtggctctggagcctgagagcccaggagaaggtcatggcttcaccccttataacctgggtccccgtgggtttgtttccagacttctctgtgcctcagtctccttatctgtaaagtggaggaaacagtatttcctgcttcccagggtggttgtgaagattaagtgacttaatacacaatccttaggctgctgcctggcctgtgtgtgtgccgtgccagtgtgcgccatggtggctctagctgttgctcatactaacatctttcagaggagctaccacagaccaagtggggcgctggggtccagtaacagaaaatgcgatgaacactcccctgagcatcgttgttcgagggcctgctgtgtgccaggcccaacagccctggaggaaggtcatatccttcccattttccagagctggagactgaggccaggaggtgacccatggccacgtggcctgtcctggcaggagtgccctgtcccaaagctctcagccttttccctgtgccagaccgtcttctcccagttaaactagaagcatgactccagcagagagaaacctactgggggctgtgctttattctgggctctagggctgaaggattgaccgggcaggtgaggctgaaccctctcacctgtcagcgaggcctcaaaatgactcacagctgaaaggaacaccttggccttctgattctcatccttgaagcgttgtggtccctcacgcttctagatggaaaaacacaaggtctgtgttgg

SEQ ID NO: 84357 - DNA, 2060 bp, Homo sapiens
cagatggcctccaaggtcttcagtgaaaaaccagaaggcctccaaggtcatcagtgaaacccagacggcctccaaggtcatcagtgaaaaatcaggcaggtttcaaggtcatcactgaaaagccagacagccttcaaggtcatcagtggaaaaccagacggcctccaaggtcttcagcgaaaaaccagacggcctccaaggtcatcggtgaaacccagacggcctccaaggtcatcagtgaaaaatcagacagctttcaaggtcatcagtgaaaagccagacagcctccaaggtcgtcagtgaaaaaccagacggcctccaaggtcatcagtgaaaaatcagacagcttccaaggtcatcagtgaaagaataggtcagtatgtcttagtacattgattctgtggaatatgatgcagcaatgaaaaagaatgaagtgaatctaaaatgcatgactgtggaaagatatccaagacatgttattgtctaagactcatcacacaaatgcataacacaaaggtattttttaatatgtatatgattgcatagaaaaatgagaccaaggaaacaccctcctctggcaagagagtgggcttgaattcaggtaaaggggattttgttgcttttcacacttctcatttctatattattcaaattgtaatgacagccctgtattcacatattagctgtgaaattgcaaagtatgtaataggccattatgagaaagaaaaagccccacattttagccagtgtgtccttggagtctcccccgacaatgccagggaagtgggaaacattttttcctgaagaaatgtggagcagaggcgattctctgggtgtgtttaggaaatgatcccatccttcgggaatgccgtttttggagttcgacgttctctggaggcttgggagatgcagccagggcgcagagttggcagtggctgcagacatctcttttcaatgtggacctcctgccacagccacgagattcaaggattttctaggaaaatgaacgccagtggatgtgtggaattttttcacaaagtaagtgacgggggtccctttgcacttctcatgcccccatggttaattgtgtgtgtgtgctggaagtggaggagggcggtgggtggtgcagctgtttgaggactcacccttcttcggaaggctggggtcaatggggtgctgtttccccgagtcagttgaaacgcccatggctaaagcctgtggatcatctcacccctgcatttcctatttggctctcactttggtcgaaagacagcggagcgcagaaaatctgtcataattgtgaaagtaggacctgtcatcctctaagggtcattcttcctggcccaccgggcttgttgacacctggagttgggtagcagagagagggatgtcgggaccgtgaattaacagtggccaccacttcatggtgaatggcatccagacaacaccttcacctgtctggggaagaacataggctaggcctgggagaggctgtctactgaagtccctgcaggggtccaggctggactatacccctccagcttggcgagagagccaaggaccagcaagggaagtgatgtacgctgagaaccgtccgggcgcccagcacgggtcagggcctttggcttacaggctgtgtttatttctgagcagccctatgcagttggcattagcatcctaccgttcccactagccagctgggactcaaaccgattaagtaactgtctacctgcttcctgtgttctgtgtctgttggtgttgattaaaaaatataaaaggccaggttcatgcctgtaatcccagcactttgggtggccgaggcaggaagatcacttgagcccaggagttcaagaccagcctggggcaacatagcgagacctgcatctctatttttttttttttttttttgagacagagtctcactctgttgcccaggctggagtgcagtggtgcgatctcaactgactgcaacctccgcctcccaggttcaagcaattatctgcctcagcctcctgagtagctgggattacaggcgcccgcgccacgcctggctaattttt

SEQ ID NO: 84358 - DNA, 1062 bp, Homo sapiens
agtcctgaccccttaactcagaactccgtcagcagaggaattgggttctctgggctgttctctactcaggcacacccttgctgggcctcccatgccccagggcagtccaggaaatagtgtgtgcatggtggaggggaaggaccttgactgagaccagacagggttggaatcttgggtctcctacttcctgtctctgtgaccttggccaaccatttaacctcacttgaggaaattgagcctcagtttcctcatctgtaaagtggggttgttatgacgataagacaggataaaacacatgaaacagccagcattttaccacttttaacctacagaacggcagtttgacatggctcactcaagtatgtccatcatggagatgcctcagtgaggtgctgggacatggtagactcagtaatgttcccttcctctcctccagccctcagtgttgaaggctttgtcatcctgaatggcgacgaatgggaagtgagctctgaaactgaaaccaccatttggggacaaaagctggcattgtagttgtggctctctgggaaggtctcatctgtcttctcggggctgttccctaaagctgtcattacgctggctttgcggcaggggtgcagcagcagtgggtggtgatgcggctgctcttgagtggcctggtggggtcatttcagtttcaaggccttggagagtgtgcttagcaggtggggcctaagatttgcatttcagctgcccaggtagtcaagaagcggtatagcaaagcggctgtgagcccattctctggagtcctgctggctgggtttgaaccccaggtctgcctcttgcctgctggtgcactcagccaagttacttcatctgtctgcctcgatttcttcatctctagtggtttctacctcagagactctgggagccacaaacaggatcccacttcttgaacaatgcctagaacaaataagcaatttctatgctgtagagagtgtttgcttacttaaaataatgcttattaaaaattggcgggtgcagtggctcatacctttaatcccagcactttgggaagccaag

SEQ ID NO: 84359 - DNA, 1016 bp, Homo sapiens
ggaacaggaggagggcttttataccaaaaaatggattgttctggaaggcttttctttgtcactgcccggtcgccgtgactgtggaccatgggaccctttcagccccgaggcctttcggcaagccttcctgagtggcctctgcatcattgcttgctgagcggatggtactgcacggttgccatggtagcagcaggatgtggttcctatggtgatggtcggcagtggcaggaagacagcagaggttttagttatctggtggcttcgcatttgccacccccccccgaatagcaaacacgagctgcccccgctgtcgttctgctctgtagaaccaccggtgaccgccaaggtcggctgcctccctgaaatgccactgcaggttcttggaaggactgggttgcaacaatagcatttctgcttccagaagaggagggggctgagtgtctctaagggtgcgtcacctgaggggagggtgcttatattcacactctgaacctagcaggtcgagtctgtgcggagcttcttcaaaaagcccctccctggagtgaattttcttttccttctaagtcttgtgtatttgtagacagatgtgggatgatgagctaacaggagaaaccaattggcttttgaagctcctatgataccttgtagatttcaaaatggccagtttagggggtcagttgggttttcaaacataagatacttttctacaattgggagttggccgagattagggaaaggagaaaggtatcctgagtgttcccttgtctttttggtatcctatatcttacagatagaatttctccaagaaaggccagtgtctgatacagtgaaatgcagggtacagaatattgtttcctttttatccaggaaggcgagaagaaaagcgtataagcaggatttcagaggtgctgttacaatttaagagtaaatctgatatttaggagccaagtgcagacggatgaggtttctgcttgtccattcacacttgataaggctgccactgcctaagacaaggg

SEQ ID NO: 84360 - DNA, 1027 bp, Homo sapiens
cgaagtctggaaaagaaccaagaggacagcatcttttgtctggagagcaccgtgcctgttctccaaccacctcgtagcccctggtggagcctccctcctcccccaggaagaaggtgagctgagtcaccaccaggtaaccctgaacctcgctcagacacagcttcctttagctaggagcctggatgtaacacccagctcatcccttggctccctccaaacgtcaaggcgtcttgaactaaaagccagcgcctgcacaccggcagaactttgcagctcctggctcctgagttgtaggtgtttttgccaggtgtgcctgtacgtgtgtatgtgtgcccatgggtggacagtgtttctgtgctccttggagtaggcttatttttctgtctcttaaactggctcccttggcctctgcctctttcacgggttccatgcggaaccctctgacctgtgaggtgctaggcttgtcacagcatctattaggagacctgaaagacaggaccctgtaatgccacgatccattgcttataaaggaagccagtattggggtcagacagagctggattctctcaattgctcagcaagtgtttattgagcacctcctctgtagtgggctctgggggtaacatggcacatgaaacagagatggtgtctgtcccactggagcttagaggggcagagactgtctacaagtgacagagagatacagagagaattataagtctgagttcttcagccagtctggctctgctatgtcctagacaggtgaccttgggtgagttaactaagtcatctgtaacgtgttagccacaacctactaagctcgtggggttatctggaagtcttggtgagacagtgtctgcaaaatgcttatcgccaagccaggcacgtcatcattgcccaaggtatggcagctgcagccatcacggccctcattttgcagatgccgaaattgaggtcagagaggtgaagtaacttgcccacggtggcacagctcattagtgggtttggcggcacaggccctgctcag

SEQ ID NO: 84361 - DNA, 1061 bp, Homo sapiens
tttatggtcaccaacctgtaactgaaatttagcatttgtttccatgacggctgtaggcagtaccaatcacagtggtgttagcagtgcctgtgacttagtcatcaatagaaatcgcgggtgtttgcatatttcattcctgttgttgtggatatcttggaatatcattacattcatcagtaccccaaagttacagtagttatcaggcccacagctaggtcttgttatacgatggattaataaagaggggatctgttactccattggaaattttaagggatattttgatagctgtttttcattatgatcagcttcctttcctttgcagtttcctatttattttatacttttaagaagattactctaagaaggggcccagaggcttcaccagactaccaaggggtccaaggcacaaaaaagcttaggaagcccactcttgccttgcagaggtgcccccgggaggggtcacagtgaaggccccagcccgccagaggagcaggtttgcgtttggtttctgggcagctctgtggaaggcaacccaacttcctttggaagggccctgagcctctctctacccactccaatataagaagagaaattttgctttataatgagcaggaatcttctctcagttccttggatggctttggacatgttttgagtttgtttggattcccaggagtgagcacacagggcgtgagctttgcagtttggggcctggtttctgaagaagttgcaaacagggtgatggtgcagttcagacaacacgcgcgggccaggcaggcctggacctgaaaggaatgtgttttcttggtttttgtctgctacagaatttctcagctctccagctcgttggctcaaagtgtgtcaggaaagggggtgctgggtaacaagacgatggtggagagtgaggtttgcagacacaccctggcttggccgggagcccacggtgggggaggttggctgagtgtgtaagagcctttgggttcacagcctgcatgccagaaatatcatttatcgtcagtaataatgataatgcctgatggacgggtaaaggaatagct

SEQ ID NO: 84362 - DNA, 1528 bp, Homo sapiens
tctcctgaccacagtgtctgtgtttatttagtttttttagaagcttcaactttacagaaagcaaatcaatgcgtgttcttttatgtctggcctctttggctccacatgtgtttgtgagcttcatctacattctgtttagagctgaaggttatttatttttgttgctggatcacattttatcctaaaaatatcccattctactgacggtgggcattcacgttgttgccttcttaggcttttatgaataatactgctaggaagtctcttgcgtatgcctttttgggaatgtgtgcatgaaattctgttggcttatagttaggcatgagttgccattcgctggtattgcataggttcaccttttgtagagaaaaccaacctgttttccaaagtggttgtaccagtttacattcccaggagcagtatgggtgatttctggttgcttcatatctatgccaacttgttattgtcagtcttttaaattttagccattttggtgggtatataacagtattcaacttttctttaagtctgaaatttttcataataaaatgttggagaaaaatatccttcacattcatgacaacttcatagaaaaatagtatttttaaggagatggttgaaattggcgcttgtctggtcttggagtgaagacttttttttttcattctaaacaatgccaaggctggcccttcctcctatgaccctgtggctccccagtccaccattggtctcatgctgaatgctggatacatttttaaaagctgggtgtagccagagacaggggcccggagtgaggttgggagtaccttgaagctgtgctcatgcattgaattgatatgaccagaggtggagcgtggagctggttcctggcctggtagaagttcttacactttttgctggtcccagagagatgtacttttgagtcagcctgggaaattaaaatagttcattgagttttggctaattctggtaactattcctagaatcctcctggtcattggtttgaggtcacagctacctgcttgctggggcttccctctctgacttagcacaaatgatgcccaagtcttgagcttcttcctcatgttgttaactgctcagctgagttatttcaatggcatgaaagaaacatagaattaaggtcatagagcatggtcctaattcatgcctgctcgccctgctttactgccatcatcatctatctccttgctttcactcaacaaatatttggtgagcgcgatttttttgttaggcactcacccatgctccctcccttcctttctcctctccttcagtttgtttgcctaccagtccatgcacccacccgtccatccacccacccatccctccatctatccgcccatccctttatcccttcatccatcacttactgatggctttacccattgtaaatcaggccttggctagatacagatgaatgagctgtggtccttgcctttgaagtattcccccatactgtgacaaatgattaaatagttattcataatgcagcatgacacggatataa

SEQ ID NO: 84363 - DNA, 1067 bp, Homo sapiens
tgtgtgcacctgcgtgtgcgtgtatgttccacacgctgatgcaggaggtatacgcacagatataattgtcttttagaagattgactatcactaattttgaaaaatttcctgaatgacctttcctgccaggccaatacattgagcccaacagataaatccctgaacttattcgcagtctctaagtacctttagaatcccgggggtcgccctgagcctccccagggactagcgctgttgccctcgctcagtctcgccaccacaggaggcctcggcttgcccagcagctgagtcgggagaacctttcccaggtcccgaggcagcgggaggcgaagccaggagacccacctggtgccagggaagagctgtcacctgggcctttcctccaggagcctccaaggaaggtggaggtgtgacatcagagtgttgggatgtggaggggtgtgactccctgggatgcagctctgtgccctgactccagtgtgccatgcttggctgatctctcaatgattaactgtgtgaccttggacacaccgtgttgcctcctgcgcctctctgcccagacagcatggcaagtgaaagcctccctcccttactgatggtgtgatctgggctgcctccttggacacgccaagcctgctgtgcctcgaggcctttgccctgactgcttcctctgcctgggatgcctgttgtctaaacacccacaccacacgctccctcgcttccctcctgtctcctgtcagaagtcacctccttgggctgtccttgatcattccatccatccaaaaagttggcacccactcccacaattttttatttctcgttccctgacttacgtttttttctcctgagcatatgttatcatctgacagaccacgcgtttcttacttattttgtttattattccatcccactagaaaggcaggggtttgcctgttttttccccatgactgtatccccagcatttagaacagggcctggcacctgctagatgctcagtacatagttttgagtgagtgaacgaatgaatgaatcatcagtcagtcaaactttgcagcactcactttgtc

SEQ ID NO: 84364 - DNA, 1024 bp, Homo sapiens
gctccagattagggaagtggtagggagtcaagaggggctaaggcctgagtccgtctcattctcagagcgacacccataagcatgggctgcctgcccatggaaactcataaagtagagacacttaagacataggcggcccccggcggtggctcctgcctgcagtggcccagttgcataaacactgagagaaggctgccgaatttcactctaaggggttgttggaacaaagttgaaatgtggtccaaaacagcttcatcatcattagtgaatgtgctgtgggttagctttttattttctcaggggatttgtttggggccagcctgtgtctccatgttcttacttcgcgagctgagtaagttgatatctgcaatttaagaagagcctggttttgataggaagttgatttgattaccattttataagattttcttggtctggtcttgatcctgtggatctcttggtttcagtaattttggggtggtgatctatcctctgccatttaagccaagtcacactgatgttgagtccaccctgaagaatgtgtcaggatattctcattccaaggaaatagaaaaaggcattaagttcaaaatagcacgtgatattccaaaccaagactttgttatgatcttctcgggcaataatatgattatcaggtttttttttcacaggcaagttgattctaaggtcattaattttatctgtatccagtggaaattgtgttcattttaaattaaaataaaatgaacggtgtccatctgtttgtggaaacctgatctactaaggttgatataatcaggctatttacaagttcactgtgggtcagacaacagtatttatattcatgcacacagaaaattcgattagatagtgccgaggaagagcacacaccgatgggccgattaccctgaattcaggcagctcagattctccattcgcttgaatgtcatattagctggggatatcccttttgtgacgcagaatcttgcagcgaaacagttgggtgtagcctcctgtgagaaag

SEQ ID NO: 84365 - DNA, 1010 bp, Homo sapiens
attctcttgttcagggggtgtggagcactggatgggagctagacatccctctagacctgtgctggctggaagagtagccgctgccatgtatggctatttacattgaattaaaattagaccaaagtaaaaattcagcttgtgaggcacgtagccacacttcagtgctccgtagccacgcgtggcgaacagctcttgtactggagagtgccgatgtagaacattccctgcatcgcgagagctccctggatggtgctgggctgcaaaggccactcccccgggagtgcacagccttgcggtattaaagaccggcacatattctgtgacagtacagggcagtctgggctgggatgtgggcacacagatgtgggatggccgagccatgcctgggctcccggaggcagggaggtttcaatggtgtttaagtcaagtgaggaggatctggggcagaggaggagagggatagcatatctggtagagggaagcacatatgtcaaggcctggcctccagaaagagagacggaaggggttcagcgcggctgggtcgtagaccatgtcatgtttatgtggccgagggcatggggtgtgtgcagcgagggtgactctggagggggacacagaccagctcctgcagatgctctgccatctctgcagaaagacccccgctccaggctccctgctggcccttccagtcagatagagggtctttgcaggccatctcttgctgtgggcacgctgagcagagggtcccaaagccagtgacaaccagttcagaggagggcctggtttgcggggtcagggctggacaccttgctcagaggggtagctgggccttggagacaaacttaccgtttcaggcaaaagcgagggtttgcaggtggagggtgggaagcgggggaggaggaggaggaggaggaggaaggaagggatctcctcagaagcctgcagggtccagattgagtgtccgttagttcagtgtacccaagaaaacacttcaggaaatggcccctctt

SEQ ID NO: 84366 - DNA, 1046 bp, Homo sapiens
caatcagtgcctgataaatgtatgttgaggggagtctacctttccatgagaactgagttttatctctgaattaacaaatgccagatgtgcaattagcattcagagaaaatgctctcctcttcaaaaggcactttaacctgttattctctatctgagctcatttaatgcaaggagaagctaaggagcagaaagattcagagaaatatcctgcttcagagagttgggcaggagattcctgtagcatccgttctgctacttctcagaactgtgtgccctggcagacatcaataatcaatcaccactctttcctgttgagcccagaggcagctgcagaaccgttcacaacacacctccaggaggccactaccaggtgcttgagaagtttgcagaatcccagactggcaaatatgggtgtataatcgaattcatgtttacctccagatttctactttctggctcagagctgtcctttcactttctcattttcttcattcaccgctgtcagcaggtgccttttttcctgcagccacttctctggctgtgtgaccctgggcaggcaactttattcttctctgggcctcagttctttgtctgtagaatggagataatcgttatatctggtaagactctgtgggacccaacgaaagcatagagtgcttagcatcgtgtctgctaggaactaacaggccctgaagagatgatggcaactttaaaatatatttgttttcactttaatcttcagcaaattgaagccctggccgcaggtgtcattgggctggaagctcctagggatgccccccagaagggggggtttttccttggtccctggtaagtctgcctcgacacacccctacagtgggaggggcaccagctgtcaccttggtgcctcctctgtgccatcagtcttcccagccacagggaactttcccacacacgcaaggcctcatctcgggtctgcagaatccaacaaagagcaggagggcaaagaaagcctgtcatctcctctcttgcagaaatccacaagcagcatttccgatgttgtcatt

SEQ ID NO: 84367 - DNA, 1095 bp, Homo sapiens
gaggaacaccctgcttattcagagaccactttccagcaaacactccgaacccagcccagaatccaggtagagaagtgtaccaaagtcacggtggctgccacactctaactctttggttgcattcccagcagggcctcgctcccatgcagggcacagtcctgactagtgtattgcttgggtttccaagaccatgaaactaaaagcagcaaatcaggatgaagcaagagggaacgctttcatgaacggcgagcggaatgcccaacagcacaaagtcggcgggggtaaaacgaaaatgacagaaagaaaatgaagataaagagtgcacggcagttgggggacaccattcgggggccagcagctctccactgcttcaggagctcctgacggtggcagtgtggggtagcagatgctccaagggacaattgcatcagcaagaaagggcaaaggctactccctgccatctgcttaaagcgaggaaagaaggagtgtttctatctaaaattatttaaatttctctaaagggccttggcactcagagggtaagctctggctggcattgcctctgaccttggccgtctgatcaggcagtgaaagaaggaattgttcctggggttgcaagggagttgctgccaacatctggcctgcctggcccctttgtctccctattgacggcgacagcattgggcaagtcctgggcctcatgtctgtgcgaatgtccccaccctgtcaccggcacttccccccggggtcggggctccgggcctctcatacagctgtgggcctgatggtagaaaaggaggctctgttctttaaccctgaatgggatcggccactgatctattcttgtcacttgttgagcaactgttctaggctaaatctgaattctttctcagttagtgcccgaatttgctttttaaaaataagtcattgggaatacttgaccctgggcagagagcgggaccagcactcaatgaaacttgtcaatagagtttctcacggccgggtcacagacgtggagggagtgactgagtcccaagagaagacccactgtctcactgtgtttcctctcactgtcagccccaaccgaggcttatt

SEQ ID NO: 84368 - DNA, 1216 bp, Homo sapiens
tccagccactccctgcgctggccccgcggataccaagagcagcagtccctcagttcttgccctccagctgctcccactctgttcctaactctgcacctccaaacgtgtgggtggagttttacagtgaacccccttgcagctggatatggccagccagaaacagggaggcttgctttggtcaccagaggtgctgagctcctgcaccagctccatttgcctgtcgccagaggggcgatgtttccaaaaccgtctgagatgcggacgtcatgcctgctactgtaaccaatgcatatctcttctttttctttttttgctgcagccaactgggtacatggaaaactcagtctcctacagcgcaattgaagacgttcagctgctgtcctgggagaatgccccgaagtactgtttacagctcacgattcctgggggaactgtcttactgcaggtaggagaaataaacatgaacaagcagtttcttctccctcatcttcatgcacttgtgcccctcgtttcccttggagggagccagcagctatcaagaggaaaggttgtttaactttgggtgattttattccccaagtataagaaagctgtaaaccaggtctgactggagaaaacgaaaaggactgtgcatggcctgagcgtctcctgcacacctgctgcagtctaggaacttttcaggttgctcatttagtttcccttaataaacctgataaataagttttatgatccccattttacagatgaggaaactgaggcacacaggtgagttgttaggcccaagaaggccgtgaaaagcagatgagcaatagatactgactttttgcattactttgagtgagggagtttctgatatcttgttgatctaagtcttttgaggctgatagaagtataagctatctttttgggaaaaaaagtgcattctgtatgtactggtcaggacgtttggttggaaatggcacaaacattattccaactagtgagacaaaaagagagtttaatgctgttaactattaaattaactattaaagtaactgggaagccttagaggggacttcaggcattgctggatccgggggtcagatgacatcattaatattgggcatctctctctccatctcctggctgtgcttctgtgtgctggcttcattggcagaatctcaccatgtggtaggaaagatgacccacctgcagcccaaagccacatccttagagg

SEQ ID NO: 84369 - DNA, 1036 bp, Homo sapiens
catcatgtcaggggagccagccaattttcagaaggaaccccgagtctgaaacccctcatctagagaaaatttactctcttatcagtgggaagaagacctgccttgctttttcttttgggatcattttattcctaacttgtttttccagggaaaccttctcttagcccaaagagatgctttctaaaaacctattttagatctagcagccactggattgtgtaacagcattgggctgagagtcacccagtctgggctccaaggaatgctgagctcagtagcggagcgtaacaacttagcattgttagaaatgtcctgtttcttactgtcatctctcagaggactctggaaaccacgcctgccccagtctgctttcttcttagtgaatctctcacactctgccctctacgcttttcttttaaccctgtccccacacccccacactgtccctccccccctccccaccacagccagcaaagccttcctcttctttctttctctcctctcatctttatgatagaggtcagtgtcaccctcctgccagacacttctgccagctcctctgcctcttcactcgctccttcttgcccatccgatggctgcagcacagagtccatgaagggggtggtcagtgccagcccccctcggcgggggagatggggcgggcaatcacagggttcagtggccaacggagaggtagggtagccagagattgtcctaccccaatgactttgctgtagtcacagagctttgaggcagcctctcccctgtgctcggggaggccccatgcgtgaagagcccctcagcccctggggagacagagccataaacaaatgattacggaaataatggctaaattagaggcaaccgtggaggactgggagcccagagaaggaggaacttatttggcctggggggccaaagcaggctccccagacagggggcatttgaactgggtgtagagggatgagtagaagtgtgccagaatggtggggtgggggcacactccccgggcagaggggatgtgtgtgcaaagcct

SEQ ID NO: 84370 - DNA, 1034 bp, Homo sapiens
aagcttctgtggaacttccaggcaggcaccgtgggtccattcttggagggtcctaccctccgagaaggaaggcagaatggtggggaggcaaggatgggcgggagtcggccttgatccccttccaggcccagccacctgcctgcttcatccaggttgaaaaggcaggaattctatccagattaatttctggcactcagtcaaagagggctttgtgacctcttaagaggggatcaaagggattcagtggagaactgtgaaaggaggggctttccccagaggcagggggcccagcccactccaagactgcaggaggggccctcagtgggaggtgcagctggtgagtccagcctggcagcctctttgtgcacgtgttcaatccaaatgggaaaccttttggggccaggctgccagtcccccgcgagggccacagtctccagcatctcccagccacagcccaagccccacagtgggtcatcagggaccccataactagtaaccagggctgcttcagggattgaaactaacaagtggcagagggccgggagcattgggaaagagagctcatgtctcgcaggctttcgttacagtagagggagagaaaaacaattactaggcacctactagggtcgggagctctgctggggacttctcaaaatttggttaggcctgtcttgaagcaggagctgaggaagcagagaggcacgtccaggatcacacagctagagacaggcagggctgtgaattgaacccaggggacaggaggaggatgggccttttggcctcttccgttggagcccacagagctgccactttgcccagctggagctatctttggaagagacacaggacgttttcgaaataaacttctcattgaaggataaaatacatctagaaaagggtacaaatcaaaaagagttaccattcacctgggcccctcctccccaccatgggcagccactgctatcctgacttctagcagcacaggtgagctttgcatatacttgaactttatctaaatggactcagacaccctg

SEQ ID NO: 84371 - DNA, 1125 bp, Homo sapiens
gtgaacatgggtgtgcaaatgcacttttaaatataccggcgctcaaaaaagtcctgatgcataggttctgcctgcccccaacaccagtctgatgggattgtcctgaggttggactccgttattggaattctaagccccttgggtggttttaatgtgtagccagggtcaagaaccctgcctgatagagtcatttggggcacacctcagcacagggcccagtacataggaagcccggggatgttagctggtgtgatggtggctgctggtgtcggctgatgtacagctttgtgtgagaggacagcttggggccggaatcctcccccatggctcctctttgccagggaccctgtgcgagccccatgctgacgtccctacccgaattctcctggaagttcctcctgtagcctcctgggtccccaggtggctccctctgacctcactgatgatgcaggtgcccaggtgtgccgtttctgacgcagggcagggccagggcttatgcaatcgggtaatgggctggaggcgggccttagggtggaagtcagtgtttctgtcccctgctgcagcaagagcaggataggacatcaggcccccccccccccaattccccagggaaagaaaacccaaccaattccaaacccagctcccactttctcaaccacagttgcagagggccctgctgccttctgtgaaatgatggggctggacggctcagctcgagtcaccgcagtaagatggcagactgactgggaccaggcgtcctggggtcagtccttgcttgctccttacagctgtctgggcttccaacagctgctatgacaaatttccgtaaactgtgttgcttaaaacaacagaaatttgttctcacacaattctggggccagatgtccaaaatcaaggtgtcagcagggccacattgcttctgagactctaggggagggccttttccttgcctcacccagcttctgatggtgtccggctatccttgatgcgccttggcatccaggctctgcctccatacgtggaggtctctctggagcatgtgtgtgtgtgtgtgtgtgtgtgtgtgtgtgtctctctctctctccacatggcctttttataacgacgccagtcactggatttagg

SEQ ID NO: 84372 - DNA, 1050 bp, Homo sapiens
gctggctggtggggcttgggctcggatgtggggagccctcctgagttctacctccctggactactcctttacagaacttggtaggtgaaaacaatcagagctgctgtttagccaggaactgagctaagtgttttatatattatctcatgaaatagtcacagcaagcctttgacagtagttattcttatcctgatttgcagacaaggaaactggtgcaagtaatagactgtaagtttcatgagcaccggggcttgtctgctttgttcaccatggttatccttagtacttaacatagtgcttggcacgtcatagtagatcttcatgggatgattggatggaagggtgaatagatcgatgagtgagtgatggaagtatggatggtagatgggtgatgaatggatgatgaggtgggtgaaggatggatgggtgggtgggtggatagttgggtgggtggatagttgagagggtaggtgaatggttggatggataagtagatggatgaatgaatgagtggatggattaatggatggatgggtgggcgggtgggtggatggatggatggatggatggatggatgggtgggtggttgggcagatggatggatgtgtgggtgaatggtaggtgggtgagtagatgatggatgggtggatggatgaagtagagcttagatttgatctggagtctgctcgtgaagcctatacgcttcgccactgagccatactacctttggttttgtctgatgactacctccctaggatagcatttttaaaaaatagcattattgaaatggaatccacataccataaaattcacccactgtgagtacacaattcagtgatcttagtaaatttataaagttgtacagtcatcaccacaattcagttttagagcatttccaccatcttgaaagatgccctcatgcttgtttgcagtctcattcctgttctgtgccccaggcaatgaatgttccactttctgtctctgtgaaattgcctttctagacatttcacataagagaaatcatacactatgtctttcttatctggcttc

SEQ ID NO: 84373 - DNA, 1164 bp, Homo sapiens
ggtggtgagggcactggcttgagagcccgagcacatgtttctgtctcagctctgccaactctagagccctgggcagattttctaacctcttgtgtacctcggtttcttcatccttttagcaaaaacaaaaacaaaaaaacaggaaaaaagaaaaaggtaatctatcaaggattatcatcagggtgaagtgagcctgtgtgggaaatgagtctagtgtcaggaggcctggctgcaaatgcaccccgtgactttggatgagacccttcctctctcggggtgtcagtttccttataaacggggactgggccaagttgtcagtttctcagggccctttacaccctaacccatctgattctttgattgtcttccatcttctgccttccttacgtgagtaacatgttgctgtctctttatctctttcaaccagaaaaagatttacaaatataagaaagtgctgagtaacccaagccgctgggaagttgtcttgaaagagatccggaccctggtggacatggccctgacatcccccctgcaggatgactccatcaaccaggccccactggaaatcgtctcgaaactgctctcagaggtaaaacccctcccctggacccctttacattgtttgcctttccctccaccgatcaccggctccatgccaagcagcaggcgcaggcagagctccgtgtgggctgtgttgttgccctgctgccgaaggaggtgagcagttgcccacccagccgtgtgtgggagttgggagagggaggcttgccccagctgcttgcagctgtgctgtctggggattgtaggcaccgaagaggaggtgttgccccgtgcagtgagagccagtagtcccatccccatctctgtcttcccctagcagtggcccacatgagctccaggggtccagggggattcagctttctgccctcgtcaccccacaaagcctgtagatgtgctctgtttaatttaaacaccattttaaaaatcaggagatttcacagtacagtgggaatttccaggttctctttaaaaacaatcagaaaatccagccgcggtttgcagctggtgctacctgatgccacccgtcggctgggcctcctgtgccatctgctttgctggcctcctcgcatattgaatgtgtgctttgtgccaggcaccatctgg

SEQ ID NO: 84374 - DNA, 1002 bp, Homo sapiens
agcaaagacaagccccctacccccctggagcttgtgtcccggcaggggagacaggcagtgaacaatgaaactcatcagcgagtctgtcccgctgttggttaggcagaaggcgcttcggaaatgtgcttctttctgttttctgtttcaggtgctattctaggcgctttacaaatattaatactgctctcgtttatttgctcacctggccctctgggaacactggagttgatgactcctgatttaaactgtgcacagccaccagactgatgcttctgtccccctcccctgacagtgatacccccggtcctgagtctcccccgtcaagctcccatgcaagtgcctggctgcctggagccctcccctttctctgcaggcccacactggccgctgcccgtgggacggggcctggcaccggccctccgtgtctgtggagtagagaaggtccctcactccaggaggaggcgaggtgggaggtagaaagtaggtggcagtgacagtctcaggcagagggacagaggtcagaggtgttgtcctcagttgggagaccagcatcgttccaagaggagtaaaaacccaggctgggaaatgaatcacagagtggctggaattctgagcctgggtgctggatgtccagctccaggtgcagacttctcatctggagaaggggtccctgctcacctgtagtaagccaggcaggtgccaggtgccacccaatctggagtgcagtggcgtgacggctcactgcaacctccgcctcctgggttcaagccgttctcctgccacagcctcccaagtagctgagattacaggcgtgcgccaccatgcccagctaatttttgtatttttagtagagacaaggtttcaccgtgttggccaggctggtcttgaactcctgacttcaaatggtccatctgccttggcctcccaaagtgagacagcctctcttttaaaactcacattctctctgaaagatgggcctttctgtcttcacttcacagatga

SEQ ID NO: 84375 - DNA, 1060 bp, Homo sapiens
atcaggaaaagagtatttcatcccatcccagtgccctctttagaaacaccttgttttcaggtggtgacaaacccacacagacagatacggttgtggatttttgggggattttttcttttctttttttttctgcttttaatatgaatgatgtgatgcaggatgtgttgctctgcatttatttttttcacttcacaatatggcctggagattgttcgaagtctttccgtggctatctaccccacggttcctgatgcttgtttgttgtgtttcaggcaatcgctcctttgctggaaaacaaccacccaccaccagatctctgtgaattcttttgcaaggtacgggattgctgagctggggctgtggctgcaggaagtaacctccctctgtgcgcataccagggattgggtttgcacagaaaggccaaaaacctgggccccaccgtcttgggtcacggtcccagacacaggcggagagggcatgcccggcacccattcttagggctacacccacgtctctgccagacaggtgacaaagagtcacaaggggaacatcttgcttttccttggaatcacttcccggctgtcttaggagacaggttgctgcagatttcctgggctcatgacgtcagagctgggttattattagccaaggttcctctgcgcagtggctggcccacggtggggtgcggctgtggggctttccctgaacacgggaggcagcacggtgctccaggttagcttagaggagctgtggagcagggcatccgctgccgggcacccggcgccagccttgcagtgggattcacataggacatgtccagggcacatctttgtggctcaggccgaaccatcacacaaacctgttttgttctttgctgtgtggtttttttagtgtaataattttatgtccttggagagacatgttctcagcactcccctgtcatacccctgctgccccgctcagctggtcctcatccctccccgctcccattacctgcctcctgccacggtcacccgctgtcctttggagaggcgtgggctgtgtccagcagtgggaccag

SEQ ID NO: 84376 - DNA, 1048 bp, Homo sapiens
caggcgctgcagacgaggtttgctgtcaactgcatttccattttctggaaaccatgagtcagggacaggtgggaggaaaggaggaaggtgattcttctggagggaagacaagctagctgcaaaaacagatgacccctcagaagggagcatgtgaatacgggggcataaaggggtctccatgtcctgacatgcacacgacaggcctcaggctcctgcagctctgagaaccccaggctgcacctgggccttccgcactcaagcactgcagtccagaggacctgctgtcagtcctcatctgcctcccaggcgtggagttcagcttcctcaccggcaccctctgccctcacataccgctctggagattaagtgagcaagtcgggtaggcagtgagtaagcggtcgctggcatcactgtcaggacttatctcaggcaacaggctttcctggtcattcttttctccgcgtctggcatcggagcctttcctcagaagcttccagggtatgattggggttctgaaggctgccactctatcgtgggcttatttggaggaaggtggggcaggaaaagccctcactcaggggttatctaaaccgcctgttgtcgatgggagtgaacatttgtacttggtgaaaaaaacatctcctcccgtttctatgtaaggcacagttagacacacagcacgcaaaccgatacacagtgtatctgtggtgagtcgtatgtgggtaggggtcccgggaccacccctctgcccagcccgggtctgagcaccccctggcctctcccgtgggtggtgcccaggtgtcagcggggcatctctctgcagcgcctccccaacacagaccactggacaagggttcagatcccacctcctgccccagtgcaagccaggatcgaagtcagcatcccactcgatcttggcacctggtggcacttgctagtcccccagatggagactcaacatcccttctgctctgaagccggtcacaggccccaggctctgtcattggcccggtcccagtgtgcactgggccttgtgttcagcagtccc

SEQ ID NO: 84377 - DNA, 1015 bp, Homo sapiens
acctggccagaaacagaccctctgcctctctcttgccggcccctagcaccatattgaattgatcactggaaactagagagaacgctgtctggtggataatggcctgaagagaaggctttgtcaaaataaccaggccctgaaatgcctccaggtctctttcaagaggttggaaggagcaagcctcgggaggcagctggggctctcgaaggagccgattaccaagcgtgtttaggaaatgctgcctctgtaagggcacattacacgcagtaattgccccatgtgctggcctggccagtccccgagggtccccagtacttgaggccggagaaatccacctcctaagaggcgctcagtctcagcagagtcgtgacgtcattggcctcagtccccgtccccataggcctgggcgctcttggctgtggcaactgtcttagaagaatggtcccccatggccgctgatgtgtgcagtaatgagtgccgcccgccttaatcgtggaacaattaatgaacacacctgggtctccggagcccacatgcacccacacatgctcaggcagcagcttagcccctcttattcacaggtgtgggcacagggaactttcgggaatggggggcccagtgtgttcatgttgctctgatctgccgcctcctcaaagaaggcctttgttttggagctttgagtggggacaaaatgttggcatttcactcacattcctcttcattctttgaatcagacataaagtctagacgtccccagaggttaatcttgggaacattgtgctgtttccgacgcttctgttaaccgccgtgttttcccctgtttttgttgcagagctctcgcacatgagaagttcaccaagtgagtgtctgggcaccgccctcattccattctggcacgcacggcctctgtcctgaggtcttccctccgtggcccatgcattctgggaggcagtggtggctcctcttggcagttctcttgagacacgtgtccctgatccaccgccttgcccagctc

SEQ ID NO: 84378 - DNA, 1612 bp, Homo sapiens
gctctgagccattccgtgagtttgagcacctacttcatgacagccactggggaaggaactggggagagagaggtgtcttaacttctggcctttccaccagtgctcaggggcctgcaaacatcccccgggggcctgccccatgtccagacaccgcacggtaagcagatgcctgggagactcccatgtccattgacatttgaacctggagaacctcagtgcgtggtcactggtgctaccattgtacaagcaggaagttgggcaggtgatttgcccaggcttacacagccggggctgcagaaaggggatagtggggttgctggttttcaaaacaaggcccttggggtgcacagagtgtgctgagctagggtggcaggccgggtccgtaatgcacccctgcggttctggacagatcctgtgcttgatgctggaatacaacatcatcgacaacaacgacacccaactgcagatcatctcaaccctggagagcacagacgtggggaagcgcatgtacgagcagctgtgtgaccggcagcgggagctgaaggagctggtgagtccccggctgctccggaccactcccctgcccagcaggccagggggggccagggcgggatgcggggcagctagtacttggacctgagtggacctcaatctcgttgaattctcctccaaaccccagaaattggtattaccacctgccacttttcaggtaatcaaagagaagcaaagcaatccccagagtcacacagctcattggggcctggccaggacattgcccaccctccctcctccatgtcccttagacccttccatttcagtacatgggggacccaacttccaaatgccagcacccacacctctttgctgaaggactttgtatgtccacatgcatatactcacacatgtgtacacagaaggacggaaggggcaggaaattcatgccttctgatctcctggagcagccctcaaccagtcccttctggggagagtgtgtagaaataccccagctccctcaccccttcagtgagatatgtttgagacatggcttctccaccatttcttagagtcccccggtgggatttggtgccagtacccacccagtgatagctggattgataacaccccttccattataggtagccacagtgtcacttccccactctcccactggtgtttcttgggatcaccctccagtaaaccacctgtgctcaaacctcatctccgggtttgcccctgagaccaagaccaccgtgttgccttgtaccaccaagaaaataacgatggctccatgagtgttgttaacagaggtggaagtctagaatggaaacttggggaaaagaatggttgtaaccagcctggtttctgttgcagcaaaggaaaggcgggcccaccaggctaacactgccctccaagtccacagtgagttggtttggttctctttggggctggatggagaaggtgggttggtcctctctgttggggaacggcaggtggtgtctgctgctgagatgggaggtgatggagggcggggcacaaggaccccctagtacttaacacgccagctcttccaggaggtagctgggttacaggaagagaaatgaaaaccaaaaag

SEQ ID NO: 84379 - DNA, 1050 bp, Homo sapiens
actctgcacagggcagatgaaggggccttcactgcacacctgtgaagtgcaggttctaccctcaccctaattttccagaggagaaactggggacagtccctgcagcctgcccccggcccagccctgtccttccactgtccacccagcaggagaaagccacctaggcagcatctcgaagctagggagagacaagttcaaagccctccttcatggaggcaaaactgactccaagggggccctggcctggctccactcccaacagcagaagctggattctaacccggttcagagaggcgtgggattgtttaggggacgtgaacgcagcccagaccccagggcttggtgggccatgggcctcagagccaggctctgtccccatccctttcctccacctctgccccagcctcagagtcacttccccaggagtggccgggagagggctgagagtttctgtgctctacagtttggagacgctggccttcggctcctgtcggaacacctcaccatgctccaggtgctgaacctgtgcgagaccccggtcacagacgctggcctgctggccctgagctgtgagtgcctccggggcagctggggggtgaggggccgcttgattcattccttccttgcttcagccaaactggccaagcactgactttgcaccatgcacagatagagaaattcgttcattcacaaacgtgttcactgcacacctgctgtggaccaggcaccattccatgtgccaggaacaacacagggaaaaatatccctaacctcagagagcttatattctagaggcaatagaaaaaatgagtaaggccagcccatagcctcttgacactcacagtccactgaggggtcgagttcaaggacggggctgtagtacattgccactgtggtcccctgaccagtggtggcagcgtcttctgggggctggtcagaaatgtacattcccaagcccactccagacctcctgactcagacaccgtacggtaagcagatgcctgggaggctcccgtgcccgttgacatttgagaagccctgtcataatag

SEQ ID NO: 84380 - DNA, 1050 bp, Homo sapiens
agattcctggtccctgctgcggccctgctcagcgtctctgggagtgggtggaggggtctgccccccgtgcgactccaacacaaaccagaggttgaggcttgctttcaagaagcagcaccgagtcaatgacgacggggggaccatccggggttcccttagtggggaggcctcgggcctgatctggggtgtggcaggcaagctctggggacatcaggtccaggcagtgggggcacacgacagagggaccagaagggagggaggctcagagggtgggaagaaaacgaaggctctgttcagaccagcacgtgcctgaaatagactttcggtgtctagtgggccacctaccctggctgtgtctacgaaacctccctccccagccccatctcctaacagggggcctggcacctgcattgagctcctccagcttggccatcccataccttcatacctttggggcctcgctctcctaacaactgtatctgtctcttgtgcagccatgaagagtctctgcagtttaaacatgaacagcaccaagctctcagctgacacctacgaagatctgaaggtaattccctccttcctccccactctcctcccctccttcttctagccagcatctggatgctggtgcatctcctgcacagagctcgttctccagtaaaggatgatgacatctacagatcaatacataaaataatggcagatcaaaaagagtgacaaagaggaagcagcagggaagtaattggaaataggaaggcctgtgtggcctggggtgatcagggatggtgcctttgatgaagaggccgcaggagctgagacccaaaacataagaagccagaaataccaagggcgagaggaaaagcaagtgccaaggtcctgagacagaagagatgggcgaggcctggctttgcagcaaatgtaaccaggaactgagagagggaatgggctggggccggatggaaaaagccctcacaggtcacagcagagcagcgagtcatgcttttcaaagcatgctctggctgttaggaaataaatattttgagagggagc

SEQ ID NO: 84381 - DNA, 1047 bp, Homo sapiens
tcgtgtttgagaaatgctgcctggattatcttgagttcaaagtgctgaaagtcagatgctactgtgagaccaagctggaaagagaacatggggagtgcaggaaaggccccttgggaagaaaaatcactttcagtcgatttttttattttcacacatttgagagagacatggtgccaacttaatgctgccagcctgtgaccggcctccctgtggaggggactcgagcaaacagcagctgcctgtcctttggaggaggggcctctgctcagtgccaggcaggccacgccccactgttcactgcccagtctggccagaccttcccatttttcaagagaaccttgaaatctagattcgtctgtgaagtctcctaattttgaaaggctggcttagtatgctttatagcactgcaggtggctgcaggtccccacctgtaacctctgcctgggcagtggggagccattgagggttgttgagcacaggagagcagcagcgaggaattgcatgtgcatgtgtgtatgtgtgtgtgttcatgcatacatacgtgtacatgtatccaaaaagtgtgctggccagtgtacaggaaagttgggagggaggatgtaaaggcatgaggccagttaggaggcagctacctctctgtatagtggaggcttgttaagaaaaaaagccaactgttcataaagaaaagtggaagtctgggtagcagaaacagaaagcagaaaacaatggagagacatagcaggtggaatcacagagtcgagtaatgcatccagcctagggggagcctcaagtgggaagaatctaagccaaaccctgggtacctgggatttcctgggatccacgtcactcaccctgtccattctctgataacgatgagaatatcactaacagtaaaaatgagaacaatttcctttcatagggcatatacggtgccctgggctttctacatttggtatttaacccctagcaccatcctttgagccagggactagagtcagatgggcccacagaggaagaaactgaggcccctagaggctgggttatctg

SEQ ID NO: 84382 - DNA, 1037 bp, Homo sapiens
tttgtgtttgatgccgtcgtgtgggaaaagtcaactccgatgccaccattgcgggccggacgaaggatgctttcttcctagaggctccgagctgagctgcgaactcgccccccgcccttgggacaagaagacccagtcacatcactgcacccgtcctgtgtcctcaccattgctatgcaaagtgattcttgttgtacataagatttaaataatgcacctatttaagacatgttgacaaattgcgggtctgggacccgcctcttatttatgaagtctttgaccgtcccccccgcccgaccccaccgccctcccgcccccacctggcgtgtagtactgtataaaccagtcagctgtcgggttagtggtagtattattgttatttttttaaaggaaacaaacagacaacaaaaagaagaaaaaaaaaaagaacctccttggaaaaattaattgctttttcgtaatggattctctatgctaatgctctctcgtctgtctgtctgtctgcccactcccccacccaccactgtgcgtttctgatttccaaatgtctccaactccctcacgaggtggggctcaggctggaggaggagggattaagatccccttgctccactaaggcccaagctctttctctcggcaccttttagacttgaatgggaggctgctaacccgccctctccagtccaccccggtaaaagagctgttccccacccccagggagctcctgtccctgtcagcctttgctgtcccctgtccccaacggagactctgtcacccctgggctccccctgccatcgtgtgcttcacgtggccccatgcatgcccgcctctctgcatggtctcttgggaaaagagagatgtgtcgcctccgccagtccgactgccctccccaccccacccccgccaccccccacatgtgaccactgcaacgaagacactccttctgtccccacctgctccgaagacaaaccaacctccgtttcttttataaacagtcggctttttcttaataagccctcactgtacagaacagcccg

SEQ ID NO: 84383 - DNA, 1051 bp, Homo sapiens
aggttttactgcaaacaacttttggggacccctcccctctcaaataatctcagacagatccaagatgtttttttttttttccagagcagcacaaagagagagccagacaggcctggggttccatcccagatccaccatttgcaggctgtgtgattttgggcaaattccttaacttcgctgagccttctcttttcctgtgttaactagggaagatgagactagactctccagtgtgtatgcaaagcacccttacgctgcagagatgctgcaaatagggagtgtcttttttttcttcctttttcaattttatcctctgtgcttgccctagagcttgttatcaatttctcttagctttgtcaattgtggtggggtgtgggggattgagatttggctttcctgggaagatgttccaaaactgtctttgaaataatactctcctcctctgcagatcagtggacagggtgttgaagggtcggcataggtggtaagcatgattgatggcccccagagatgtccatgtcctgctccccggaacctgtgggtatgtcatgttacttggtaaagaggaccttgcagatgaaattaagtgaagaaggttgagatgggagagtattctgggttacccaggtggatccagtgtgttcacagggtccttttaagaaaaaggcggggctgggggcagtggctcatgcctgtaatcccagcactttgggaggccgaggcgggtggatcacctgaggtcagcagttcgagaccagcctggccaatatggcgaaaccccgtctccactaaaagtgcaaaaattaactgggcatggtggcgtgtacctgtaatcccagctactcagaaggctgaggcaggagaatcgcttgaacccgggaggtgaaggttgtagtgagtgaaccgagttcatgccgctgcactccagcctgggagacaagagcgagactccatctcaaaaaaaaaaaaaaaaaaaagaaaaaggcaggagatcagagtgagtagaagacaatggcaagatgatggcaacagaggttggaatgatgtgctt

SEQ ID NO: 84384 - DNA, 1062 bp, Homo sapiens
taggtagaatttaatcatattgtcacgtttccactgattttattattttgcagttcctattgtatatggtgagtgttactggttttctttttgccaaaaacataaaatcactcttaacatacatcagttcaggtgaaaacggtgagttgatttaaagaaaactatcacataaatagtatcagcagtaggcagatacaacaaaccttataaggttgataaacaaatgtttgcagtttgagaaataatgtcatatggctccaaaccaccccccaaaactggtcaatccatgtgtgaggaaaaaaaaaaatctctatatagtctttgtataatgagagttttctgtgtaattttgatacacagtactggtttaaagaaaagcagaattagcctattaaaatattaataggctgtatataaagtaatgagcccttcctttattgccttaataatttttgttatatttgcataccatgagtactattttatatctaatacttattttaatattgattcactatttttaaacttaattttatatagaaaagaaacttgatttcatagtttagaggtgccaggtatgtattttttcaatatattttaaaatatactacagttaagacataacaaagggtgggcaccatttaaatttaattaccagcaggagggtgaaaaacaccaagtttaaatggcaccaaaatgatgaacatttaggctgggcatggtggctcatgcctgtaatcccaacacttggggaaaccaaaatgggaggatcacttgaggccagggatttgagaccagcctaggcaacatagtgagaccttgtctctactaaaaagagaaaacttaggtaggtgtgatggtgcatgcctgtagtcccagtcacctggctttgggaggctgaggcaggagggtcccttgagcctacgagttcaaggatgcagtgagctgtgattgtgccactgcactccagcctgggtgacagggcatgaccttgtctccaaaaaaacttaaagaattatttgatggcccatgctgggggtgttagtggtgagcacataaagc

SEQ ID NO: 84385 - DNA, 1037 bp, Homo sapiens
agggattcccttgtttcctaacccacagccctaggttgagctcccaggaaacatgatctgagacgcaggtttgtgtgcaggaggcttactagggagtgcagggtcatcaccctgggggaaggaaggcagctggaacaggcagctggggagtcacaaccatggcctgggcacacctgatggggagctctgagcatggcctgtggagctgtcctgaattgagactagagggccaggcctttgttcccttgcgtggactgggtcagagctggctgccttggaaggggctttgacctgggcgaggcactctctgtaggggatggcaggttgcagagaggggtgaagctgagccgttggcttcctcccctgcagcgatgggggctcagcctgcctgtgctggttttggtcgggctgtgcagcacgacacacacacatccagaggtgggagtgagggaggggctcgcctagggagaaagcgggtgaggctgtcccagagctaggagcccaaagaagctctcagcctccagtgtttacattgtaaggggaggcctttggaccaggtgggctcccatgtcccaggtgcttggatgctcaagcccctggttcctgggttttctccacttgttcttgagcagctgctctggcaccccaggcccctcagtctctctgttcctggacatgggatggttcctttgccctgctgctgtctgggctcctggggggccctggcctcttccttgctcccaggatgggctccactggggcaccagcatgagaggacgctggcctctcccttgctcccaggatgagctccactggggcagcagcgtgagaggacgctggcctctcccttgctcccaggatgggctccactgggcaccagcatgagaggacgctggcctctcccttgctcccagggtgagctccaactggggcaccagcatgagaggacgctggcctctcccttgctcccaggatgagctccactggggcaccagcatgagaggacgctggcctctccctttctcccaggatgggct

SEQ ID NO: 84386 - DNA, 1027 bp, Homo sapiens
tttcaaaagccatgacactgaaacaatgtggtcatagctgtctcttcagcatgccaataaaatagcatgccatttctgaaacaaaaattattctataaatagcatggagccattcttacggtggacatcaaaaatcatgtggtcacttttttcatatttacaggaaataggagcacacaaagatgagctcagctttgaacagttccatctcttctataaaaaacttatgtttgaacagcaaaaatcggtaagatgattcttgagcaagtgatcaagtgatgtttctgttttccatgtatttccaagtctggcatgttcctaagaaacccacaagaagtgttgaatctccattttagtcaaggaaacataaatgagaatgatgaaagcataccattttcatccattagattggcaaaattctttaaccatgacagagctgtgggcaaaatgtagagaaatggtgttcatatgccttcctggtggaaatgcgaatggccataagtttgattggaatttgatctgagtctgttaaaaaagtgcaactcactctactgcattatttcattctgaaaggaaatttagcaaatggctgttattattaatagccatctccagattgaggaattatatatatgtttcttctttttacacgtttgtttgtttgttttgagatagagtctcactctgttgcccaggctggagtgcagtggtgtgatcttggttcactgcaacctttgcctcccgggttcaagcgattcttgtgccttagcctccccagtagctgggattgcagacgtgcgccaccacgcccagctaattttgtatttttagtagagatggggttttgccgcattgggtgggcaggtctcgaacttctaacctcaactgatcggcccgcctccacttcctaaagtgctgggattacaggtgtgagccactgtgcccagccctttatatacttttattcatattttttatgagggcatattttttgattaaaataatagactatttaaaaattaagagg

SEQ ID NO: 84387 - DNA, 1012 bp, Homo sapiens
agaaaggaaacagggttatttgaggttgcagaataatatgtaaagcttgaaacacagcaaaaaattgtgagatgtacgtaaatgttataatatgatatgataccattaaatgaatatccctaaaacaaattctagaaggaaacctatgaaatgcttaagggtgactgcttcttgggaatacgactgtggagggaatgaggagggcttctaccttttgcttcttaagtttctgttatatttgaatatttacaactaacatcaactaaaatgatatttttaatgatcttgttgcatctgacaaaatgatgcttttttaacaacaaaaatctttccgtttttgcattaagtgacttgtctaaggttcttttttttgtgtgtgctttccatttcagattctcgatgaattcaaaaaggattcgtccgtgttcatcctggggtgaggcagctcttgtgtgtcgttcggggcggctgtgccggacctcggtgcctggtgcccagccggcctccaggaggggatgcctgtgtgtgcaggcgctgacctccaaaggggcagggggcccctgctggggaattggccatcccatgcctgtggcgtggatagagatgagcagtagcaacaggaaggtgtggagcactgggaggatggtccagaaagttctgtagaaaagcctgtgtgcctcagggcctcctttccccgaatgtgcctcatgagatgtgacaggttaatagtttttttttttaattacaaaaactaatgttaatgatcaaataagtgaaaaattccttgttaaacaggtttaactgaattaaaatgagttcaggtgtataaactgcttcacatgatgcttggcacccatgaggggctgatagatagtaatattattactaaaaagtcagagttgcaggacttatcaggacattcactgtgcctcatgatttcccaagtggggaatttctgagatgttatgtgtttccccagcctatctgactgggagaaatgttggccctggag

SEQ ID NO: 84388 - DNA, 2436 bp, Homo sapiens
cccgccaccacgcccagctaattttttgtgtttttagtagagacggggtttcaccgtgttagccaggatggtctcgatctcctgacctcatgatccgcccacctcggcctcccaaagtgctaggattacaggcatgagccaccacgcccggcctagtattttaataaaatatcccacaatttgggtttcatgttctagtattcaaagattctgacacctctgtattcaaatgagcttgtagtttcccaccttcctagctgttttgggcccctgatccaggcatatttgcaagagtcaacagcagttcatttttgtcttgcacccatgcatgtcaccagcctgctggtcaccacctgatttgtgtctgttcttctatttttcattgtttcggacattgcatccagcccttcccatctaagcacacacacatctggtcgcatatttgcttctattagtcataaagataaagttgttagaatatttgaagtgaagaaagcattgatcaaagttgaatttacatgtcatatttcatccccttttcctatgaatatttgggatttcagggcatggagaggaaagcaacagttacttaatattatgcattctttttttaaagggtttctagaatgtctaggactgtgcagcagctgctttggaactggtcatgtatatttcagacgttatcagtgtttcagcagccctgtttgcctattcttttgaaaagagggcatatgattacattccatatcagtttcgttatttggagctgagactctgcagtttacaagctgtgtgagcttaggatcatgaggtattgttcctgggcctctgtttccttttctgtaaaatgacaatggcaataaatgacttgcggagttgtgtggactaagtgagatgaccataggaggaagaaagatgcttgtttgcacaagctgccacggtcagagtactttctttttttttgagacagagtttcactctgttgtccaggctggagtgcaatggtacaacctcggttcattgcaacctccgcctcttgggttcaagcaattctcttgcctcagcctcctgagtagctgggattacaggcacctgccaccacgccaagctgatttaaagaaaaaaaaaatgtttgtattttagtagagatggggtttcaccatgttggccaggctggtctcaaactcctgagctcaggcagtccacccgcctcggcctaccaaagtgggtctgagcactttctgtgcaccaggtgctgcattaggcacataacctaataagattttatacaatgcttcatacagtgtacatttcatacaatgcttcacagaaactgtgtggtagatactcttattcccacttcatggatggggaggcacagagacggtatgtaacttgcccaaggtcaactaggtggaatgagatgccaacccaggtaagtgacctggaaggctgatgtaactactatgcccccaggctgcttcatactaacaaacgtaaagagctatcatagggcaggagctggcaaaccatgacctatggaccaaatatagctgaccacttgtttttataaacaaaatattgttggaatacaaccatgcccatttgcctacggatcatctgtggctgcttttgcaacacaacagcggagttgagtggttgcgacagacaccgtatggctcagagagcccaaaatatttacctctggctctctgcagagaacatttgctgacccctggcagagggccatgtgcagaatgaggcctcaacatgtggtggtcgattgcaagtgaattcggaattggttgatgtttcagtcttcgattgcgactggatggaccctgggaaatgaagaattttatcagttctcactttgctgatctctcgttctctttgtcattttaaggagcattgggctcaggatctgaacaaagtccgtgagcggatgacaaagttcattgatgacaccatgcgtgaaactgctgagcctttcttgtttgtggatgaggtgagtaggctgggcttgttgtcgcttgggggtgactttttgattgatgtctgtgctttctgaggtttattttctgtttgtctttccttggagaactttgctgtatgatgttgcctcgactgactggttagctgggattgtttcttttcttttcttttcttttttctcccaggttctagattactgtaactgtaactgcccagtgggttcattttgcctgctgcctagacagaaccgattgatcaaggcaggggaattgcaatagggaaagagcttaactcacttagagccagctgaatgggagactggagttttattattactcaaatcatcctccctttcagaggctggagtttcgtttttttatgtttttgtttgtttgcttgtgtgtttgtttttgagatggagtctcagtctgtcacccagcc

SEQ ID NO: 84389 - DNA, 1786 bp, Homo sapiens
cctctcacattaacgtcatgcatgacaataaaacagtgaccaaagctaagaacttaaccctggtactttacaataaaaccagagactaaatttcatcgggggaaaaaaaaaagaagtcattaagccacaaataaatattgaacgtaaggtctccagacaaactggctgggaaatcctgaaagttttaaaaggtagatggaatagaaaagaaaatgatgaggagttgtacctaccttagactcatggatctaaaaagtccaaaaagaagctcaaataccaaaagaagctcaaaatgcatcgatattttaaaaaagaaatgccttgtaaggaattgaattcagagaattcgccataaatgtctatgaaactgggaaaagcacatccatagtagatgctggggtgacgccctgcagggctcctgggctccacagttgatgaggtagaggacttggggggcactaataccagtttcactttctagaaatggactcggcactactgcgccattgccgatgccaagctgtccttcagtgatgacattgaacagactatggaggaggaagtgccccaggtagggggacaccctagccacatagggaggaggtccccaggaaccccgaggaccagccagtccccgggacctccttcccatgtggcttctctggccggctggcaaggggatgctccgctgaagaagctgttgatactctgggtaccatgtcctggctggcttgtctctgattggctggctgccccaggtgctttaaccagtgaggttcaagatgctttcctgctctctaaagtgcctgattggccttagatggaggccggtgctctggcttggtcccatgctttcctgttgccctctcctccagctgtggtcatctttcccgctgtttatttctgcagcccccagggcctcatggctctcagacttcccatagaacagaatggagggctttgctgggaaccgttcactgcatgtctcaggatgccaggaggccaccataaatgagggctctcaggagtgggaggcaggcagaggagggtagcaggtgctgttttcccataccccttcgggtggggaccagctgaggctggcctctctatgttatctggtaccctgggtcagggtgagacagaaggacctgtctagtgatgctggggtttggtccaaggctttcagaaacccctcctctctttgcggcccaggatataccccctacagaactacattttggggagaaatggttccacaagaaggtggagaagaggacgagtgccgagaagttgctgcaggaatactgcatggagacggggggcaaggatggcaccttcctggttcgggagagcgagaccttccccaatgactacaccctgtccttctggtaatgcccccgacccagggaacgcctaccttcttctccatgccaaccgatgaggcagggtggcgagtggttctagctcaggcaggaattgggcaggctgggacctgaatcccaggcttcatttgtctagctcttctaggccgggacaagggtgaggtgggtatgactcacttcggcactgtaacccagattaatgagatttcagggcaatcttttaaaaaatcaaaagtaatgcaaaaaagtctgtgatgaacaaaatatgaacattttaaacaaagacaagatctgaccctactcttagatgatgtggtctcactcactttccccgatcccagccctggagtgggtcatgtggctctggatgattcagccaaccttctagcatctctgtctcctcc

SEQ ID NO: 84390 - DNA, 1026 bp, Homo sapiens
tggattttttctgcttcatgtttcaaacagatgaaggaatgaaagacttgtttctttttttttttaaaaaaagtcactgttttgctagttgagtcaccgaagacaagatttaataattttgaggtgggggggattggcaaacattttctgtgaaggaccacagagtgaatattttaggttttgcaggccatatggtctctgttgcagctacacaactctgctgttacagtgtgaaaacagtcccagacaatgtataaacaaatgaactgtagctgtgtttcaataaagctttatttataaaagcaggtggtgggacacatttggcctactcttgacctagttccctaggaagctcctaaagtcaagtcctgtagttggggaggagaggaagggtaagaggagctgttgagtcactcggccatatttcttctgagacacagattcttctagatctgttttgaaaatacccacatcattgttttcttattgtcttgtattccataggaggactataccctgtttatttacccacttctctaaggctggataactaggttgtatctaatcagtagggtttgtgtaaaaattgtttggccaccaggatcttggcatgtcaaccctgtgttcttcctgctccagggctaggggcaaggtaaagcattgtcgcatcaaccgggacggccggcactttgtgctggggacctccgcctattttgagagtctggtggagctcgtcagttactacgagaagcattcactctaccgaaagatgagactgcgctaccccgtgacccccgagctcctggagcgctacaatatggtaggtggtggactcccttgtgatttggtgggatttcttgtctgaggttgtaactcatctgttcatgaattcagcaaacctctgagtattcaccatgtatctgatactgctgtaggtcctggggatacaaattgagcacaacaaagaccctgccgttgtgctgcttatagtgtagtgttggggagatgcaacaaatgacatttaaa

SEQ ID NO: 84391 - DNA, 1065 bp, Homo sapiens
taaacattttgtaaaaatgccaagttgcttagctatattttaaatatttttaaaatgaacatgtattgttttagtaatttgtaaaaaatatttatgatgagtgtaaaaagcattttctaattggtcaaccaaaaagatattcagtgtttcttttgatcaagacgaacacatgtctataactaaagtggacaagagggtatttttttcaggttctctcatgcattttaatgtttgtttttttttcctgcatcttaagtgtccctctcctttctcttataaggatactcatacttgttggatgttggaattgccctaaatccaggataatctcatattgagatccttaacctaagtacatctgcaacgaccctataaggtcccattcacaggtactggtgacctgacacatcttttcggaggaccctactgaatctactgcatcccttgagtagtcatctgtgatgtgtacttaccccgatggaaagtagacgtccccatcagtgctaaccgtggtcatagcagtggtggttggtccatgagagaaacagctcaggcagggtgcagtctggtctttgtggccctctaataggctgattgggacatttcttattctcttaccccaagtgaaagcccctcagggaaaaaaccagaagtcctttgtcttcatcctggagcccaagcagcagggcgatcctccggtggagtttgccacagacagggtggaggagctctttgagtggtttcagagcatccgagagatcacctggaagattgacaccaaggtaggcacctgctcacccgggtgcaggtgggcctggcattctgagggctttggtgctcagttgggactgtgggtgggtccaggcagcaggatgagcaggcccaggtcctactcagaattcaggaaggagaccaggtggattcagacaattggagcacctcttgttagagagaggcagggatagtggaggtgccctgggaaggtgggtctggttgtctggttcgaaccttcagaaggctgagtgcctgcagcaatgctcattgatgatgtctttgcggccctac

SEQ ID NO: 84392 - DNA, 1043 bp, Homo sapiens
caatggtttatagcctattacgtgttgtacagtcatggccacaatcaattttagaacatttccaacacccaaaaagaaacctcacgctcattagctgctgccactcactccatcccccagaccccggtgacctttaacctactttgtctctgtgattttgctagttctggacacttcatataaatggcatcgtgtgatttgtgatcttttagagttgggctcattcacttagcataatgttttcaaggttcatccaccttgcagcttgttaccttgccttttaaggcccttaaaagattttaaattatctgcctcctgcctgccttttagttctcatgtcatgctgtttttttctcctctgctgggttccactttaagcgtgcagctgcttagacacttttgcagtcaggtaaaggccagaaggtgacatgtagaccaaaggaaaaccgggttagattaagaaataggatctacaggaaatgcagtcattatttcaatgttttgcaataaatcaacagtgtaaagaccaagcactttttaaactgcttgcttcccacacaataaataattgtgttttatctttctttggttaaaataggccctggctcttctgggctaatccaagttgcaaaacttctgccccatgctccctttgggcatgcttgtgagatgccaggttcacattttggtttggaaggtgtagtcaccacatggttgttctctcccctgcatcctccaggagagcgaagaggaactttactcctcctgtcgccagctgaggaggcggcaagaagaactgaacaaccagctctttctgtatgacacacaccagaacttgcgcaatgccaaccgggatgccctggttaaagagttcagtgttaatgagaaccagctccagctgtaccaggagaaatgcaacaagaggtaggtcagcccctccacctgcaaaaacttttggggggtctctaggcacggtgatgatgggcaccacgggccaggcttctggaaagccctctgagttgctttcttcagaaatccttggc

SEQ ID NO: 84393 - DNA, 1050 bp, Homo sapiens
ttgaagatgaaacagtagagcttgatgtgtcagatgaagagatggctagaaggtaaccgtgctgcgcagcagccttctaatctggacctagcattcattggctctcccaggaatgctcctcttaccccacagtgcacggcagctttcaagggagtcccccagtaggacgatgactgtgatcggccttctcttaatggcctacgggggccacagacctgtctcaggctgccagttgagggcccatttccagagctgctggaaatgtgtattttaaaatgtacatctctatttatttagggtaatgcaaacaccaaaatggcaaggaatttaatcactcttagagaagttcataaattgttaaatcagatggtttcttttaatgatagttttctttttcgtaatcttttttattgcatatttggtctgatattcttgacaaggcttgatccctacctttttatttgaaattaaacgtgtgctgcctgtcctcttgacagatatgagaccttggtggggacaattgggaaaaagtttgccagaaagagagaccatgccaattatgaagaagatgaaaatggagacataacaccaattaaagcaaagaagatgttcttaaagccccaggattaagatggatgccttaagcgatggcccaggggtgcttggtggaagtcagcagggcatctggagctcatcccaatggtgtctctatagttattaatactgtaacgtttacttgtaaagagattatcattttagaaacatgctgtttttgaaacagatgtgtgatggatgttgtacatcctttgcttcttggtattcattcagagtggatttttagcccctgatctacaaatgtacattgttacagggctgcttcctaaagattttttttacctcaggtttctcttaatatagttctccagtcactgaccttgaattgacttacataaactactgccaatgtttaaattgcccttatgtttatatttattatgtcaagccaattcgtacatacaatttggaatcaaatgtcataagaatttatta

SEQ ID NO: 84394 - DNA, 1018 bp, Homo sapiens
gctcagacctgtgttcaagaatcaacgtaaatgcaagtacaaaaaagactggaaggaaatattcaaatatactaacagtcctttttatcctcttggtaaggagcttacaggcagtttataaactcatactttattctgctttccaaattacgttccttaaaatgtgctgctttgataattagagaatggaatttttgaaatccctgagaacgaaagacaaaatatgccagaaactttattaaaatgatttggagtagtgtgtcactgtatactgtatgtgtatttttacatacatattatttcctttctgaaaaagaattggaaaaaaatatggtgaggggatgtaaacacaaaagaaactttgcttcaactttggcaaattcaagtttattgtcaatactttagatctttatattatgtagatatttatgcaaattaaatgtggtgtttaagagaggctgtgcctctagcttgctgctcttgtctcctaatgcctttgctgaccaaattaatcagattttatttttaaccctaagttagaaatcttactgtatttttacttcattctactgagaaccataggttgattattttttttattcaaagtgttggcttttgtttgctgtgctttatatatggagaaatgctatttttattttcccatttaggagtttcataatagaagagcagagtttcttactatgtgaagatcttctctatggaagaatgtcattcagaggatttaatcctgaggttgaggtattaaatataattgcttcaaattaaaaatttttccaattgaatttttttctgctaataattgggcttaggtgtttctccaccaggtaccatttctactcattatatagaaaataacaagtcttgaaatatcgccatagctatttaaagaaattggaggcattgcagtctagttttatggtagaggtgagtagataatttcatatagcagtatacagcccttgacagagccaccataaatattaaaatttcaagttgt

SEQ ID NO: 84395 - DNA, 1115 bp, Homo sapiens
ttacttatatatgcaataaatatgatatatgggaagtgtaactccttagctgggtaatttaggtaaattcacttctttctctgaatatctcttttcctcatctttaaaaagaagagcattaggctacatgagttcaagctcctttttaattttgataatacttcttttagtagagttcttcagagaaacagaatcaacaagatgtatatgtgtatatatgtgtatggagagagggggtatttttaaaactggatcacacgactgtggagatgcaagtctaaaatctgcagggtgggccagtaggctggagacccagagaagtactcagtccaagtccaaagacagtctgctggcagaactccctcttcttccagggagaagagggtgagtctcgcagggtagtctctaggttactgggagggtggaaggcacagcgtcctaaactaggagaaactgagttcagaagtctgagaggcaagaaagaaaaagaaaaccatggaaatttccaagaattagagacaattcagtatgtctggaaggcaagtactaagaaatggggttgcagagtaggcaatggtcacaacgtgcagggaatttgaggccagattaaagatattttcctttattttgtgagcaatggaaagctattgaaacggggaacagtatcaagaaaatggcaaatatttatagtactagacaatgattgaagtggtttgcgtatattaacctatgcaattcacataatgacactttgaggtgactacaggcagtaactctcttcttacagctaaggcaactgaaacagaaataagtaatttacccaaagttacacagctaataagtagtgtagacaggacgggaattcaggcagtctggctccagaaccctggctctttattactactctgtactctgtgatgcctgtcactaagcactacttctagagagtagcaaactgttacatgtcatgtttaaagaggtggaatttccaaaagagggaaggaagcattcataatgttttgaaagataggccattcgcagtggctcatgcctgtagtcccagcactttgagaggctgaggtagacaaatcgcttaagcccaggtgtttgagacc

SEQ ID NO: 84396 - DNA, 1118 bp, Homo sapiens
tctgaagcagatatactcacagcacgttcagggggtaatgaagaggctgttatgggtgactatgaatgtgaaggcaacgtgagattggatcagagttagaaagatgacagttgttaatagcatcagtgttattttagccaaaggactttactattgctgtagtgcagtgcctcgcagtacaccatgacagttaagagcccaggcctcgagggaaggttacagtttgaagcccagctctgccactgtagggctgtgtgaccatgggcaagttgcttaacctctgtgcctcagttaccagatctatgaaatgtcggcagtgaaacctagctgatatgactgggatggggattccagagaaccttgtaaacacttggtccagcaaataatatggcctcagaaaatagaagctggatgtgtttacgtacatgaggaaatggacagataggacttaacagaccatggttgtgagtgacttggctgtaagtgtcacagtctcagtttgagtttcctcaaaagcggatgctgtgaggaggatttgagtgcaataaattctcttgggaggtggtccaaggggaagtgtagaggagtgggaaagtgaggcaaggaaggaaaaggaaacagacgaggggtctgttactcaggcaggtactgctctgggtgtctggagcttaactcccctgggaacctttgagaatcagtgtggaatacctgcttccaagccatcccacctgaggggcatgggagctccagattttatgccacaaatctggttggcattgattcaaagctgccccagggggcactgattttgagactactggactactccagcctcagagaaagcagtcagtgaagaggtgtagatatttgcagttggaagttgagccagccctgtaatggaaaagccagaagagacaggagcttggggttgggtggtgagctgtctgtcagtgtctaatgtggtaagtatctgatatggtttggctgtgtccctgcccaaatctcatcttgaattatagctcccatagtccccatgtgtcatgggagggaccctgtcgggggtaactgaagcttaggggcaggttttccctgtgccgttttcatggtagtgaataagt

SEQ ID NO: 84397 - DNA, 1101 bp, Homo sapiens
gtgagacatgcctttactcctccttcgtcttccactgtgattgtgaggcctcctcagccatgtggaactgtgtgtccattaaaactctttttctttataaattacccagtcttgggtatttcatcatagcagtttgaaaatggactaatacagtatccaaaggcataaaaatagtcatgcactttggggaagtaatacacatctgagaagttaaacagaggtaaatacaggaaaatatgtacaaaatacattatattaaatgatatatgaatattgtatatgttttatgcattgtatgtgaaatagtaataatagccaacgcttaggaagtagttgccacatgcctgactctcctaaatgctctgcaaataggttagatttccagcaaatgaaaacaggttaggcagctcaatagaatattacataaccattaaagaggatggttataaagatgatgataatggcatggaaaaatcatatgaatgagaattgaatactaaacaggagattgtgtgtgcagtaggattcctacaaagcaaaacaagcctctaaataaagaaaaagaagggtggaatctgaaaggaatttatcaaaatcctaactgcaattttgttcatgcgttgggattcagagttgttttttcccctctggtttacaagtctccattgatacacttgcgttacatctataatgaaaaatacaagaaacttgaaaaagtacaagaagaaaaaaccttctaaaaaataggtggtaagacccagtgaaagttttaaagaagggaataacataatggaaaatgtatttcagaaaaattaatctgggggcagtgtggaagatggattgaatcaggaaacacccaaggtgagaagtccagcttgaaagcttgtatgagttactgggagtatggaaaagaaagagccaattttagatggttgatcatgaatgagatgatggggaagaaagagaaaagtgccagaaatgattccaacattttaaagcattttgaatggaagaaaataagcaatggaactaatataaatatagttagagagtgagcgcgcaccggctttctttacatttgttgcttgtttaaacctaaca

SEQ ID NO: 84398 - DNA, 1069 bp, Homo sapiens
tgcctttttttttttttttttggtttttaactcattatgaaatccccactgctgagcacaatgctgaacacctttgaagtaattaataaataacgactaaattactgctgtgtagataaggcagataggattaggttctttcaacagtgaggaaatcagagctcattctaacttaagggtttagaagtatcagaggcaggactctgacccgggtctccagactcacaaaacacaatacactataaggtgtacaatagcactgacagatattttttaaaggttcctctcatctcactatactaacacaaatgttttcagttctacaatctacatttccccctccaatttttctcctcttttttgactgccttgatggtttcagtgggtcctggttaagcctgtctttaagtttctaatcaaactaatccaagtgaatttggcttctgaccttgctctcacatatttgccatctctaaatgattgatgtctgcttgatccctgttggaaaagcgtctgaagatatgatccagaaaatctatagttgcaaatctagcataattttaatgaatcgtggtcagaatagtaagaagcattgcacagaaggcttgcataaaaaatatgcatcttctgtcatcttcaccctctacactggcctcccaagtccccatggaaggtatctagtacgggaaactttcttttcctgtaagaatgttgtggccaaacatgctgtgtattggatggatggatgggaggatgatttatattttcatctcggtatagttcataggtctaggatcagaaataaactagaataaatataaatattgcttttcttaacgttggtttaaaatgcaaatgcatggcatacagaaaaaactttttttttttttttagctctgaaagctcaatttttactacatgatttccctagtagaagtactttttgcagggtataagaattttctgtttgcttatctgttttcagtctagaatgttcacttcttaagggcaaggaataggttatgtttaccttcttatctctggagacttgtataatcctagctggtcc

SEQ ID NO: 84399 - DNA, 1184 bp, Homo sapiens
ttctgatctcattctatcaaagttggtagatcctaacatggtgacccagcaagagtctcttttcaaactggctgtcctcgggggtaggagcagagccagggcaaaccgtcagggatgctaagtaaggagcttcaaggggatccaaggcacctccttggactcagacatgcttgggaccgcgttcgtaggacaacttttactgtccattgccacaatgaaacatggcagtgacagatgtaggccctcagtgatcacagatctatatggcagcaatggttcaagtgcagaaatgacaacagtgtttgtgattttacctttttgtgaagctgggttactggggtttctgtcctggaatctctaaacaagtaaccacagggtagttgcttggctcttgcctcaagtgaaccagccaagagatctcgtccaacactggtatagcctggcagcaactgctacttccaggctgtgtctcgaatgccctgctgggctccatgtgtatctgggaacatggtttctgatctacaaatctaagcccctaaatacacaaaagcgctaaggcaaaccatatgccttaggctcacttttaaacctctctgagcttcagcttcctcagctgtaaaaagaagccatgatcacaggcatgtttatgcactaaatcaaataatgaagctcacaagttcagccctggtcatcaccattcaagactctgaagtctatcaaagcagaattcatgttctctggttgcattttccatcaatggagactcagaaatatttattgaataaaacatcaactatgacaacatattttacagtgtaatagtgaaaacatcattcatctgatgacatgcttcttttgaaccattttgggatggttctgatattgtttgtaacaagaaataaagatccgaggatgatcaagtgagcattcaattattcttaccttcatttaaaaaatatattttcaatattaaggaatttgttgttattgttatttacaaagcaataaaataaggtaagaaaaatggagaggcctgggttggtgatttggtcaccaggcagattgagaatggaaagaaaagggaacagggtaaccatgtgaccaatttgcttcttggaaaagggaccaaataggacccagagaggggcttggtcaggcttcctggtcactgccagtgctgagac

SEQ ID NO: 84400 - DNA, 1503 bp, Homo sapiens
cgttctccatttggtgaaactgggctacatttaatcatcacaaacttcaaattgtattatcccactttccagataatgtacagcgtattagcccaacccgctttcttcagaagtgtctttaaacagagatgggctgtatctagataggggtggaatatgccagtgtatcggttagccgttcctataataatgctgcataacaagccatgctaaaattccatggcttacacattgctccataggctgaggggttggctgatctaggctgggctcagctgggcttgactccagactgtgggtttcattcaggtctgctccatggacgtctcattcttctgaggacagcgtgctccttcggaaacattcttttcctgatggagactgaaagtttccaggttagcatatagaaacacatgatgcttcttgaagtctaggtaggaactggtgctcagtcacttccacccactgggcaaagcaagtccaatatcaatgggggaacattctgtttggaagaacttcaaagcctcatagcaaaagcctccatatggggagtagtgaaaaattgggaaaaataatacattcgatcacagctgctttgttttagggtttatataaaagaaataactttaaaaggggttacctccttctcatgcctatatttttaaaagtaagtgtattactctacattgaataacccaagctaaaagtattttatagttaaccttgacctagtatacatactctctcactctcactctccccacacccccaaacccaacaatgaccacagatcttcctttccttccactttcacaacccaaaacttgtcctgttcattctctgctcaaaagcccatcagtgaatccctgttgccattgatatagctcaaaccctcggctagctttacaataaccttcacagtgtgtggtttgtctcttccatcattctgtgtgaatttacttgtctgtctttccacatgttatttcctttgctgggacactctcttttctctctcccacctgcctggtgaattgatgtttattcgtcagagcccagctcaaactttacaacgtctgcacatccttcactaatcccctgcaggcttttctgtttccttatctgtggtttacaagcattttatacatatggctataaagcacttataataatagactggaattagtcattcatgcgccttttgctgctagcctgtgaaatccttgaagatgggggtccatgcctcattcattttctatcgttagcattcatctccatgcctgtaacatggtaggcttcaaataaggtggttggattgaaaagaaggagattttaaaaataagcatttaagaaataaaaaggagaaacagccatggcacaaacagttatgttcaacctcgccattaattaaagacactataaacaaataaaaattatagatcaatttttatttttcaaatagggaattatgtttttagaaagacaagacatagtattgaaaaaaac

SEQ ID NO: 84401 - DNA, 1106 bp, Homo sapiens
ttggggataaattctaaagacagcatatgtctgaaaaggtcctttgtggtttagcctgactgatctctgcagccttctttcaagtctcattcctgctcatctctaagtggcttgacctgcggaattgtcaccttctccaagagccttcccttcctgtcaccctcgcctcttgtccccatcccaagaaaggatctcccctactggtctcactcttggcatcagtgcttttccttcctaggcttcttctcaatttgtaattatgtatttactttcttgttcaggtgtttaatgtccgccttggatgaatataggaacagtctcttccctgcctccctcccttccttgtttctttcccttcttccttcctgtgtgttcaccactctatcctcagcaccctgcccagtgcctggcgcagagtattcagtggatgccttttgaatacatggatgagtggagcgagttacccctctcacaccctacattgaactctccctccttcaataccaaatcacttgtggtttcttgaattggccaagctttcccatcccttcacactggctactcctctgtctggacattgttccttccactgaggttccacctaccctatggtcagcaccattgatgcttcagaaccagccaagattttccttctttgggaacagctctctgaatatcccccagctggctaggtgttctttctccaggctcctgtagacacctgcctggctctctctactcatagtactaaacaaaacagtctgctttcttctgcttgtgcctgtcttaatgctgagctcctgagctgaaggccctcgctcccatgcagcacactaagatcactctggggccagaccaccttggcatgaatcccagtgctgcatttactacctctgctccaggttcctcagctggaaaaggggttcataattgtgtgaacctcatggggatgctgtgaggattcaatgaatcaacacgtgtgtattagtcaaggttctttaaagacacagaactaatgtgatagatgaatatatgaaggggagtttattaggagaattgactcacatcatcacaaggtaaagtcccatcgtaggccatctgcaggc

SEQ ID NO: 84402 - DNA, 1024 bp, Homo sapiens
tgatgggcaccattgcacatgtcaggcccgccctgatgggcaccattgcacatgttaggacccttggctgctggctcatgggagctggataccaaagcatctgctgggacaggagagaatgcctgaacccctttattctggtagaagagtatctaaccaaccaacagaactgtatgtttcttctttaatgtgaataactgtgaaaacaactcttttcatttttatttatagctctctctccccctaaattcacacatgcatctctggggctggagatcagctcaagagatggacaccccattgtttcctgaaacactctcctctctaaccatgaagtcttattcctggactagcctatgtatctgcctctcctctgcccatcacccatgctcatatcattcacattagacctttgtattctgggtgaactggggagatgtggcccttgggttcactttgattacttccttgtaaaaataaacgcttaatagccctgcccactaattttttggatatgatattttaggcccaagccgggagtcatccttccatcactctatatttggaagagggaaggatttgtggcatcaaatatttaaaaataaaagtaaaaatattaaaattaattgagtaacttaattaaaataatagtttaaagtggcagcagggcaaaggagcatttgtagcttcagaaatgtagtgatcattctacagtcttttgaaaagataaacctgacaggaatttctagcgaaaatgaaaattggtgacggttgagcagctgcaaagcaaaagtgaaaaagtccttgagttgtcctagcacagaacgtgctcaccagcgccgttggatcctatccctgataccaaaggatccactgtgaatagcccagcaatttttagcactgcagctgagtaaaacagagtggcagatccaaatgtcattaaacatttataatttcggggaaacccttatttcaaatcaattcttcataaccatttcctcagtaaattcattcaacaagtatt
